United States Patent Application Publication US 2018/0126003 A1 - sequence listing, part 79

SEQ ID NO: 143822 - DNA, 1446 bp, Artificial Sequence
  derived and/or modified sequence
atgggcgctctggcacgtgcgctgccatctatcctacttgctcttctgctgacctccacgccggaggcactcggtgcaaaccccggcttagtggccagaattacagacaagggattacagtatgcggcgcaggagggccttctggccctccaatctgaattgctccggatcactctaccagactttaccggcgacctgcgaataccccacgtgggcaggggcaggtacgagtttcattctcttaacatccactcctgcgagctgttgcacagcgccttgcgccccgtacctggacaggggcttagcctatctatttccgactcctcaatccgggtccagggacgctggaaagtacgtaagtctttcttcaagctgcaaggctcattcgacgtatctgtgaagggcatctcaatctccgttaatctcctcctcggctccgagtcttcaggtcgaccaacagtgactgcctctagctgtagctcagatatagctgacgtggaagttgacatgagtggcgatttagggtggcttctgaacctattccacaatcagatagaaagtaagttccagaaagtcctggagtctcgcatttgcgaaatgattcagaagtcagtgagctcggatttgcaaccctatttgcaaactctgcctgtgactaccgaaatcgactcctttgccgatatagactattctcttgtagaggctccaagggcgacggcccagatgcttgaagtcatgtttaaaggcgaaatctttcacagaaaccaccgcagcccagtgactctcttagcagccgtgatgtccctgcctgaggagcataacaaaatggtgtacttcgcgatcagtgattacgtcttcaatacagcctctctcgtgtatcacgaagaggggtacttaaactttagtatcacagatgacatgataccccccgattccaacatccgcctaacaactaaatctttcagacccttcgtgcctagactggcgcgactctaccccaatatgaacttagagctgcagggcagcgtgccgagcgccccacttctaaacttttccccagggaatctaagtgtagatccatatatggaaatcgacgcatttgtgcttctgcccagcagttctaaagaaccagtctttagactgagcgtcgccaccaatgtgtccgcaaccctgacctttaacaccagtaagataacaggttttcttaagccaggaaaggtgaaagtggagttaaaggagtccaaggtggggctctttaacgccgagctgctggaagcccttctcaattattacattctcaacaccttttatccaaagttcaacgataagctggccgagggctttcccttacccctcttgaaacgggtgcagctctacgatctgggtctccaaattcacaaggatttcctctttcttggggcaaacgtgcagtacatgagggtatag

SEQ ID NO: 143823 - DNA, 1446 bp, Artificial Sequence
  derived and/or modified sequence
atgggcgccctggcccgggccctgcccagcatcctgctggccctgctgctgaccagcaccccagaggccctgggcgccaaccctggcctggtggcccgcatcacagacaagggcctgcagtatgctgcccaggagggcctgctggccctgcagagcgagctgctgcgcatcaccctgcctgacttcaccggggacctgcgcatcccccacgtgggccggggccgctatgagttccacagcctgaacatccacagctgtgagctgctgcacagcgccctgcggcctgtgcccggccagggcctgagcctgagcatcagtgacagcagcatccgggtgcagggccgctggaaggtgaggaagagcttcttcaagctgcagggcagctttgatgtgtctgtgaagggcatcagcatctctgtgaacctgctgctgggcagcgagagcagcggccggcccaccgtgacagccagcagctgcagcagtgacattgctgatgtggaggtggacatgtctggggacctgggctggctgctgaacctcttccacaaccagatcgagagcaagttccagaaggtgctggagagccgcatctgtgagatgatccagaagtctgtgtccagtgacctgcagccctacctgcagaccctgcctgtgaccacagaaattgacagctttgctgacatcgactacagcctggtggaggccccccgggccacagcccagatgctggaggtgatgttcaagggggagatcttccacaggaaccacaggagccctgtgaccctgctggccgctgtgatgagcctgcctgaggagcacaacaagatggtgtactttgccatcagtgactatgtgttcaacacagccagcctggtgtaccacgaggagggctacctgaacttcagcatcacagatgacatgatccccccagacagcaacatccggctgaccaccaagagcttccggccctttgtgccccggctggcccggctgtaccccaacatgaacctggagctgcagggctctgtgcccagcgcccccctgctgaacttcagccctggcaacctgtctgtggacccctacatggagattgatgcctttgtgctgctgcccagcagcagcaaggagcctgtgttccggctgtctgtggccaccaacgtgtctgccaccctgaccttcaacaccagcaagatcaccggcttcctgaagccaggcaaggtgaaggtggagctgaaggagagcaaggtgggcctcttcaatgctgagctgctggaggccctgctgaactactacatcctgaacaccttctaccccaagttcaatgacaagctggccgagggcttccccctgcccctgctgaagagggtgcagctgtatgacctgggcctgcagatccacaaggacttcctgttcctgggcgccaacgtgcagtacatgagggtgtag

SEQ ID NO: 143824 - DNA, 1446 bp, Artificial Sequence
  derived and/or modified sequence
atgggcgccctggcccgggccctgcccagcatcctgctggccctgcttctgacgagcacgcccgaagccctcggtgcaaaccctggtctggtcgctaggatcaccgacaaaggtttgcagtacgctgcgcaggaggggctgctggcactgcagtctgagctgctgagaattaccctgcccgactttactggagacctgcggattccacacgtggggagaggcaggtatgaatttcatagcctgaacattcactcctgcgagctgctccattccgcattgcggccagtccccggtcaggggctatcccttagcatatctgacagctccattcgtgtccagggaaggtggaaagtgcggaaatccttcttcaaactgcagggctcttttgacgtatcggtgaagggcatctctattagtgttaacctccttttgggctccgaatctagcggacggcccaccgttaccgccagctcctgttcttccgacatagccgacgttgaggtcgatatgtctggcgacctgggctggttgctgaacctgttccataatcagatagaatccaaattccagaaggtattagagagccggatttgtgagatgattcagaaaagtgtctccagcgacctccagccttacctccagacacttcccgttaccactgaaatcgactcttttgcggacatcgactatagtctggtcgaagcgccacgcgcaacagcgcagatgttggaagtcatgttcaagggggagatctttcatagaaatcacagaagcccagtgacgctgttggcggctgtcatgagtctcccagaggagcacaacaaaatggtgtactttgctatcagcgactacgtcttcaacaccgcttcattagtttatcatgaggagggctacctgaattttagcatcacagacgatatgatccccccagatagtaatatcagacttactaccaagtcttttcggccgttcgtccctagattagcacggctgtaccccaatatgaacctggaactgcaaggatccgtgccctccgcgccactgctgaatttttcccccgggaacctttctgtcgacccctatatggagatcgatgcctttgtgttactgccttcaagttccaaagagcccgtgtttcggctgtcggtagctaccaatgttagcgcaaccctgaccttcaatacctctaagattaccggcttcctcaaacctgggaaggtgaaggtggagttgaaggaatccaaagtgggcctgttcaatgccgagttacttgaagctctgctcaattattatattctaaacaccttctaccccaaattcaatgacaaactggcggaagggttcccgttgcctctactcaagagagtccagttgtacgatctgggtttgcagatccacaaagacttcctctttctcggggccaatgtgcaatacatgcgggtgtag

SEQ ID NO: 143825 - DNA, 1446 bp, Artificial Sequence
  derived and/or modified sequence
atgggagcgttggcccgagcattgccatcaattttgttagccctgctcctgacttccaccccggaggctctcggcgcaaacccgggactcgtcgctcggattaccgacaaggggctgcagtatgccgctcaggagggccttctggctctacagtccgaactcctgcggattactctacccgatttcacaggcgacctccgtatcccccacgttggcagagggagatatgaatttcattcgctgaacattcactcctgtgaactcctccattcagcactgcgtccagtgccaggacaggggttgtccctgagcatctcagacagcagcattcgtgttcaggggagatggaaggtcagaaagtcatttttcaagctgcaaggctccttcgacgtgtcagtcaaaggcatatccatatccgtaaatctattactcggatcagagtccagcggaagacctaccgttacagcctcaagttgctcctcagatatcgctgacgtggaggtggacatgtctggggacctcgggtggttattgaatctgttccataaccagatcgagtccaagttccaaaaagtcctggagagccgcatctgcgagatgatccagaagtcagtctccagcgatctgcagccatatctgcagacacttccagtgactacagagattgactcttttgctgacatcgactatagtctcgttgaggcacctagggccacggcacaaatgctggaagtgatgttcaaaggggagattttccatcgcaaccaccggagtccagtgaccttgctcgctgcagtgatgtcattgcctgaagagcacaacaagatggtctatttcgcaatttcagattacgtttttaataccgcctctctggtgtaccacgaggagggctaccttaactttagtatcactgatgatatgattccaccggattctaacattagacttacaaccaaaagttttcgacctttcgttcctagattggcgaggctgtaccccaacatgaacctcgaactccagggcagtgtgccaagcgctccactgctcaacttctccccagggaatctgagcgtggatccatacatggaaatcgatgccttcgtcctccttccatcatcctcgaaggaacccgtatttaggttgagcgtcgctaccaacgtgtccgctaccctgactttcaatacctccaagataaccggttttctgaagccaggtaaagtcaaagtcgaattaaaggagtccaaagtgggactctttaacgctgagcttctcgaggccctgcttaattactatattttgaatacgttctatccaaaatttaatgacaaactggcggaaggatttccactgcccctgctcaaacgggtgcagctttatgatcttgggctgcagatccacaaagactttcttttcctgggggctaacgtgcagtatatgcgcgtttag

SEQ ID NO: 143826 - DNA, 1434 bp, Artificial Sequence
  derived and/or modified sequence
atgggcgccttggcccgcgcactgccaagtatattgctcgcattgctacttacttccacccctgaggctttaggtgctaatcccggtctcgttgcgcgcattacagataaggggttacagtacgcagcacaggaggggctgctggccctccaatccgaattgctgcgcattacactccctgactttaccggtgatctgaggatcccacatgtcgggagagggcggtacgaatttcactcactgaacatccattcttgcgagctgctgcacagcgcactgaggcctgtgccaggccaagggctgagcctgtccatcagcgattcgtccattcgggtgcagggcagatggaaggttcgcaagtcatttttcaagctgcagggatcattcgatgtcagtgtaaagggaatttcaatttctgtcaatctcctccttggcagtgaatcaagcggccgccccaccgttaccgctagtagctgttcatccgacattgccgacgttgaagtggacatgtccggcgacctgggatggctgcttaacttgttccataaccagatcgagtcaaaattccagaaggttttggagtcacggatctgtgaaatgatccagaagagcgtgtcgtccgatcttcagccatatcttcagaccttaccagtgaccactgaaatagacagctttgcggacatcgattatagtctggtggaggcacctcgtgccactgcccaaatgctagaggttatgttcaaaggggagatctttcatagaaaccatagaagcccggtgactctactggcggctgtcatgagtctgcctgaagagcacaataagatggtctactttgctatttctgactacgttttcaataccgccagcttagtgtaccatgaagagggatacttaaatttttcaataaccgacgatatgatcccacccgactctaacatacggcttacaaccaagtccttccgaccatttgtgcccaggctggcccggctctatcctaatatgaacctggagctgcagggctccgtgccctcagccccccttctcaactttagtccaggaaatttgagcgtcgatccttatatggagattgatgctttcgtgttactcccatcaagttctaaggagcccgtcttccgcctgtcggtagccacaaatgtgagcgctaccttgaccttcaacacaagcaagataactggatttttaaagcccggcaaggttaaagtcgagttgaaggaatcaaaggtggggctttttaacgcagaactcctggaggcgctgctgaactactatatcctaaataccttctatcccaaatttaatgacaagctcgccgagggctttccactgcccctgctaaagagagtccagttgtacgatctgggcctccagatccacaaagacttcccttcgcgtagggatcaccccccttag

SEQ ID NO: 143827 - DNA, 1434 bp, Artificial Sequence
  derived and/or modified sequence
atgggcgccctggcccgggccctgcccagcatcctgctggccctgctgctgaccagcaccccagaggccctgggcgccaaccctggcctggtggcccgcatcacagacaagggcctgcagtatgctgcccaggagggcctgctggccctgcagagcgagctgctgcgcatcaccctgcctgacttcaccggggacctgcgcatcccccacgtgggccggggccgctatgagttccacagcctgaacatccacagctgtgagctgctgcacagcgccctgcggcctgtgcccggccagggcctgagcctgagcatcagtgacagcagcatccgggtgcagggccgctggaaggtgaggaagagcttcttcaagctgcagggcagctttgatgtgtctgtgaagggcatcagcatctctgtgaacctgctgctgggcagcgagagcagcggccggcccaccgtgacagccagcagctgcagcagtgacattgctgatgtggaggtggacatgtctggggacctgggctggctgctgaacctcttccacaaccagatcgagagcaagttccagaaggtgctggagagccgcatctgtgagatgatccagaagtctgtgtccagtgacctgcagccctacctgcagaccctgcctgtgaccacagaaattgacagctttgctgacatcgactacagcctggtggaggccccccgggccacagcccagatgctggaggtgatgttcaagggggagatcttccacaggaaccacaggagccctgtgaccctgctggccgctgtgatgagcctgcctgaggagcacaacaagatggtgtactttgccatcagtgactatgtgttcaacacagccagcctggtgtaccacgaggagggctacctgaacttcagcatcacagatgacatgatccccccagacagcaacatccggctgaccaccaagagcttccggccctttgtgccccggctggcccggctgtaccccaacatgaacctggagctgcagggctctgtgcccagcgcccccctgctgaacttcagccctggcaacctgtctgtggacccctacatggagattgatgcctttgtgctgctgcccagcagcagcaaggagcctgtgttccggctgtctgtggccaccaacgtgtctgccaccctgaccttcaacaccagcaagatcaccggcttcctgaagccaggcaaggtgaaggtggagctgaaggagagcaaggtgggcctcttcaatgctgagctgctggaggccctgctgaactactacatcctgaacaccttctaccccaagttcaatgacaagctggccgagggcttccccctgcccctgctgaagagggtgcagctgtatgacctgggcctgcagatccacaaggacttccccagccggcgggaccaccccccatag

SEQ ID NO: 143828 - DNA, 1961 bp, Artificial Sequence
  derived and/or modified sequence
gatgtcgcaagcaggttccagtccctgtgcctccccttcccgctcccaggaacccatccagcctcaggaactgcccccagccatcgagccttggctacttaagggacctgggcccaatccacagctgggacagtcctggcccactgcactgggaatctaggatgggggccttggccagagccctgccgtccatactgctggcattgctgcttacgtccaccccagaggctctgggtgccaaccccggcttggtcgccaggatcaccgacaagggactgcagtatgcggcccaggaggggctattggctctgcagagtgagctgctcaggatcacgctgcctgacttcaccggggacttgaggatcccccacgtcggccgtgggcgctatgagttccacagcctgaacatccacagctgtgagctgcttcactctgcgctgaggcctgtccctggccagggcctgagtctcagcatctccgactcctccatccgggtccagggcaggtggaaggtgcgcaagtcattcttcaaactacagggctcctttgatgtcagtgtcaagggcatcagcatttcggtcaacctcctgttgggcagcgagtcctccgggaggcccacagttactgcctccagctgcagcagtgacatcgctgacgtggaggtggacatgtcgggagacttggggtggctgttgaacctcttccacaaccagattgagtccaagttccagaaagtactggagagcaggatttgcgaaatgatccagaaatcggtgtcctccgatctacagccttatctccaaactctgccagttacaacagagattgacagtttcgccgacattgattatagcttagtggaagcccctcgggcaacagcccagatgctggaggtgatgtttaagggtgaaatctttcatcgtaaccaccgttctccagttaccctccttgctgcagtcatgagccttcctgaggaacacaacaaaatggtctactttgccatctcggattatgtcttcaacacggccagcctggtttatcatgaggaaggatatctgaacttctccatcacagatgacatgataccgcctgactctaatatccgactgaccaccaagtccttccgacccttcgtcccacggttagccaggctctaccccaacatgaacctggaactccagggatcagtgccctctgctccgctcctgaacttcagccctgggaatctgtctgtggacccctatatggagatagatgcctttgtgctcctgcccagctccagcaaggagcctgtcttccggctcagtgtggccactaatgtgtccgccaccttgaccttcaataccagcaagatcactgggttcctgaagccaggaaaggtaaaagtggaactgaaagaatccaaagttggactattcaatgcagagctgttggaagcgctcctcaactattacatccttaacaccttctaccccaagttcaatgataagttggccgaaggcttcccccttcctctgctgaagcgtgttcagctctacgaccttgggctgcagatccataaggacttcctgttcttgggtgccaatgtccaatacatgagagtttgaggacaagaaagatgaagcttggaggtcacagctggatctgcttgttgcatttccagctgtgcagcacgtctcagagattcttgaagaatgaagacatttctgctctcagctccgggggtgaggtgtgcctggcctctgcctccaccctcctcctcttcaccaggtgcatgcatgccctctctgagtctggactttgcttcccctccaggagggaccaccctccctgactggcctgggatatctttacaagcaggcactgtatttttttattcgccatctgatccccatgcctagcagagtgctggcacttagtaggtcctcaataaatatttattaaatgatgagatgatggaa

SEQ ID NO: 143829 - DNA, 1587 bp, Artificial Sequence
  derived and/or modified sequence
gggacagtcctggcccactgcactgggaatctaggatgggggccttggccagagccctgccgtccatactgctggcattgctgcttacgtccaccccagaggctctgggtgccaaccccggcttggtcgccaggatcaccgacaagggactgcagtatgcggcccaggaggggctattggctctgcagagtgagctgctcaggatcacgctgcctgacttcaccggggacttgaggatcccccacgtcggccgtgggcgctatgagttccacagcctgaacatccacagctgtgagctgcttcactctgcgctgaggcctgtccctggccagggcctgagtctcagcatctccgactcctccatccgggtccagggcaggtggaaggtgcgcaagtcattcttcaaactacagggctcctttgatgtcagtgtcaagggcatcagcatttcggtcaacctcctgttgggcagcgagtcctccgggaggcccacagttactgcctccagctgcagcagtgacatcgctgacgtggaggtggacatgtcgggagacttggggtggctgttgaacctcttccacaaccagattgagtccaagttccagaaagtactggagagcaggatttgcgaaatgatccagaaatcggtgtcctccgatctacagccttatctccaaactctgccagttacaacagagattgacagtttcgccgacattgattatagcttagtggaagcccctcgggcaacagcccagatgctggaggtgatgtttaagggtgaaatctttcatcgtaaccaccgttctccagttaccctccttgctgcagtcatgagccttcctgaggaacacaacaaaatggtctactttgccatctcggattatgtcttcaacacggccagcctggtttatcatgaggaaggatatctgaacttctccatcacagatgacatgataccgcctgactctaatatccgactgaccaccaagtccttccgacccttcgtcccacggttagccaggctctaccccaacatgaacctggaactccagggatcagtgccctctgctccgctcctgaacttcagccctgggaatctgtctgtggacccctatatggagatagatgcctttgtgctcctgcccagctccagcaaggagcctgtcttccggctcagtgtggccactaatgtgtccgccaccttgaccttcaataccagcaagatcactgggttcctgaagccaggaaaggtaaaagtggaactgaaagaatccaaagttggactattcaatgcagagctgttggaagcgctcctcaactattacatccttaacaccttctaccccaagttcaatgataagttggccgaaggcttcccccttcctctgctgaagcgtgttcagctctacgaccttgggctgcagatccataaggacttcccctccaggagggaccaccctccctgactggcctgggatatctttacaagcaggcactgtatttttttattcgccatctgatccccatgcctagcagagtgctggcacttagtaggtcctcaataaatatttattaaatgatgag

SEQ ID NO: 143830 - DNA, 1434 bp, Artificial Sequence
  derived and/or modified sequence
atgggcgccctggcccgggccctgcccagcatcctgctggccctgttgttaacttctaccccagaggctttgggtgcgaaccctggactcgttgcacgtattacagataagggcttacagtacgccgcacaggaaggcctcctggcccttcaaagtgagcttctacgcataacactgcctgatttcaccggtgatctgagaattccacacgtgggtcgaggccgctatgagtttcactcccttaatatccactcctgtgagctgcttcattccgccctgcgacccgtgcccggccagggcctgtcattgagcatatctgattcctctataagggtgcaaggcagatggaaggtacgcaagtcattcttcaaactgcagggaagtttcgacgtgagcgtgaaggggatctctatcagcgtgaacctgctcctgggctctgagtcctccggcagacccacagtgacggccagttcttgctcaagcgatattgcagatgtggaggtggacatgtctggagacttaggctggcttcttaatctttttcataatcagatcgagtcgaagtttcagaaagttcttgagtcacgcatatgtgagatgatccagaagtctgtgtcatcagacttacagccgtacttacagacactgccggtaacaacagagatcgacagcttcgccgacattgactatagcctcgttgaagccccgcgagccaccgcccagatgctggaggtgatgttcaagggtgagattttccatagaaaccatagatctccagtgaccttgcttgctgctgtcatgagcttgcccgaagagcataataagatggtatacttcgccatctcggactatgtatttaacactgcttccctggtgtatcacgaggagggttatcttaacttctcaataaccgacgatatgatccctcccgatagcaacatcagactgacaaccaagagtttcaggccgttcgtccctcgtctggcccgactgtaccctaacatgaatctggagctacagggcagcgtacctagcgctcctctactgaattttagcccgggcaacctgagtgttgatccttacatggagatcgacgcattcgtcctacttcccagctcatctaaggaacctgtctttaggctgtcggtggccactaacgtatcggccaccttaacattcaacacttctaagattacaggtttcctcaaacccggaaaggtcaaagtcgaactgaaggaatccaaagtgggtctgttcaacgctgaactgttagaggcgctgctcaactactacattttaaataccttttatcccaaattcaacgacaagcttgccgagggcttccctctgcctcttctgaaacgggtgcagctgtacgatctggggctgcagatccacaaggacttcccttcaagacgggaccaccccccctag

SEQ ID NO: 143831 - DNA, 1434 bp, Artificial Sequence
  derived and/or modified sequence
atgggagccctggccagggctctccccagtattctcctggcgctcttactgacgagtacccccgaagctctgggagctaaccccggtctagtggccaggattacggacaaaggtttgcagtacgctgcccaggagggtttattggcgctgcaatccgagctgctgcgcattaccctccccgatttcacaggagatctgagaatcccccatgttggcaggggcaggtatgaattccactcgctgaacatccactcctgtgaactgctgcattctgcattgaggccggtccctggccagggcctgagtttgtcaatttccgacagctcaatcagagtgcaggggcgatggaaggtccgcaagagtttctttaagttgcagggtagctttgatgtctcggtgaaaggaattagcatctccgtgaatcttctgcttgggagcgagtcctctgggagaccaacagtcaccgccagctcctgctcctcagatatcgctgacgtggaggtcgatatgagtggcgatctgggttggctcctgaatctcttccacaaccagattgaatcaaaattccagaaggtcctggagagtagaatctgtgaaatgattcagaagtccgtttcaagtgatcttcagccttacctgcagacgctaccggtcacaactgaaattgattctttcgccgatatcgattattcactcgtggaagccccacgagccaccgcccagatgttggaggtcatgttcaaaggtgaaattttccatcgcaaccaccgttctcccgtcacgctgctcgcagccgtcatgtctttgccagaggagcacaataaaatggtgtactttgcaatatcagattacgtgtttaacacagcctcgttagtgtatcacgaggaaggctaccttaatttttccattactgatgatatgatcccccctgactccaatatccgactcacgacaaaaagctttagaccgtttgtccctagactggctcggttgtacccgaacatgaacctggagctgcaggggtccgtgccctctgccccactgctgaacttctcacctggcaatttgtctgtggatccttatatggagattgatgctttcgtgcttttaccgtcctcatccaaggagccggtgttcaggctgtcggtggcaacaaacgttagcgccacccttacatttaacacttctaagattactggcttcttgaaacccggtaaggtcaaggtagaactaaaagagagcaaggtcggactatttaacgcggaattgttggaggccctgttgaactactatattcttaacaccttctacccaaagtttaatgacaagctggctgagggcttcccactgcctttactgaagcgtgttcaactatacgacctgggactgcagattcacaaggactttcccagcagaagggatcaccctccatag

SEQ ID NO: 143832 - DNA, 1434 bp, Artificial Sequence
  derived and/or modified sequence
atgggcgccctggccagagccctgcccagcatcctgctggccctgctgctgaccagcacccccgaggccctgggcgccaaccccggcctggtggccagaatcaccgacaagggcctgcagtacgccgcccaggagggcctgctggccctgcagagcgagctgctgagaatcaccctgcccgacttcaccggcgacctgagaatcccccacgtgggcagaggcagatacgagttccacagcctgaacatccacagctgcgagctgctgcacagcgccctgagacccgtgcccggccagggcctgagcctgagcatcagcgacagcagcatcagagtgcagggcagatggaaggtgagaaagagcttcttcaagctgcagggcagcttcgacgtgagcgtgaagggcatcagcatcagcgtgaacctgctgctgggcagcgagagcagcggcagacccaccgtgaccgccagcagctgcagcagcgacatcgccgacgtggaggtggacatgagcggcgacctgggctggctgctgaacctgttccacaaccagatcgagagcaagttccagaaggtgctggagagcagaatctgcgagatgatccagaagagcgtgagcagcgacctgcagccctacctgcagaccctgcccgtgaccaccgagatcgacagcttcgccgacatcgactacagcctggtggaggcccccagagccaccgcccagatgctggaggtgatgttcaagggcgagatcttccacagaaaccacagaagccccgtgaccctgctggccgccgtgatgagcctgcccgaggagcacaacaagatggtgtacttcgccatcagcgactacgtgttcaacaccgccagcctggtgtaccacgaggagggctacctgaacttcagcatcaccgacgacatgatcccccccgacagcaacatcagactgaccaccaagagcttcagacccttcgtgcccagactggccagactgtaccccaacatgaacctggagctgcagggcagcgtgcccagcgcccccctgctgaacttcagccccggcaacctgagcgtggacccctacatggagatcgacgccttcgtgctgctgcccagcagcagcaaggagcccgtgttcagactgagcgtggccaccaacgtgagcgccaccctgaccttcaacaccagcaagatcaccggcttcctgaagcccggcaaggtgaaggtggagctgaaggagagcaaggtgggcctgttcaacgccgagctgctggaggccctgctgaactactacatcctgaacaccttctaccccaagttcaacgacaagctggccgagggcttccccctgcccctgctgaagagagtgcagctgtacgacctgggcctgcagatccacaaggacttccccagcagaagagaccaccccccctag

SEQ ID NO: 143833 - protein, 1064 aa, Artificial Sequence
  derived and/or modified sequence
MMKFRFRRQGADPQREKLKQELFAFNKTVEHGFPNQPSALAFDPELRIMAIGTRSGAVKIYGAPGVEFTGLHRDAATVTQMHFLTGQGRLLSLLDDSSLHLWEIVHHNGCAHLEEALSFQLPSRPGFDGASAPLSLTRVTVVLLVAASDIAALGTEGSSVFFLDVTTLTLLEGQTLAPGEVLRSVPDDYRCGKALGPVESLQGHLRDPTKILIGYSRGLLVIWNQASQCVDHIFLGNQQLESLCWGRDSSTVVSSHSDGSYAVWSVDAGSFPTLQPTVATTPYGPFPCKAINKILWRNCESGGHFIIFSGGMPRASYGDRHCVSVLRAETLVTLDFTSRIIDFFTVHSTRPEDEFDDPQALAVLLEEELVVLDLQTPGWPAVPAPYLAPLHSSAITCSAHVASVPAKLWARIVSAGEQQSPQPVSSALSWPITGGRNLAQEPSQRGLLLTGHEDGTVRFWDASGVALRPLYKLSTAGLFQTDCEHADSLAQAAEDDWPPFRKVGCFDPYSDDPRLGVQKVALCKYTAQMVVAGTAGQVLVLELSDVPVEQAVSVAIIDLLQDREGFTWKGHERLSPRTGPLPWPAGFQPRVLVQCLPPAAVTAVTLHTEWSLVAFGTSHGFGLFDYQRKSPVLARCTLHPNDSLAMEGPLSRVKSLKKSLRQSFRRIRKSRVSGKKRAANASSKLQEANAQLAEQACPHDVEMTPVQRRIEPRSADDSLSGVVRCLYFADTFLRDGAHHGPTMWAGTNSGSVFAYALEVPAAAVGGEKRPEQAVEAVLGKEVQLMHRAPVVAIAVLDGRGRPLPEPYEASRDLAQAPDMQGGHAVLIASEEQFKVFTLPKVSAKTKFKLTAHEGCRVRKVALATFASVACEDYAETCLACLTNLGDVHVFSVPGLRPQVHYSCIRKEDISGIASCVFTRHGQGFYLISPSEFERFSLSARNITEPLCSLDINWPRDATQASYRIRESPKLSQANGTPSILLAPQSLDGSPDPAHSMGPDTPEPPEAALSPMSIDSATSADTTLDTTGDVTVEDVKDFLGSSEESEKNLRNLAEDEAHACAILIK

SEQ ID NO: 143834 - DNA, 3195 bp, Artificial Sequence
  derived and/or modified sequence
atgatgaaatttaggttccgaaggcagggtgcagatccccagagggaaaaactgaaacaggaactgttcgcctttaataaaacagtcgaacatggctttccaaatcagccatccgctctggcatttgatcccgagctacgaatcatggcaatcggcacccgaagtggagctgtgaaaatttatggcgcgcccggagtggagttcaccggcctgcatagagacgcagctactgtgacgcagatgcattttcttacgggtcaggggcggctgctgtccttactggacgatagctcactgcatctgtgggagattgttcaccacaacggctgtgcccacctcgaagaagctcttagcttccagctaccaagccgcccaggttttgatggtgcgagtgctcccctgtctctcacccgcgtgaccgtggttctcttggtcgctgcatccgacatcgctgctttaggcaccgaggggagttccgtgtttttccttgacgtgacgacattgacgctcctggagggccagactctggcacctggggaagtcctccgcagcgtgccggatgactaccgctgcggtaaggcactcgggcctgtggagtctctgcagggtcatctccgcgacccaactaagatcctcattggctatagcaggggtctgctagtcatttggaatcaggcatcccaatgtgtagaccacatatttctgggcaaccaacagttagaaagcttgtgttggggccgcgactcatctacggtagtttccagccactctgacggaagctacgcagtctggtctgtcgacgctgggtcatttccaacactccagccgaccgttgccacaactccgtacggaccgtttccctgcaaggcaatcaataagatcctctggagaaactgcgaatcagggggccattttatcattttcagtggtgggatgcctagagcctcatacggcgacaggcattgtgtcagcgtgctgagggcagagaccttagttacgctggacttcacatctagaatcattgatttctttacagtgcattcaactcggcctgaggatgagttcgacgatccacaggctctcgctgttctccttgaggaagagttggttgtgttagatctacagactcctggatggccagccgtccccgcgccgtatctggcccctctgcattcaagcgcaatcacctgttccgcccatgtggccagtgttccagccaaactgtgggccagaatcgtctccgcgggagagcagcagtccccacagccagtatcgtcggccctgtcctggcctattaccggcggacgaaacctggcacaagagccttcccagcgtggactgcttttgaccgggcatgaggacggaacggtgcggttttgggatgcttcaggagtggcacttcgacccctttacaaattgtcaacggctggactcttccagaccgactgtgagcacgcggactcactggctcaggccgcggaagatgactggcctccgtttcgcaaggtgggatgttttgacccgtacagtgacgatccgcgactgggcgtccaaaaagtggccctgtgcaagtatactgctcagatggtggtagccggtaccgccgggcaggtgctcgtgttagagctcagcgatgtgcccgttgaacaggccgtgtccgtcgcgatcatagatttactgcaggatagagaggggttcacttggaagggccatgagcgactatcaccaaggaccggccctctgccctggcccgccggcttccagccacgcgttttggtccagtgtcttccacctgctgcagtgacagctgtgacacttcacaccgagtggagtctggtggcctttgggacttcccacggattcggcctgttcgattaccagaggaaatcgccagtgctggctcgctgcactctccacccaaacgacagtctggccatggagggacctctgagccgcgtgaagtccctgaagaaaagtctgagacaatcctttaggcgcattcgaaaaagccgggtctccggcaaaaagagagcggcaaacgcaagctcaaagctgcaggaggcgaatgcacaactggccgaacaggcttgcccccacgacgttgagatgacgccagtccagcgcagaatagaacctaggtctgccgacgattcactgtctggcgtggtgcggtgtctgtactttgcagatacatttctgcgagatggggcacaccatggtcctaccatgtgggccggaacgaacagcggatcagtgttcgcctacgcccttgaggtgcccgcagccgcagttgggggagagaaacgcccggagcaggccgtggaagctgtgctggggaaggaggtccagttaatgcaccgggccccagtggttgcaattgccgtcctcgacggtaggggtagaccccttcctgaaccatacgaggcctcacgcgacctggcgcaggcacccgatatgcagggcggacatgcagtactgattgcctccgaagagcagtttaaggtgtttacactaccgaaagtcagcgccaagacaaaatttaagttgactgcccacgagggctgtcgcgttagaaaggtcgcgcttgcgacatttgcgagcgtcgcttgcgaggattacgctgaaacttgtttggcctgcctcaccaatcttggtgatgtgcatgtattcagtgttcctggcttgcgcccacaggtccattactcttgcatccggaaggaagatatcagtgggatcgccagctgcgttttcacgcgccatggccagggattctacctgatttctccctccgaatttgaacgcttctcgctgagtgcaagaaacataacagagcctctttgctcactcgatattaactggccccgagacgcaacccaggcatcctatagaattagggagagcccaaaactgtctcaggccaatggaaccccatccatcctcctagctccccagtcattggatggctcccctgatcccgcacatagtatggggccagatacccccgaacctcctgaggctgcactcagccctatgtccatcgattccgctactagcgcggacacaacgcttgatacaacgggagacgtcaccgtggaagacgtgaaagattttctcgggtcgtctgaggagtctgaaaaaaatttacgtaatctggctgaggacgaagcacacgcctgtgccattttgatcaagtag

SEQ ID NO: 143835 - DNA, 3195 bp, Artificial Sequence
  derived and/or modified sequence
atgatgaagttccgcttccggcggcagggcgctgacccccagcgggagaagctgaagcaggagctgtttgccttcaacaagacagtggagcacggcttccccaaccagcccagcgccctggcctttgatcctgagctgcgcatcatggccatcggcaccaggtctggagctgtgaagatctatggagcccctggggtggagttcaccggcctgcacagagatgctgccaccgtgacccagatgcacttcctgaccggccagggccgcctgctgagcctgctggatgacagcagcctgcacctgtgggagatcgtgcaccacaacggctgtgcccacctggaggaggccctgtccttccagctgcccagcaggcctggctttgatggagccagcgcccccctgagcctgaccagggtgacagtggtgctgctggtggccgccagtgacattgctgccctgggcacagagggcagctctgtgttcttcctggatgtgaccaccctgaccctgctggagggccagaccctggcccctggagaggtgctgcggtctgtgcctgatgactaccgctgtgggaaggccctgggccctgtggagagcctgcagggccacctgcgggaccccaccaagatcctgattggctacagccggggcctgctggtgatctggaaccaggccagccagtgtgtggaccacatcttcctgggcaaccagcagctggagagcctgtgctggggccgggacagcagcacagtggtgagcagccacagtgatggcagctatgctgtgtggagcgtggatgctggcagcttccccaccctgcagcccaccgtggccaccaccccctacggccccttcccctgcaaggccatcaacaagatcctgtggaggaactgtgagagcggcggccacttcatcatcttcagcggcggcatgccccgggccagctatggagacagacactgtgtgtctgtgctgcgggcagagaccctggtgaccctggacttcaccagccgcatcatcgacttcttcaccgtgcacagcaccaggccagaagatgaatttgatgacccccaggccctggccgtgctgctggaggaggagctggtggtgctggacctgcagaccccaggctggccagctgtgcctgccccctacctggcccccctgcacagcagcgccatcacctgcagcgcccacgtggcctctgtgcctgccaagctgtgggcccgcatcgtgtctgctggggagcagcagagcccccagcctgtgagcagcgccctgtcctggcccatcactggaggcaggaacctggcccaggagcccagccagaggggcctgctgctgaccggccatgaagatggcaccgtgcgcttctgggatgccagcggcgtggccctgcggcccctgtacaagctgagcacagctggcctcttccagacagactgtgaacatgctgacagcctggcccaggccgcagaagatgactggccacccttcaggaaggtgggctgctttgacccctacagtgatgacccccggctgggcgtgcagaaggtggccctgtgcaagtacacagcccagatggtggtggccggcacagctggccaggtgctggtgctggagctgagtgatgtgcctgtggagcaggccgtgtctgtggccatcatcgacctgctgcaggaccgggagggcttcacctggaagggccacgagcggctgagccccaggacaggccccctgccctggccagctggcttccagccccgggtgctggtgcagtgcctgcccccagctgctgtgacagctgtgaccctgcacacagagtggagcctggtggccttcggcaccagccacggcttcggcctgtttgactaccagaggaagagccctgtgctggcccgctgcaccctgcaccccaatgacagcctggccatggagggccccctgagccgggtgaagagcctgaagaagagcctgcggcagagcttccgccgcatcaggaagagccgggtgtctgggaagaagagagctgccaatgccagcagcaagctgcaggaggccaatgcccagctggccgagcaggcctgcccccatgatgtggagatgacccctgtgcagaggcgcatcgagcccaggtctgcagatgacagcctgagcggcgtggtgcgctgcctgtactttgctgacaccttcctgagagatggagcccaccacggccccaccatgtgggccggcaccaacagcggctctgtgtttgcctatgccctggaggtgcctgctgctgctgtgggcggggagaagaggcctgagcaggccgtggaggccgtgctgggcaaggaggtgcagctgatgcaccgggcccctgtggtggccatcgctgtgctggatggccggggccggcccctgcctgagccctatgaggccagccgggacctggcccaggccccagacatgcagggcggccatgctgtgctgattgccagcgaggagcagttcaaggtgttcaccctgcccaaggtgtctgccaagaccaagttcaagctgacagcccacgagggctgccgggtgaggaaggtggccctggccacctttgcctctgtggcctgtgaagattatgcagagacctgcctggcctgcctgaccaacctgggagatgtgcacgtgttttctgtgcccggcctgcggccccaggtgcactacagctgcatcagaaaagaagacatcagcggcatcgccagctgtgtgttcaccaggcatggccagggcttctacctgatcagccccagcgagtttgagcgcttcagcctgagcgccaggaacatcacagagcccctgtgcagcctggacatcaactggcccagagatgccacccaggccagctaccgcatccgggagagccccaagctgagccaggccaacggcacccccagcatcctgctggccccccagagcctggatggcagcccagaccctgcccacagcatgggccctgacaccccagagcccccagaggccgccctgagccccatgagcattgattctgccaccagcgctgacaccaccctggacaccactggagatgtgacagtggaggatgtgaaggacttcctgggcagcagcgaggagagcgagaagaacctgaggaacctggctgaagatgaggcccacgcctgtgccatcctgatcaagtag

SEQ ID NO: 143836 - DNA, 4260 bp, Artificial Sequence
  derived and/or modified sequence
cgcctggcgccccgcccgcgccttaggacccgcggggccgcgcggcgcatcctgcgggcggcggcggcgggcgaggcgcctgcagccgggcgcaagatgatgaagtttcggttccggcggcagggcgccgacccgcagcgcgagaagctcaagcaggagcttttcgccttcaacaagactgtggagcatggcttccccaatcagcccagcgccctggccttcgacccggaacttcgcatcatggccatcggcaccaggtctggggctgtcaagatctatggtgcacctggcgtggagttcacaggcctgcaccgggatgcagccactgtcacacagatgcacttcttgaccggccagggccgcctcctgtccctgcttgatgacagcagtctgcatctctgggagattgtccaccataatggctgtgcccacctggaagaagcactcagtttccagctgcccagccggcccggctttgatggtgccagtgctccgctcagccttacccgagtcacagtggtcctgctggtggctgccagcgacatagcagccctgggcactgagggcagcagtgtcttcttcctggatgttaccaccctgaccctgctcgaggggcagacgcttgccccaggcgaggttctgcgcagcgtgccagacgactaccgctgtgggaaggcactgggccccgtggagtcactccagggacacctgcgggaccccacaaagattctcattggctacagccggggcctgctggtcatctggaaccaggcctcgcagtgtgtggaccacatcttcctggggaaccagcagctggagagcctatgctgggggcgtgatagcagcactgtggtcagctcacacagcgatggcagctatgctgtctggtctgtggatgccggcagcttcccaacgctgcagcccacggtagccaccacaccttacggcccctttccctgcaaggccattaacaagattctgtggcggaactgtgaatctgggggccactttatcatcttcagcggtggcatgccccgtgccagctatggtgaccgccactgtgtaagtgtgcttcgagccgagacattggtgacgctggacttcacttcccgcatcatcgacttcttcacagtgcacagcacacggcccgaggatgaatttgatgacccccaggccctggctgtgctgctggaagaggagctggtggtgctggacctgcagactcctggctggccagctgtgcctgccccatacctggccccgctgcactcctctgcaatcacttgctcggcccacgtggccagtgtccccgccaagctgtgggcccgcattgtgagcgctggcgagcagcagagcccccagcctgtctccagtgccttgagctggcccatcactgggggccgaaacctggcccaggagccgtcacagcgagggctgctgctgacgggccatgaggacggcaccgtgaggttctgggatgcctcgggtgtggcgctgcggccgctctataagctgagcacagctggcctcttccagacagactgtgagcacgctgacagcctggcccaggctgccgaggacgactggccacccttccgcaaggtgggctgcttcgatccctacagtgacgatccccggcttggcgtgcagaaggttgctctctgcaagtatacagcccagatggtggtggctggcactgcaggccaggtgctggtactggagcttagtgatgtgccggtggagcaggcggtcagcgtggccatcatagacctcctccaggaccgcgagggcttcacatggaagggccacgagcggctgagcccacgcacggggccgctgccctggcctgctggcttccagccccgtgtcctggtgcagtgcctgccgccagctgctgtaaccgctgtcacactccacaccgagtggagcctcgtggcttttggcaccagtcatggctttggcctcttcgactaccagcgcaagagccctgtgctggccaggtgcactcttcaccccaatgactccctggccatggagggtccgctctcccgggtgaagtctctcaagaagtcactgcgccagtctttccggcgcattcgcaagagtcgtgtctctggcaagaagcgggctgctaatgccagcagcaagttgcaggaagccaatgcacagctggctgagcaggcctgcccccacgacgtggagatgacgcccgtgcagcgccgcattgagccccgctctgccgatgactccttgtcgggtgtcgtgcgttgcctatactttgccgacacattccttcgagatggggcccaccacgggcccaccatgtgggctggcaccaactcaggctctgtgttcgcctatgcactggaggtgccggcagcagcagtgggtggtgagaagcggcctgagcaagcggtggaggccgtgctgggcaaggaggtgcagctgatgcaccgggcgcctgtggtggccattgccgtgttggacgggcgtggccgcccactgcccgagccctacgaggcctcacgggacctggcgcaggcacctgacatgcagggtggtcacgctgtgctcatcgcatctgaggagcagttcaaggtgttcacactgcccaaggtgagcgcgaagaccaagttcaagctgacggcccatgagggctgtcgtgtgcgcaaggtggcactggccacgtttgccagtgtggcctgcgaggactatgctgagacctgcctggcctgcctcaccaacctgggtgacgtccacgtcttctcggtgcctggcctgcggccccaggtgcactattcctgcatccggaaggaggacatcagcggcatcgcttcgtgcgtctttacgcgccatggccagggcttttacctgatatccccatcagaatttgaacgcttctccctaagtgcccggaacatcacagagccgctctgctctctggacattaactggccccgcgatgccacccaggccagttacaggatccgagagtcacccaagctgagccaggctaacgggaccccaagcatcctgctggccccacagagccttgatggaagccctgatccagcccacagcatgggacctgacaccccggagccacccgaggctgcactctcacccatgtccatcgactcagccaccagtgctgacaccacgctggacacgacaggggacgtcacagtggaagatgtgaaggatttcctgggctcctctgaggagtcagagaagaacctgaggaacctggcagaagacgaggcccacgcctgtgccatcctgatcaaatgaggaaggccagaactatcccgacctccacctgccctgctcggagctggagtgctggatccctggcacctgcctggccccttaacatagaaccacgcctgctaacctgtaggctccactgggacctgctgtcctgtcccgcctgaccctgggccctggagcagcaccagccccagggtgtgggcctgggacctgggccagaactgagccctcctgcaggcatttggctgccctgggggcccactgcctagggaagaggacaggtggggcccagcacctgtgccacctccccccctccacacaccatccttccccctcactttgcagagtatttttccttttttttttttttcttaaagacggagtcttgctctgtcgcccaggctggagtgcagtggccccatctctgctcactgcaagccccgccttctgggttcccgccattcttctgcctcagcctcccaagtagctgggactacaggcgcccaccaccacgcccagctaattttttctgtatttttagtagagatggggtttcaccatgttagccaggatggtctcgatctcctgacctcgtgatccacccacctcagcctcccaaagtgctgggattacaggcgtgagccaccatgcccagccctgcaaagagtatttttctagcgcctgggctggacagttgtttctaaaactaaactattttggtacctgcttctgggccagtccccagcctgtcatgagtgtgtgtgtgcgggcatggatgtgactgggagctctgctgggcacccacatctggggcctagtcaggtgtgtgtgtccggcggggggggggggcaggggggggggtcaagatgagtttccctgtagattgtaccttggggtttttttctgtcgttttgttaaaattagcgccattttaatattaaaaatactgatttttaatattgaaaataaaagcatttaatatctcttaaa

SEQ ID NO: 143837 - DNA, 3195 bp, Artificial Sequence
  derived and/or modified sequence
atgatgaagttccggttccggcggcagggcgccgacccccagcgggagaaattgaaacaggaacttttcgccttcaacaagactgtcgagcatggctttcctaaccagccttcagcccttgcttttgacccagaactgagaataatggctattggcaccagatctggcgctgtgaaaatctacggtgctccaggggtagagttcaccggcctccacagagacgccgctactgtgacacagatgcacttcctgaccggtcaaggtagactcctgtcgctgctggatgactcatctctgcacctatgggagatcgtccaccataatgggtgtgcgcaccttgaggaggccctcagcttccagctgccatctcgccccggcttcgatggtgcctctgcccccctgtcgctgacaagggtgaccgtcgtgctgctggtcgccgcgtctgatattgctgccctgggaaccgagggcagctctgtgttcttcctggacgtgaccacccttaccctacttgaaggccaaacgttggcccccggagaggtgctgaggtccgttcctgacgattacaggtgcggtaaggcgttggggccagttgagagtctgcagggtcatctccgggatccaacgaagatcctcatcggctacagtcgaggcctgctggtgatatggaaccaagcctcccaatgtgttgaccacatattcttaggaaaccagcagctcgagtctctgtgctggggacgcgactccagtactgtcgtttcttcacattcggatggtagctacgctgtgtggtcggtagatgccggttcatttccaacattacagcctaccgtggccacgacaccttatgggccgttcccatgcaaggccatcaacaagatcctatggcggaattgcgagagcgggggacacttcatcatcttctcaggaggcatgcctcgagccagttacggcgatcggcactgcgtctccgtgttacgcgccgaaactttggtgacactggacttcacatccaggattattgacttctttacagtgcattcaacaagacccgaagacgagtttgatgacccacaagcactcgccgttctgctcgaggaggagctcgtagtgttagacctccagacccccggctggcccgcagtgcccgcgccttacttggcgcccctgcattcatctgccatcacctgctcggcccacgtcgcatccgttccagctaaactatgggctaggatcgtgagcgccggggagcagcagtctccacagccagtgtcatcggccctcagctggccgattacgggcggaaggaacttggcacaggaaccgtcccagaggggcctgctgctcactggccacgaggatggtaccgttaggttctgggacgcatcgggtgtggctctccggcctctgtataagctgtcaacggccgggttgtttcagactgactgcgaacacgcagatagtttggctcaggcagctgaggatgattggcctccatttaggaaggtgggctgctttgatccttatagcgacgaccctcgcttaggggtgcagaaagtagcactctgcaagtatacggctcagatggtcgttgcaggtaccgctggccaggtactcgtactagagctgtcagacgtcccagtggagcaggctgtaagtgttgccatcatagatttgctgcaagatagggagggatttacctggaaggggcacgaacggctatctcctcgaaccggccccttaccttggcctgctggtttccagcctcgggtgttggtgcagtgtctgccccccgctgccgtcacagcggtgaccctgcacaccgaatggagcttagtcgctttcggcacgtctcacggttttgggttatttgactaccagagaaaatctccagtgctggcaaggtgcactcttcatcccaacgattccctggccatggaagggccactgtcccgagtgaagtccctgaagaaatccctgagacagagctttcgccggatcaggaaatcacgcgtgtctggtaagaaaagagctgctaacgcctccagcaagttgcaggaggcaaatgcccagttagccgaacaggcatgcccacacgatgtggagatgaccccagttcagcggaggatagaaccccggagcgccgacgacagtctgagcggggtggtcaggtgcctgtactttgctgataccttcctgagggatggtgcccaccacgggcccaccatgtgggccggtaccaattctgggtcggtctttgcatatgctttggaagtgcctgccgccgccgttggtggagaaaagcgacccgagcaagcagttgaggctgtcctgggtaaggaagtgcagttaatgcacagggctccagtggtcgccatagctgttctggacgggcgcgggcggcccctccctgagccctacgaggccagtagagaccttgcacaggctccagacatgcagggagggcacgccgtcctgattgcatcggaagagcagtttaaagtttttaccctgcctaaggtgtctgccaaaacaaaattcaaactgaccgcacacgaaggatgtcgcgtccggaaggtcgcccttgccacctttgcaagcgtcgcgtgcgaagactacgccgagacctgcctcgcctgcctgaccaaccttggggacgtgcatgtgttctcagtccccggactgcgcccgcaggtgcactactcttgcattcggaaggaagatatctctgggattgccagctgtgtctttacgcggcatggccagggcttttacctgatcagtccaagcgaattcgaaaggttctcactgtccgccaggaacataacagagccgctgtgtagtctcgatattaattggcctagagacgctactcaggcatcttatcggattcgtgaatcccccaaactctcgcaggctaatggcacacccagcattctgctggctcctcagtccctcgacgggtccccggatcccgcccattctatgggaccagacaccccagaaccccccgaggcagccctgagtcctatgtccattgattctgcgacttcggccgacactacattggatacaaccggggacgtgactgtagaggacgtgaaagattttctcggcagctctgaggagtccgaaaagaatctcagaaatcttgccgaggatgaagcccacgcctgcgcgattctcatcaagtag

SEQ ID NO: 143838 - DNA, 3195 bp, Artificial Sequence
  derived and/or modified sequence
atgatgaagttcaggttcagacgacagggcgctgatccccagagggagaaactgaaacaggagttgtttgctttcaataaaactgtggagcatggatttccaaatcagccaagcgcactggcctttgatcctgaattacgcattatggccatcggaactcggtctggagccgtgaaaatctacggcgctcctggggtggagttcacaggacttcaccgggacgctgctaccgttactcagatgcatttcctaacaggccaagggagactgttatctctcctcgatgatagcagtctgcacctttgggaaatagtccaccataacggctgtgcccaccttgaagaggctttgagttttcagctgcctagcagaccaggatttgatggagccagtgcaccgttgtctctaactcgggtgacagttgtactcttagtggccgcttctgacatagcagccctgggaacagaaggttctagtgtattctttctggacgttacaacccttacactgcttgagggtcagacactggcccctggcgaagttctaaggagcgtgcccgacgattacaggtgcggcaaagccctgggccctgttgaatcgttgcagggccatctgcgcgaccccactaaaatcctcatcgggtactctagagggctactggtcatctggaatcaggcatcccagtgtgtggaccatatatttttggggaaccagcagctggaatcactctgctggggcagagattctagtaccgtcgtgagcagccatagtgacggctcatacgctgtgtggagcgttgacgctggttcattcccaacactgcagccgaccgtggccaccaccccctacggcccattcccatgtaaagccattaacaagattctttggaggaattgtgaatctggtggtcacttcataatcttctcagggggaatgcctcgcgcatcctacggggacagacattgtgttagcgtgctgcgtgcggaaaccttggtcaccctggattttaccagcagaattattgactttttcacagtccactcgactcgcccagaagatgagttcgatgaccctcaggctctggcagtccttctggaagaggaactggtcgtcctggatctgcaaactcccggttggcctgccgttcctgcaccttatctcgctccattgcactccagcgccattacatgttcagcgcatgtcgcaagtgtcccagccaagctctgggcacgtattgtttccgccggtgagcaacagagccctcaaccagttagcagcgccctgagttggcctattaccgggggtcgcaatttagctcaggagccctctcaaagaggtctgctcctgaccggtcacgaggacggaactgttcggttctgggacgcttctggggtggccctgcgcccactctataaattgtctactgcaggattgttccaaactgattgtgagcacgcagactctctcgctcaggccgctgaggacgattggcccccttttcggaaggtgggatgtttcgacccatactccgacgatccccgattaggtgtgcagaaggtggcactgtgcaaatacaccgctcagatggttgtggctgggaccgctggccaggtgctggtgttagaactcagcgatgtgcccgtggaacaggccgtgagtgttgcaataattgacctcctgcaggacagagaaggcttcacttggaaaggtcacgaaagactgtccccgcgaaccggaccactgccctggcctgccggatttcagccacgcgtattagtccagtgtctgccacctgctgccgtgactgcggtgactctccataccgaatggagcctggtggcgttcggaacatctcacggtttcggcctgtttgactaccagcgcaaaagcccggtactggccaggtgcaccttacatcctaacgacagccttgccatggaagggccactaagtcgcgttaagtctctcaaaaagtcactgcgccagagctttaggcgaatccgaaaatcccgggtctccggcaaaaagcgcgcagcgaacgcttcctctaagttacaggaggcaaatgcccagctggccgagcaggcctgccctcatgacgtggaaatgacaccagtgcaaaggagaattgagcctcgctcagctgatgatagtctgagtggtgtcgttagatgcctgtattttgccgacacgttcctcagggacggcgctcaccatggcccaacaatgtgggccggaactaattctggcagcgttttcgcctacgctttggaggtgcccgcagcagccgtcggcggtgagaaaagacctgaacaggccgtggaagccgttttgggcaaggaagtgcagctgatgcacagggcaccggtcgtggccatcgcggtattagatggacggggaaggcccttgcctgaaccttacgaggctagccgggatctggcccaggctcccgacatgcaagggggtcatgcggtcttgattgccagcgaggagcagttcaaagtgtttactctgcctaaagtctctgccaagaccaaatttaagctgactgctcacgagggctgtcgagtccgcaaagttgccctggctacgtttgcctcggtggcctgcgaagattacgctgagacctgtctagcgtgtcttactaatctgggcgacgtccatgttttctcagtgcccggactccgcccacaggttcactattcctgtatcaggaaagaggacatatcaggcatcgccagttgtgttttcaccagacacgggcagggtttctatttgatatccccttcagaattcgaaaggttttcgctttctgctagaaatattaccgagcccttgtgcagcctcgacatcaattggccacgagatgccacccaagcttcttaccgaattcgtgaaagccccaagctgtcccaggcaaatggtaccccaagcatcctgctggctcctcaatcactggatggatcaccagatccagcccattcaatgggcccagacacccccgagcctcccgaggcagcattgtctcctatgtcgatcgacagcgcaacctccgccgacacaaccctggatacaactggcgacgtcacggtagaggacgtaaaggatttcctcggatcttctgaagaaagcgagaaaaatctgcgcaacctggcggaggacgaggcccatgcttgcgcaattctcatcaagtag

SEQ ID NO: 143839 - DNA, 3195 bp, Artificial Sequence
  derived and/or modified sequence
atgatgaagttcagattcagaagacagggcgccgacccccagagagagaagctgaagcaggagctgttcgccttcaacaagaccgtggagcacggcttccccaaccagcccagcgccctggccttcgaccccgagctgagaatcatggccatcggcaccagaagcggcgccgtgaagatctacggcgcccccggcgtggagttcaccggcctgcacagagacgccgccaccgtgacccagatgcacttcctgaccggccagggcagactgctgagcctgctggacgacagcagcctgcacctgtgggagatcgtgcaccacaacggctgcgcccacctggaggaggccctgagcttccagctgcccagcagacccggcttcgacggcgccagcgcccccctgagcctgaccagagtgaccgtggtgctgctggtggccgccagcgacatcgccgccctgggcaccgagggcagcagcgtgttcttcctggacgtgaccaccctgaccctgctggagggccagaccctggcccccggcgaggtgctgagaagcgtgcccgacgactacagatgcggcaaggccctgggccccgtggagagcctgcagggccacctgagagaccccaccaagatcctgatcggctacagcagaggcctgctggtgatctggaaccaggccagccagtgcgtggaccacatcttcctgggcaaccagcagctggagagcctgtgctggggcagagacagcagcaccgtggtgagcagccacagcgacggcagctacgccgtgtggagcgtggacgccggcagcttccccaccctgcagcccaccgtggccaccaccccctacggccccttcccctgcaaggccatcaacaagatcctgtggagaaactgcgagagcggcggccacttcatcatcttcagcggcggcatgcccagagccagctacggcgacagacactgcgtgagcgtgctgagagccgagaccctggtgaccctggacttcaccagcagaatcatcgacttcttcaccgtgcacagcaccagacccgaggacgagttcgacgacccccaggccctggccgtgctgctggaggaggagctggtggtgctggacctgcagacccccggctggcccgccgtgcccgccccctacctggcccccctgcacagcagcgccatcacctgcagcgcccacgtggccagcgtgcccgccaagctgtgggccagaatcgtgagcgccggcgagcagcagagcccccagcccgtgagcagcgccctgagctggcccatcaccggcggcagaaacctggcccaggagcccagccagagaggcctgctgctgaccggccacgaggacggcaccgtgagattctgggacgccagcggcgtggccctgagacccctgtacaagctgagcaccgccggcctgttccagaccgactgcgagcacgccgacagcctggcccaggccgccgaggacgactggccccccttcagaaaggtgggctgcttcgacccctacagcgacgaccccagactgggcgtgcagaaggtggccctgtgcaagtacaccgcccagatggtggtggccggcaccgccggccaggtgctggtgctggagctgagcgacgtgcccgtggagcaggccgtgagcgtggccatcatcgacctgctgcaggacagagagggcttcacctggaagggccacgagagactgagccccagaaccggccccctgccctggcccgccggcttccagcccagagtgctggtgcagtgcctgccccccgccgccgtgaccgccgtgaccctgcacaccgagtggagcctggtggccttcggcaccagccacggcttcggcctgttcgactaccagagaaagagccccgtgctggccagatgcaccctgcaccccaacgacagcctggccatggagggccccctgagcagagtgaagagcctgaagaagagcctgagacagagcttcagaagaatcagaaagagcagagtgagcggcaagaagagagccgccaacgccagcagcaagctgcaggaggccaacgcccagctggccgagcaggcctgcccccacgacgtggagatgacccccgtgcagagaagaatcgagcccagaagcgccgacgacagcctgagcggcgtggtgagatgcctgtacttcgccgacaccttcctgagagacggcgcccaccacggccccaccatgtgggccggcaccaacagcggcagcgtgttcgcctacgccctggaggtgcccgccgccgccgtgggcggcgagaagagacccgagcaggccgtggaggccgtgctgggcaaggaggtgcagctgatgcacagagcccccgtggtggccatcgccgtgctggacggcagaggcagacccctgcccgagccctacgaggccagcagagacctggcccaggcccccgacatgcagggcggccacgccgtgctgatcgccagcgaggagcagttcaaggtgttcaccctgcccaaggtgagcgccaagaccaagttcaagctgaccgcccacgagggctgcagagtgagaaaggtggccctggccaccttcgccagcgtggcctgcgaggactacgccgagacctgcctggcctgcctgaccaacctgggcgacgtgcacgtgttcagcgtgcccggcctgagaccccaggtgcactacagctgcatcagaaaggaggacatcagcggcatcgccagctgcgtgttcaccagacacggccagggcttctacctgatcagccccagcgagttcgagagattcagcctgagcgccagaaacatcaccgagcccctgtgcagcctggacatcaactggcccagagacgccacccaggccagctacagaatcagagagagccccaagctgagccaggccaacggcacccccagcatcctgctggccccccagagcctggacggcagccccgaccccgcccacagcatgggccccgacacccccgagccccccgaggccgccctgagccccatgagcatcgacagcgccaccagcgccgacaccaccctggacaccaccggcgacgtgaccgtggaggacgtgaaggacttcctgggcagcagcgaggagagcgagaagaacctgagaaacctggccgaggacgaggcccacgcctgcgccatcctgatcaagtag

SEQ ID NO: 143840 - DNA, 7520 bp, Artificial Sequence
  derived and/or modified sequence
ctagctccaggacacgcgcgccccgagcctgggaggcatgctgaagccaggcggccggcaggatgagtgtgaaagaggcaggcagctcgggccgccgggagcaggcggcctaccacctgcacatctacccccagctgtccaccaccgagagccaggcctcgtgccgcgtgactgccaccaaggacagcaccacctcggacgtcatcaaggacgccattgccagcctgcggctggacggcaccaaatgttatgtgctggtggaggtcaaagagtcgggaggcgaggaatgggtgctggacgccaacgactcgcctgtgcaccgggtgctgctatggccccggcgggcacaggacgagcaccctcaggaggatggctactacttcctgctgcaggagcgcaacgcagatggaaccatcaagtacgtgcatatgcagctggtggcgcaggccacagccacccggcgcctagtggagcgtggcctcctgccacggcagcaggcggactttgatgacctgtgtaacctccccgagctaaccgagggcaacctcctgaagaacctcaagcaccgcttcctgcaacaaaagatctacacgtacgcggggagcatcctggtggccatcaacccctttaagttcctgcccatctacaaccccaagtacgtgaagatgtatgagaaccagcagctgggcaagctggagccacacgtcttcgcgctggccgacgtggcctactacaccatgctcaggaagcgcgtgaaccagtgcatcgtgatctcgggtgagagcggctccggcaagacccagagcaccaacttcctcatccactgcctcaccgccctcagccagaagggctacgccagcggcgtcgagaggaccatcctgggtgctggccctgtgctggaggcttttggaaatgccaagacagcccacaacaacaactccagccggtttgggaaattcatccaagtcagctacctagagagtggcatcgtgagaggagctgtcgtcgagaaatatctgcttgaaaagtctcgcctggtgtctcaggagaaggatgagaggaactaccatgtgttttattatttgttacttggggtcagcgaggaagagcgccaagaatttcagctcaagcagcctgaagattatttctacctcaaccagcataacttgaagattgaagatggggaggacctgaagcatgactttgagaggctcaagcaggccatggagatggtgggcttcctccccgccaccaagaagcagatttttgccgtcctctcggccatcctgtacctgggcaacgtcacttataagaagagagctacaggccgagaggaagggttggaggtcgggccacccgaggtgctggacaccctgtcgcagcttctgaaggtgaagcgagaaatcttggtggaggttctgaccaaaagaaaaacggtgaccgtcaacgacaagcttatccttccctacagcctcagcgaggccatcactgcccgcgactccatggccaagtctctgtacagcgccctgttcgactggattgtgctgcggatcaaccacgcactcctcaacaagaaggacgtggaagaggcagtctcgtgcctgtccattggggtcctggacatcttcgggtttgaagacttcgagaggaacagctttgagcagttctgcatcaactacgccaatgagcagctgcagtattacttcaaccagcacatcttcaagctggagcaggaggaatatcagggcgaggggatcacgtggcacaacatcggctacacagacaatgtcggctgcatccatctcatcagcaagaaacccacgggcctcttctacctgctggacgaggagagcaacttcccccacgccacgagccagaccctgctggccaagttcaaacagcaacatgaggacaataagtacttcctgggcaccccggtcatggagccagctttcatcatccagcacttcgcagggaaggtgaaatatcagatcaaggacttccgggagaagaacatggactacatgcggccagacatcgtggccctgctgcggggcagtgacagctcctacgtgcgggagctcatcggcatggaccccgtggccgtgttccgctgggccgtgctccgggctgctatccgggccatggcagtgcttcgggaggccggacgcctgcgggccgagagggccgaaaaggctgcaggtatgagcagccctggtgcccaaagtcacccagaagagctgccaagaggagccagcaccccttcggaaaaactttaccgcgatttgcataaccaaatgatcaagagcatcaaaggattgccctggcagggcgaggacccccgtagccttctccagtccctcagtcggctccagaaaccccgcgccttcatcctgaaaagtaaaggtatcaaacaaaagcagatcattccaaagaacctactggactccaagtccctgaaactcatcatcagcatgactctgcacgaccgcaccaccaagtccctactgcacctgcacaagaagaaaaagccaccaagcatcagcgcccagttccagacatcccttaacaagctcttggaggcactggggaaggcggagcccttctttatccgctgcatccgttccaatgctgaaaagaaagagctgtgctttgacgacgagctggtcctgcagcagctgcgctacaccggcatgctggagaccgtgcgcatccggaggtcagggtacagcgccaagtacacgttccaggatttcaccgagcagttccaggtgctcctgcccaaggatgcccagccctgcagggaggtcatctccaccctcctggagaaaatgaagatagacaagaggaactaccagatcgggaagaccaaggtcttcctgaaggagacggagcggcaagccctgcaggagacgctgcaccgggaggtggtgcggaaaatcctgctgctgcagagctggttccggatggtgctggagcgtcggcacttcctgcagatgaagcgggccgccgtcaccatccaggcctgctggcggtcctaccgggtccggagggcgctggagaggacgcaggctgccgtgtacctccaggcctcatggaggggctactggcagcggaagctctaccggcaccagaaacagagcatcatccgcctgcagagcctgtgtcgggggcacctgcagcgcaagagcttcagccagatgatctcggagaagcagaaggcagaagagaaggagagggaagccctggaagccgcaagagcaggtgctgaggagggcggacagggtcaggcggctggagggcagcaggtagctgagcaggggccggagccagcggaggatggcgggcacctggcatcggagcctgaggtgcagccaagtgacaggtcccccctagagcactcctcacctgagaaggaggccccaagcccagagaagactctcccaccccagaaaaccgtggcggctgaaagtcacgagaaagtccccagcagccgggagaagcgtgagtcgcgtcggcaaagagggctggagcacgtcaagttccagaacaaacacatccagtcctgcaaggaggagagtgccctcagagaaccttccagaagggtcacccaggagcaaggggtgagtctcctggaagacaaaaaggagagcagagaagatgaaacccttctagtcgtagagacggaggctgagaacacatctcaaaagcagcccacagagcaaccccaggccatggcagttggcaaggtctctgaagaaactgagaagacgctgcccagtgggagccccaggcctggccagttggagcggccgaccagcctggccctggacagcagggtcagcccaccggcccctggcagcgcccccgagacccccgaggacaagagcaaaccatgtggcagcccaagggttcaggaaaagcccgacagccccggaggctccacgcagatccagcggtacctggacgccgagcggctggccagcgccgtggaactgtggcggggcaagaagctggtggccgccgccagccctagtgccatgctcagccagtccctggacctcagcgacagacaccgggccacaggggccgccctcacgcccacagaggagaggcgcacctccttctccacgagcgacgtctccaagctcctcccgtccctggccaaggctcagcctgcagcagaaaccacggacggagagcgaagtgcgaaaaagccagctgtccagaagaagaagccaggcgacgcatcctccctcccagacgcagggctgtccccgggctctcaggtcgactctaaatccacgtttaagaggctttttctgcataaaaccaaggataaaaaatacagcctggagggcgcagaggagctggagaatgcagtgtccgggcacgtggtgctggaagccaccaccatgaagaagggcctggaagccccctccggacagcagcatcgccacgctgcaggtgagaagcgcaccaaggaaccaggaggcaaagggaagaagaaccgaaatgtcaagattgggaagatcacagtgtcagagaagtggcgggaatcggtgttccgccagatcaccaacgccaatgagctcaagtacctggacgagttcctgctcaacaagataaatgacctccgttcccagaagacgcccattgagagcttgtttatcgaagccaccgagaagttcaggagcaacatcaaaacgatgtactctgtcccgaacgggaagatccacgtgggctacaaggatctgatggagaactaccagatcgtcgtcagcaacctggccactgagcgtggccagaaggacaccaacctggtcctcaacctcttccagtcactgctagatgagttcacccgtggctacaccaagaacgacttcgagccagtgaagcagagcaaagctcagaagaagaagcggaagcaggagcgtgctgtccaggagcacaacgggcacgtgttcgccagctaccaggttagcatcccgcagtcgtgcgagcagtgcctctcctatatctggctcatggacaaggccctgctctgcagcgtgtgcaagatgacctgccacaagaagtgcgtgcacaagattcagagccactgctcctacacctacgggaggaagggcgagccaggcgttgagcctggccacttcggcgtgtgcgtagacagcctgaccagcgacaaggcctcggtgcccatcgtgctggagaagctcctggaacacgtggagatgcacggcctgtacaccgagggcctctaccgcaagtcgggtgctgccaaccgcactcgggagctccggcaggcgctgcagacagaccccgcagcagtcaagctggagaacttccccatccacgccatcacaggggtgctgaagcagtggctgcgggagctgcccgagcccctcatgaccttcgcacagtacggcgacttcctccgagccgtcgagctgccggagaagcaggagcagctggctgccatctatgccgtcctggagcaccttccagaagccaaccacaactccctggagagactcatcttccaccttctggcggtggccctgctcgaggatgtcaaccgcatgtcacctggggcgctggccattatcttcgcaccctgcctcctgcgctgccctgacaactcggacccgctgaccagcatgaaggacgtcctcaagatcaccacgtgcgtggagatgctgatcaaggagcagatgaggaaatacaaagtgaagatggaggagatcagccaactggaggctgcagagagtatcgccttccgcaggctttcgctcctgcgacaaaatgctccatggcctctcaaactggggttttcgtctccctatgagggggtcctgaacaagagccccaagacccgggacatccaggaggaggagctggaggtgctgctggaggaggaggcagccggcggcgatgaggaccgggaaaaggagattctcattgaacggatccagtccatcaaggaggagaagcaagacatcacctaccggctgccggagctggacccaaggggctcggacgaggagaacctggactcggagacgtcggccagcaccgagagcctgctggaggagcgggccgggcggggggcctcggaagggccccctgcgcctgctctcccttgccccggcgcgcccaccccgagccccctccccaccgtggccgcccctccacgacgaaggccgtcgtccttcgtaacggtcagagtgaagaccccccggcggacccccatcatgcccacggccaacatcaagctcccaccaggcctgccctcccacctgcctcgctgggcaccgggtgcccgggaggcggctgccccagtgcggcgccgggagccacctgcccgccgcccggaccagatacattccgtgtacatcacgcccggggcagacctgccagtgcagggcgccctggagcccctagaagaggatggccagccacctggggccaagcggaggtactcggatcccccaacgtactgcctgccccccgcctcgggccagaccaatggctgagagccacagctgacaaagtctgcatgtccgaggacggcccctgcactggagctgggcgccagagctgcagagctagtgttcggccctcagagaaggatccagaatcaaaagctcaagagtgacgtgaggtgggcaccggccccaagtgcagagtcaaggcagggagaggccggctggagccaggccccctcgcacgcagcccccaaatcatggacgcacctgtggggagcaccacatctccacctgcggcctcacatctccccactcccctttttgtacgtttaactgtttctttgtacgtggtttacgtaactttaaactgtaacagccttaatggaagaccaaatggttttttatatgtgtatgtacaaagttttctattaacgctgcccgtctcccttataacctggacgtgagctgtcagagcagaagccactaggccactgcgcgtctgaggctcagaccctgctgtggttggcttggggtggccaatgggctgggaccctccatgagagttttggacacttgggtcacctgacccgtgcctctctgacacatgtctccggggggcagccacctggccaatgtgcatttttgcacatgctggaaccttccatgggggtctgggctattggctggagccaggacatgagtcaggggcaccatggacctcacgtgccagggagacttgaatgtggctgtcactcttccggacgccaagggctgcaggaggctgcttttggcactacccaccccgtgtgacagaataggagccagcgactcaggactgctcacgggtcaggagggcaacgcctgaagtcagacctccctataggtcaacagggacaacctggggatctctggagcagggccctcctctctcaggcttggcccactcccccagacacctggacacgtggccacaaatctgggacaaggggcccccgcacagcatgaaataaaaagtgcctgagaagtgtgtgc

SEQ ID NO: 143841 - DNA, 7532 bp, Artificial Sequence
  derived and/or modified sequence
ctagctccaggacacgcgcgccccgagcctgggaggcatgctgaagccaggcggccggcaggatgagtgtgaaagaggcaggcagctcgggccgccgggagcaggcggcctaccacctgcacatctacccccagctgtccaccaccgagagccaggcctcgtgccgcgtgactgccaccaaggacagcaccacctcggacgtcatcaaggacgccattgccagcctgcggctggacggcaccaaatgttatgtgctggtggaggtcaaagagtcgggaggcgaggaatgggtgctggacgccaacgactcgcctgtgcaccgggtgctgctatggccccggcgggcacaggacgagcaccctcaggaggatggctactacttcctgctgcaggagcgcaacgcagatggaaccatcaagtacgtgcatatgcagctggtggcgcaggccacagccacccggcgcctagtggagcgtggcctcctgccacggcagcaggcggactttgatgacctgtgtaacctccccgagctaaccgagggcaacctcctgaagaacctcaagcaccgcttcctgcaacaaaagatctacacgtacgcggggagcatcctggtggccatcaacccctttaagttcctgcccatctacaaccccaagtacgtgaagatgtatgagaaccagcagctgggcaagctggagccacacgtcttcgcgctggccgacgtggcctactacaccatgctcaggaagcgcgtgaaccagtgcatcgtgatctcgggtgagagcggctccggcaagacccagagcaccaacttcctcatccactgcctcaccgccctcagccagaagggctacgccagcggcgtcgagaggaccatcctgggtgctggccctgtgctggaggcttttggaaatgccaagacagcccacaacaacaactccagccggtttgggaaattcatccaagtcagctacctagagagtggcatcgtgagaggagctgtcgtcgagaaatatctgcttgaaaagtctcgcctggtgtctcaggagaaggatgagaggaactaccatgtgttttattatttgttacttggggtcagcgaggaagagcgccaagaatttcagctcaagcagcctgaagattatttctacctcaaccagcataacttgaagattgaagatggggaggacctgaagcatgactttgagaggctcaagcaggccatggagatggtgggcttcctccccgccaccaagaagcagatttttgccgtcctctcggccatcctgtacctgggcaacgtcacttataagaagagagctacaggccgagaggaagggttggaggtcgggccacccgaggtgctggacaccctgtcgcagcttctgaaggtgaagcgagaaatcttggtggaggttctgaccaaaagaaaaacggtgaccgtcaacgacaagcttatccttccctacagcctcagcgaggccatcactgcccgcgactccatggccaagtctctgtacagcgccctgttcgactggattgtgctgcggatcaaccacgcactcctcaacaagaaggacgtggaagaggcagtctcgtgcctgtccattggggtcctggacatcttcgggtttgaagacttcgagaggaacagctttgagcagttctgcatcaactacgccaatgagcagctgcagtattacttcaaccagcacatcttcaagctggagcaggaggaatatcagggcgaggggatcacgtggcacaacatcggctacacagacaatgtcggctgcatccatctcatcagcaagaaacccacgggcctcttctacctgctggacgaggagagcaacttcccccacgccacgagccagaccctgctggccaagttcaaacagcaacatgaggacaataagtacttcctgggcaccccggtcatggagccagctttcatcatccagcacttcgcagggaaggtgaaatatcagatcaaggacttccgggagaagaacatggactacatgcggccagacatcgtggccctgctgcggggcagtgacagctcctacgtgcgggagctcatcggcatggaccccgtggccgtgttccgctgggccgtgctccgggctgctatccgggccatggcagtgcttcgggaggccggacgcctgcgggccgagagggccgaaaaggctgcaggtatgagcagccctggtgcccaaagtcacccagaagagctgccaagaggagccagcaccccttcggaaaaactttaccgcgatttgcataaccaaatgatcaagagcatcaaaggattgccctggcagggcgaggacccccgtagccttctccagtccctcagtcggctccagaaaccccgcgccttcatcctgaaaagtaaaggtatcaaacaaaagcagatcattccaaagaacctactggactccaagtccctgaaactcatcatcagcatgactctgcacgaccgcaccaccaagtccctactgcacctgcacaagaagaaaaagccaccaagcatcagcgcccagttccagacatcccttaacaagctcttggaggcactggggaaggcggagcccttctttatccgctgcatccgttccaatgctgaaaagaaagagctgtgctttgacgacgagctggtcctgcagcagctgcgctacaccggcatgctggagaccgtgcgcatccggaggtcagggtacagcgccaagtacacgttccaggatttcaccgagcagttccaggtgctcctgcccaaggatgcccagccctgcagggaggtcatctccaccctcctggagaaaatgaagatagacaagaggaactaccagatcgggaagaccaaggtcttcctgaaggagacggagcggcaagccctgcaggagacgctgcaccgggaggtggtgcggaaaatcctgctgctgcagagctggttccggatggtgctggagcgtcggcacttcctgcagatgaagcgggccgccgtcaccatccaggcctgctggcggtcctaccgggtccggagggcgctggagaggacgcaggctgccgtgtacctccaggcctcatggaggggctactggcagcggaagctctaccggcaccagaaacagagcatcatccgcctgcagagcctgtgtcgggggcacctgcagcgcaagagcttcagccagatgatctcggagaagcagaaggcagaagagaaggagagggaagccctggaagccgcaagagcaggtgctgaggagggcggacagggtcaggcggctggagggcagcaggtagctgagcaggggccggagccagcggaggatggcgggcacctggcatcggagcctgaggtgcagccaagtgacaggtcccccctagagcactcctcacctgagaaggaggccccaagcccagagaagactctcccaccccagaaaaccgtggcggctgaaagtcacgagaaagtccccagcagccgggagaagcgtgagtcgcgtcggcaaagagggctggagcacgtcaagttccagaacaaacacatccagtcctgcaaggaggagagtgccctcagagaaccttccagaagggtcacccaggagcaaggggtgagtctcctggaagacaaaaaggagagcagagaagatgaaacccttctagtcgtagagacggaggctgagaacacatctcaaaagcagcccacagagcaaccccaggccatggcagttggcaaggtctctgaagaaactgagaagacgctgcccagtgggagccccaggcctggccagttggagcggccgaccagcctggccctggacagcagggtcagcccaccggcccctggcagcgcccccgagacccccgaggacaagagcaaaccatgtggcagcccaagggttcaggaaaagcccgacagccccggaggctccacgcagatccagcggtacctggacgccgagcggctggccagcgccgtggaactgtggcggggcaagaagctggtggccgccgccagccctagtgccatgctcagccagtccctggacctcagcgacagacaccgggccacaggggccgccctcacgcccacagaggagaggcgcacctccttctccacgagcgacgtctccaagctcctcccgtccctggccaaggctcagcctgcagcagaaaccacggacggagagcgaagtgcgaaaaagccagctgtccagaagaagaagccaggcgacgcatcctccctcccagacgcagggctgtccccgggctctcaggtcgactctaaatccacgtttaagaggctttttctgcataaaaccaaggataaaaaatacagcctggagggcgcagaggagctggagaatgcagtgtccgggcacgtggtgctggaagccaccaccatgaagaagggcctggaagccccctccggacagcagcatcgccacgctgcaggtgagaagcgcaccaaggaaccaggaggcaaagggaagaagaaccgaaatgtcaagattgggaagatcacagtgtcagagaagtggcgggaatcggtgttccgccagatcaccaacgccaatgagctcaagtacctggacgagttcctgctcaacaagataaatgacctccgttcccagaagacgcccattgagagcttgtttatcgaagccaccgagaagttcaggagcaacatcaaaacgatgtactctgtcccgaacgggaagatccacgtgggctacaaggatctgatggagaactaccagatcgtcgtcagcaacctggccactgagcgtggccagaaggacaccaacctggtcctcaacctcttccagtcactgctagatgagttcacccgtggctacaccaagaacgacttcgagccagtgaagcagagcaaagctcagaagaagaagcggaagcaggagcgtgctgtccaggagcacaacgggcacgtgttcgccagctaccaggttagcatcccgcagtcgtgcgagcagtgcctctcctatatctggctcatggacaaggccctgctctgcagcgtgtgcaagatgacctgccacaagaagtgcgtgcacaagattcagagccactgctcctacacctacgggaggaagggcgagccaggcgttgagcctggccacttcggcgtgtgcgtagacagcctgaccagcgacaaggcctcggtgcccatcgtgctggagaagctcctggaacacgtggagatgcacggcctgtacaccgagggcctctaccgcaagtcgggtgctgccaaccgcactcgggagctccggcaggcgctgcagacagaccccgcagcagtcaagctggagaacttccccatccacgccatcacaggggtgctgaagcagtggctgcgggagctgcccgagcccctcatgaccttcgcacagtacggcgacttcctccgagccgtcgagctgccggagaagcaggagcagctggctgccatctatgccgtcctggagcaccttccagaagccaaccacaactccctggagagactcatcttccaccttgtcaaggtggccctgctcgaggatgtcaaccgcatgtcacctggggcgctggccattatcttcgcaccctgcctcctgcgctgccctgacaactcggacccgctgaccagcatgaaggacgtcctcaagatcaccacgtgcgtggagatgctgatcaaggagcagatgaggaaatacaaagtgaagatggaggagatcagccaactggaggctgcagagagtatcgccttccgcaggctttcgctcctgcgacaaaatgctccatggcctctcaaactggggttttcgtctccctatgagggggtcctgaacaagagccccaagacccgggacatccaggaggaggagctggaggtgctgctggaggaggaggcagccggcggcgatgaggaccgggaaaaggagattctcattgaacggatccagtccatcaaggaggagaaggaggacatcacctaccggctgccggagctggacccaaggggctcggacgaggagaacctggactcggagacgtcggccagcaccgagagcctgctggaggagcgggccgggcggggggcctcggaaggtcagtattaagggccccctgcgcctgctctcccttgccccggcgcgcccaccccgagccccctccccaccgtggccgcccctccacgacgaaggccgtcgtccttcgtaacggtcagagtgaagaccccccggcggacccccatcatgcccacggccaacatcaagctcccaccaggcctgccctcccacctgcctcgctgggcaccgggtgcccgggaggcggctgccccagtgcggcgccgggagccacctgcccgccgcccggaccagatacattccgtgtacatcacgcccggggcagacctgccagtgcagggcgccctggagcccctagaagaggatggccagccacctggggccaagcggaggtactcggatcccccaacgtactgcctgccccccgcctcgggccagaccaatggctgagagccacagctgacaaagtctgcatgtccgaggacggcccctgcactggagctgggcgccagagctgcagagctagtgttcggccctcagagaaggatccagaatcaaaagctcaagagtgacgtgaggtgggcaccggccccaagtgcagagtcaaggcagggagaggccggctggagccaggccccctcgcacgcagcccccaaatcatggacgcacctgtggggagcaccacatctccacctgcggcctcacatctccccactcccctttttgtacgtttaactgtttctttgtacgtggtttacgtaactttaaactgtaacagccttaatggaagaccaaatggttttttatatgtgtatgtacaaagttttctattaacgctgcccgtctcccttataacctggacgtgagctgtcagagcagaagccactaggccactgcgcgtctgaggctcagaccctgctgtggttggcttggggtggccaatgggctgggaccctccatgagagttttggacacttgggtcacctgacccgtgcctctctgacacatgtctccggggggcagccacctggccaatgtgcatttttgcacatgctggaaccttccatgggggtctgggctattggctggagccaggacatgagtcaggggcaccatggacctcacgtgccagggagacttgaatgtggctgtcactcttccggacgccaagggctgcaggaggctgcttttggcactacccaccccgtgtgacagaataggagccagcgactcaggactgctcacgggtcaggagggcaacgcctgaagtcagacctccctataggtcaacagggacaacctggggatctctggagcagggccctcctctctcaggcttggcccactcccccagacacctggacacgtggccacaaatctgggacaaggggcccccgcacagcatgaaataaaaagtgcctgagaagtgtgtgc

SEQ ID NO: 143842 - DNA, 7623 bp, Artificial Sequence
  derived and/or modified sequence
cggggcggagcggctcgagcagcggcgggctggcaggcggtcgtccggccggggacccggcccgggaccggcggcgcgcggcggccgaggccagctccaggacacgcgcgccccgagcctgggaggcatgctgaagccaggcggccggcaggatgagtgtgaaagaggcaggcagctcgggccgccgggagcaggcggcctaccacctgcacatctacccccagctgtccaccaccgagagccaggcctcgtgccgcgtgactgccaccaaggacagcaccacctcggacgtcatcaaggacgccattgccagcctgcggctggacggcaccaaatgttatgtgctggtggaggtcaaagagtcgggaggcgaggaatgggtgctggacgccaacgactcgcctgtgcaccgggtgctgctatggccccggcgggcacaggacgagcaccctcaggaggatggctactacttcctgctgcaggagcgcaacgcagatggaaccatcaagtacgtgcatatgcagctggtggcgcaggccacagccacccggcgcctagtggagcgtggcctcctgccacggcagcaggcggactttgatgacctgtgtaacctccccgagctaaccgagggcaacctcctgaagaacctcaagcaccgcttcctgcaacaaaagatctacacgtacgcggggagcatcctggtggccatcaacccctttaagttcctgcccatctacaaccccaagtacgtgaagatgtatgagaaccagcagctgggcaagctggagccacacgtcttcgcgctggccgacgtggcctactacaccatgctcaggaagcgcgtgaaccagtgcatcgtgatctcgggtgagagcggctccggcaagacccagagcaccaacttcctcatccactgcctcaccgccctcagccagaagggctacgccagcggcgtcgagaggaccatcctgggtgctggccctgtgctggaggcttttggaaatgccaagacagcccacaacaacaactccagccggtttgggaaattcatccaagtcagctacctagagagtggcatcgtgagaggagctgtcgtcgagaaatatctgcttgaaaagtctcgcctggtgtctcaggagaaggatgagaggaactaccatgtgttttattatttgttacttggggtcagcgaggaagagcgccaagaatttcagctcaagcagcctgaagattatttctacctcaaccagcataacttgaagattgaagatggggaggacctgaagcatgactttgagaggctcaagcaggccatggagatggtgggcttcctccccgccaccaagaagcagatttttgccgtcctctcggccatcctgtacctgggcaacgtcacttataagaagagagctacaggccgagaggaagggttggaggtcgggccacccgaggtgctggacaccctgtcgcagcttctgaaggtgaagcgagaaatcttggtggaggttctgaccaaaagaaaaacggtgaccgtcaacgacaagcttatccttccctacagcctcagcgaggccatcactgcccgcgactccatggccaagtctctgtacagcgccctgttcgactggattgtgctgcggatcaaccacgcactcctcaacaagaaggacgtggaagaggcagtctcgtgcctgtccattggggtcctggacatcttcgggtttgaagacttcgagaggaacagctttgagcagttctgcatcaactacgccaatgagcagctgcagtattacttcaaccagcacatcttcaagctggagcaggaggaatatcagggcgaggggatcacgtggcacaacatcggctacacagacaatgtcggctgcatccatctcatcagcaagaaacccacgggcctcttctacctgctggacgaggagagcaacttcccccacgccacgagccagaccctgctggccaagttcaaacagcaacatgaggacaataagtacttcctgggcaccccggtcatggagccagctttcatcatccagcacttcgcagggaaggtgaaatatcagatcaaggacttccgggagaagaacatggactacatgcggccagacatcgtggccctgctgcggggcagtgacagctcctacgtgcgggagctcatcggcatggaccccgtggccgtgttccgctgggccgtgctccgggctgctatccgggccatggcagtgcttcgggaggccggacgcctgcgggccgagagggccgaaaaggctgcaggtatgagcagccctggtgcccaaagtcacccagaagagctgccaagaggagccagcaccccttcggaaaaactttaccgcgatttgcataaccaaatgatcaagagcatcaaaggattgccctggcagggcgaggacccccgtagccttctccagtccctcagtcggctccagaaaccccgcgccttcatcctgaaaagtaaaggtatcaaacaaaagcagatcattccaaagaacctactggactccaagtccctgaaactcatcatcagcatgactctgcacgaccgcaccaccaagtccctactgcacctgcacaagaagaaaaagccaccaagcatcagcgcccagttccagacatcccttaacaagctcttggaggcactggggaaggcggagcccttctttatccgctgcatccgttccaatgctgaaaagaaagagctgtgctttgacgacgagctggtcctgcagcagctgcgctacaccggcatgctggagaccgtgcgcatccggaggtcagggtacagcgccaagtacacgttccaggatttcaccgagcagttccaggtgctcctgcccaaggatgcccagccctgcagggaggtcatctccaccctcctggagaaaatgaagatagacaagaggaactaccagatcgggaagaccaaggtcttcctgaaggagacggagcggcaagccctgcaggagacgctgcaccgggaggtggtgcggaaaatcctgctgctgcagagctggttccggatggtgctggagcgtcggcacttcctgcagatgaagcgggccgccgtcaccatccaggcctgctggcggtcctaccgggtccggagggcgctggagaggacgcaggctgccgtgtacctccaggcctcatggaggggctactggcagcggaagctctaccggcaccagaaacagagcatcatccgcctgcagagcctgtgtcgggggcacctgcagcgcaagagcttcagccagatgatctcggagaagcagaaggcagaagagaaggagagggaagccctggaagccgcaagagcaggtgctgaggagggcggacagggtcaggcggctggagggcagcaggtagctgagcaggggccggagccagcggaggatggcgggcacctggcatcggagcctgaggtgcagccaagtgacaggtcccccctagagcactcctcacctgagaaggaggccccaagcccagagaagactctcccaccccagaaaaccgtggcggctgaaagtcacgagaaagtccccagcagccgggagaagcgtgagtcgcgtcggcaaagagggctggagcacgtcaagttccagaacaaacacatccagtcctgcaaggaggagagtgccctcagagaaccttccagaagggtcacccaggagcaaggggtgagtctcctggaagacaaaaaggagagcagagaagatgaaacccttctagtcgtagagacggaggctgagaacacatctcaaaagcagcccacagagcaaccccaggccatggcagttggcaaggtctctgaagaaactgagaagacgctgcccagtgggagccccaggcctggccagttggagcggccgaccagcctggccctggacagcagggtcagcccaccggcccctggcagcgcccccgagacccccgaggacaagagcaaaccatgtggcagcccaagggttcaggaaaagcccgacagccccggaggctccacgcagatccagcggtacctggacgccgagcggctggccagcgccgtggaactgtggcggggcaagaagctggtggccgccgccagccctagtgccatgctcagccagtccctggacctcagcgacagacaccgggccacaggggccgccctcacgcccacagaggagaggcgcacctccttctccacgagcgacgtctccaagctcctcccgtccctggccaaggctcagcctgcagcagaaaccacggacggagagcgaagtgcgaaaaagccagctgtccagaagaagaagccaggcgacgcatcctccctcccagacgcagggctgtccccgggctctcaggtcgactctaaatccacgtttaagaggctttttctgcataaaaccaaggataaaaaatacagcctggagggcgcagaggagctggagaatgcagtgtccgggcacgtggtgctggaagccaccaccatgaagaagggcctggaagccccctccggacagcagcatcgccacgctgcaggtgagaagcgcaccaaggaaccaggaggcaaagggaagaagaaccgaaatgtcaagattgggaagatcacagtgtcagagaagtggcgggaatcggtgttccgccagatcaccaacgccaatgagctcaagtacctggacgagttcctgctcaacaagataaatgacctccgttcccagaagacgcccattgagagcttgtttatcgaagccaccgagaagttcaggagcaacatcaaaacgatgtactctgtcccgaacgggaagatccacgtgggctacaaggatctgatggagaactaccagatcgtcgtcagcaacctggccactgagcgtggccagaaggacaccaacctggtcctcaacctcttccagtcactgctagatgagttcacccgtggctacaccaagaacgacttcgagccagtgaagcagagcaaagctcagaagaagaagcggaagcaggagcgtgctgtccaggagcacaacgggcacgtgttcgccagctaccaggttagcatcccgcagtcgtgcgagcagtgcctctcctatatctggctcatggacaaggccctgctctgcagcgtgtgcaagatgacctgccacaagaagtgcgtgcacaagattcagagccactgctcctacacctacgggaggaagggcgagccaggcgttgagcctggccacttcggcgtgtgcgtagacagcctgaccagcgacaaggcctcggtgcccatcgtgctggagaagctcctggaacacgtggagatgcacggcctgtacaccgagggcctctaccgcaagtcgggtgctgccaaccgcactcgggagctccggcaggcgctgcagacagaccccgcagcagtcaagctggagaacttccccatccacgccatcacaggggtgctgaagcagtggctgcgggagctgcccgagcccctcatgaccttcgcacagtacggcgacttcctccgagccgtcgagctgccggagaagcaggagcagctggctgccatctatgccgtcctggagcaccttccagaagccaaccacaactccctggagagactcatcttccaccttgtcaaggtggccctgctcgaggatgtcaaccgcatgtcacctggggcgctggccattatcttcgcaccctgcctcctgcgctgccctgacaactcggacccgctgaccagcatgaaggacgtcctcaagatcaccacgtgcgtggagatgctgatcaaggagcagatgaggaaatacaaagtgaagatggaggagatcagccaactggaggctgcagagagtatcgccttccgcaggctttcgctcctgcgacaaaatgctccatggcctctcaaactggggttttcgtctccctatgagggggtcctgaacaagagccccaagacccgggacatccaggaggaggagctggaggtgctgctggaggaggaggcagccggcggcgatgaggaccgggaaaaggagattctcattgaacggatccagtccatcaaggaggagaaggaggacatcacctaccggctgccggagctggacccaaggggctcggacgaggagaacctggactcggagacgtcggccagcaccgagagcctgctggaggagcgggccgggcggggggcctcggaaggtcagtattaagggccccctgcgcctgctctcccttgccccggcgcgcccaccccgagccccctccccaccgtggccgcccctccacgacgaaggccgtcgtccttcgtaacggtcagagtgaagaccccccggcggacccccatcatgcccacggccaacatcaagctcccaccaggcctgccctcccacctgcctcgctgggcaccgggtgcccgggaggcggctgccccagtgcggcgccgggagccacctgcccgccgcccggaccagatacattccgtgtacatcacgcccggggcagacctgccagtgcagggcgccctggagcccctagaagaggatggccagccacctggggccaagcggaggtactcggatcccccaacgtactgcctgccccccgcctcgggccagaccaatggctgagagccacagctgacaaagtctgcatgtccgaggacggcccctgcactggagctgggcgccagagctgcagagctagtgttcggccctcagagaaggatccagaatcaaaagctcaagagtgacgtgaggtgggcaccggccccaagtgcagagtcaaggcagggagaggccggctggagccaggccccctcgcacgcagcccccaaatcatggacgcacctgtggggagcaccacatctccacctgcggcctcacatctccccactcccctttttgtacgtttaactgtttctttgtacgtggtttacgtaactttaaactgtaacagccttaatggaagaccaaatggttttttatatgtgtatgtacaaagttttctattaacgctgcccgtctcccttataacctggacgtgagctgtcagagcagaagccactaggccactgcgcgtctgaggctcagaccctgctgtggttggcttggggtggccaatgggctgggaccctccatgagagttttggacacttgggtcacctgacccgtgcctctctgacacatgtctccggggggcagccacctggccaatgtgcatttttgcacatgctggaaccttccatgggggtctgggctattggctggagccaggacatgagtcaggggcaccatggacctcacgtgccagggagacttgaatgtggctgtcactcttccggacgccaagggctgcaggaggctgcttttggcactacccaccccgtgtgacagaataggagccagcgactcaggactgctcacgggtcaggagggcaacgcctgaagtcagacctccctataggtcaacagggacaacctggggatctctggagcagggccctcctctctcaggcttggcccactcccccagacacctggacacgtggccacaaatctgggacaaggggcccccgcacagcatgaaataaaaagtgcctgagaagtgtgtgca

SEQ ID NO: 143843 - protein, 367 aa, Artificial Sequence
  derived and/or modified sequence
MSSTLAKIAEIEAEMARTQKNKATAHHLGLLKARLAKLRRELITPKGGGGGGPGEGFDVAKTGDARIGFVGFPSVGKSTLLSNLAGVYSEVAAYEFTTLTTVPGVIRYKGAKIQLLDLPGIIEGAKDGKGRGRQVIAVARTCNLILIVLDVLKPLGHKKIIENELEGFGIRLNSKPPNIGFKKKDKGGINLTATCPQSELDAETVKSILAEYKIHNADVTLRSDATADDLIDVVEGNRVYIPCIYVLNKIDQISIEELDIIYKVPHCVPISAHHRWNFDDLLEKIWDYLKLVRIYTKPKGQLPDYTSPVVLPYSRTTVEDFCMKIHKNLIKEFKYALVWGLSVKHNPQKVGKDHTLEDEDVIQIVKK

SEQ ID NO: 143844 - DNA, 1104 bp, Artificial Sequence
  derived and/or modified sequence
atgagcagtaccctggctaagatcgccgagatagaagccgagatggcccgcacgcagaaaaataaggccactgcccatcatctggggctcctgaaggcacggttggccaaactccggcgagagctgatcacaccaaagggcggtggggggggggggcctggtgaagggttcgatgttgcaaagaccggcgatgcccggatcggtttcgttgggttcccatctgtgggtaagagtacgttactttctaatctcgcaggggtgtactccgaggtcgccgcctatgagtttaccacactcactacagtccccggtgtgatacgctataaaggggctaagattcagctactggatctgcctggaataattgagggagccaaagacggaaagggcaggggccgacaagtgattgcagttgctagaacttgcaacctgattctgatcgtgttagatgttttaaagcccctcggtcacaaaaagattatcgaaaatgaactggagggctttgggattcgcctcaactccaagcctcctaatatcgggttcaaaaaaaaggataaagggggtattaacctcactgccacttgtccccagtccgagctggacgcggaaaccgttaagagcatcctcgcagagtacaaaatacataatgccgatgtaacactccgttccgacgctacggccgacgacctaatagatgtggttgagggaaaccgggtttacattccctgtatttatgtactgaataagatagatcagatcagtatagaagagcttgacattatctacaaagtgcctcactgcgtgccaatatctgcccaccataggtggaattttgacgacctcttggagaagatttgggattatttgaaactggttcgaatctacaccaagcccaaaggccagcttcccgactacacttcaccggtcgttctaccctattctagaacaactgtggaagacttttgtatgaaaattcacaagaatcttattaaggaattcaaatatgcgctggtctgggggctgagcgtcaaacacaatccgcagaaagtagggaaagatcacacactcgaagacgaagacgtgattcaaatcgtaaaaaaatag

SEQ ID NO: 143845 - DNA, 1104 bp, Artificial Sequence
  derived and/or modified sequence
atgagcagcaccctggccaagattgctgagattgaagctgagatggcccggacccagaagaacaaggccacagcccaccacctgggcctgctgaaggcccggctggccaagctgcggcgggagctgatcacccccaagggcggcggcggcggcggccctggagagggctttgatgtggccaagacaggagatgccagaattggatttgtgggcttccccagcgtgggcaagagcaccctgctgagcaacctggccggcgtgtacagcgaggtggccgcctatgagttcaccaccctgaccaccgtgcctggggtcatccgctacaagggggccaagatccagctgctggacctgcccggcatcatcgagggcgccaaggatggcaagggccggggccggcaggtgattgctgtggcccggacctgcaacctgatcctgattgtgctggatgtgctgaagcccctgggccacaagaagatcattgaaaatgagctggagggcttcggcatccggctgaacagcaagccacccaacatcggcttcaagaagaaggacaagggcggcatcaacctgacagccacctgcccccagagcgagctggatgctgagaccgtgaagagcatcctggccgagtacaagatccacaatgctgatgtgaccctgcggagtgatgccacagcagatgacctgattgatgtggtggagggcaacagagtgtacatcccctgcatctacgtgctgaacaagattgaccagatcagcattgaggagctggacatcatctacaaggtgccccactgtgtgcccatcagcgcccaccaccgctggaactttgatgacctgctggagaagatctgggactacctgaagctggtgcgcatctacaccaagcccaagggccagctgcctgactacaccagccctgtggtgctgccctacagcaggaccaccgtggaggacttctgcatgaagatccacaagaacctgatcaaggagttcaagtatgccctggtgtggggcctgtctgtgaagcacaacccccagaaggtgggcaaggaccacaccctggaggatgaagatgtgatccagatcgtgaagaagtag

SEQ ID NO: 143846 - DNA, 1104 bp, Artificial Sequence
  derived and/or modified sequence
atgagcagcaccctggccaagatcgccgagatcgaggccgagatggcacggacccaaaagaacaaggccacggcccaccaccttggcttgcttaaagccagacttgcaaagctgcgcagggagctcatcacgcctaaaggaggcggaggaggcggtccgggagagggtttcgacgtggcgaagactggagatgcacgtattgggttcgtagggtttccctctgttggaaagagtactctgcttagtaatcttgccggcgtatattccgaagtggctgcgtatgaatttactacactcactacagtccctggagtgatcagatacaaaggggccaaaatacagcttcttgatctccccggcattatagagggagctaaagatgggaagggaagaggcaggcaggtgatagcagtcgcaagaacgtgtaacctcatcctgatagtcttggatgtgctcaaacccctgggccataaaaaaattattgagaatgaactcgaagggtttggaatccgcctcaattctaagcccccaaacatcgggttcaaaaagaaggacaaaggcggcatcaatctgactgccacctgcccccagtccgagttggacgcagaaaccgtaaagtccattcttgccgagtacaaaatccacaatgcagatgtgacattaaggagcgatgcaacagctgacgatctcattgatgttgttgagggaaatcgggtatacatcccatgcatatacgtgctcaacaaaattgaccagatttcaatcgaggagctggacattatatacaaggtgcctcactgcgtgcctatctccgcccaccataggtggaattttgacgacctgttagaaaaaatttgggactatctgaagctcgtgcgcatttatactaaaccaaaaggacaactgccagactacaccagtcctgtagtgctaccgtatagtagaacaaccgttgaagatttctgcatgaaaattcataagaacctgatcaaagaattcaagtacgctctggtttggggcctgtcagtgaaacacaatccacagaaggtgggtaaggatcatactttggaagacgaagatgtgatccagatcgtgaagaaatag

SEQ ID NO: 143847 - DNA, 1104 bp, Artificial Sequence
  derived and/or modified sequence
atgagttcaaccctagctaagattgccgaaattgaagccgaaatggcaagaactcagaaaaataaagccactgcccaccacctcggcctgttaaaggccaggctggcaaagctgcgccgtgaactgatcacccccaagggcggtgggggtgggggacccggagaaggctttgacgttgccaaaacaggggacgcgaggattggtttcgtgggcttcccatccgttgggaaatcgacactgcttagtaacctagctggagtgtactccgaggtggcagcttacgaatttaccacactgacaacagttcccggtgttatccgctataagggagcaaagattcaattgctcgacctcccagggattattgagggagcgaaggacgggaaggggagagggagacaggtgattgctgttgcaaggacctgcaacctgatactcatagtgctggacgtgctaaagcctctggggcataagaaaatcattgaaaacgaactcgagggcttcggcatcaggctgaattctaaaccacctaacatcggatttaaaaagaaagacaagggcggaattaatctgaccgccacttgccctcagtcggagctagacgcagagacagtaaaatctattcttgcagaatacaagatccacaatgccgacgtgacgctgcgctccgatgccaccgccgacgatctcattgacgtggtcgagggaaacagagtctacattccctgcatctatgtcctgaacaagatagatcaaatcagcatcgaggagcttgacatcatctacaaggtaccccattgcgtcccaatcagtgcgcatcaccggtggaattttgatgatttgctggagaaaatctgggactatctgaaacttgtacggatttacacaaaaccgaaaggccagctgcctgactacacctctccggtcgtgcttccatattcccgaaccactgtcgaagacttctgcatgaagatccacaaaaatctaattaaagagtttaagtatgccctcgtttggggcctcagcgtcaaacacaacccccagaaggtgggtaaggatcatacattagaggacgaagacgttattcagattgtgaaaaaatag

SEQ ID NO: 143848 - DNA, 1104 bp, Artificial Sequence
  derived and/or modified sequence
atgagcagcaccctggccaagatcgccgagatcgaggccgagatggccagaacccagaagaacaaggccaccgcccaccacctgggcctgctgaaggccagactggccaagctgagaagagagctgatcacccccaagggcggcggcggcggcggccccggcgagggcttcgacgtggccaagaccggcgacgccagaatcggcttcgtgggcttccccagcgtgggcaagagcaccctgctgagcaacctggccggcgtgtacagcgaggtggccgcctacgagttcaccaccctgaccaccgtgcccggcgtgatcagatacaagggcgccaagatccagctgctggacctgcccggcatcatcgagggcgccaaggacggcaagggcagaggcagacaggtgatcgccgtggccagaacctgcaacctgatcctgatcgtgctggacgtgctgaagcccctgggccacaagaagatcatcgagaacgagctggagggcttcggcatcagactgaacagcaagccccccaacatcggcttcaagaagaaggacaagggcggcatcaacctgaccgccacctgcccccagagcgagctggacgccgagaccgtgaagagcatcctggccgagtacaagatccacaacgccgacgtgaccctgagaagcgacgccaccgccgacgacctgatcgacgtggtggagggcaacagagtgtacatcccctgcatctacgtgctgaacaagatcgaccagatcagcatcgaggagctggacatcatctacaaggtgccccactgcgtgcccatcagcgcccaccacagatggaacttcgacgacctgctggagaagatctgggactacctgaagctggtgagaatctacaccaagcccaagggccagctgcccgactacaccagccccgtggtgctgccctacagcagaaccaccgtggaggacttctgcatgaagatccacaagaacctgatcaaggagttcaagtacgccctggtgtggggcctgagcgtgaagcacaacccccagaaggtgggcaaggaccacaccctggaggacgaggacgtgatccagatcgtgaagaagtag

SEQ ID NO: 143849 - DNA, 1746 bp, Artificial Sequence
  derived and/or modified sequence
cagccccacgctttgcgactcgcggtgacccctacgcggaactctctcgcggtaattcgaagtaccgcgcctgcgtgctgcagtagcgcctggtggcggtggcagtttgcccgcgggtgtgtgaagggagacagtgtggaggccacagggtactcgccacgatgagcagcaccttagctaagatcgcggagatagaagcagagatggctcggactcaaaagaacaaggccacagcacaccacttagggctgcttaaggctcgtcttgctaagcttcgtcgagaactcattactccaaagggtggtggtggtggaggtccaggagaaggttttgatgtggccaagacaggtgatgctcgaattggatttgttggttttccatctgtggggaagtcaacactgcttagtaacctggcaggggtatattctgaggtggcagcctatgaattcactactctgaccactgtgcctggtgtcatcagatacaaaggtgccaagatccagctcctggatctcccaggtatcattgaaggtgccaaggatgggaaaggtagaggtcgtcaagtcattgcagtggcccgaacctgtaacttgatcttgattgttctggatgtcctgaaacctttgggacataagaagataattgaaaatgagctggaaggctttggcattcgcttgaacagcaaaccccccaacattggctttaagaagaaggacaagggaggcattaatctcacagccacttgcccccagagtgagctggatgctgaaactgtgaagagcattctggctgaatacaagattcataatgccgatgtgactctacgtagtgatgctacagctgatgacctcattgatgtggtggaaggaaacagagtttatatcccctgtatctatgtgttaaataagattgaccaaatctccattgaggaattggatatcatctataaggtgcctcactgtgtacccatctctgcccatcaccgctggaattttgatgacctattggaaaagatctgggactatctgaaactagtgagaatttacaccaaacccaaaggccagttaccagattacacatccccagtggtgcttccttactccaggaccacagtggaggatttctgcatgaagattcacaaaaatcttatcaaagaatttaaatatgctctggtctggggtctctctgtgaaacacaatcctcagaaagtgggtaaagaccatacgttggaggatgaggatgtcattcaaattgtgaagaagtgaaacctttcccttttcccatctgccggacgaaccacaacagcgttccccatgatcaagcaccctaccccagttctttctggttttggcagtcactggatcaggatccaggggagggagatggaggcacccaaactggaacttcatttgtcttaccttggtgtcaccttgtatgtcgaactgcataaaagatctggtaggctggtcagctacatgcagctcatgtgtcattgtcagaatttgttttgggatgggctgaatgaggaagggtatatacggtgaagcagctacagaagggatccttgggaacttcatcttgagtgtgaaatggataaaaatatgacatgctgcatcttacttgatgtttacttatgggaaccccttccaaactagatatggctttcagtcctttcaagtagtctttcccacatgatactggagagaggaaggactttatgtaagttaattgatcactccccgcaag

SEQ ID NO: 143850 - protein, 152 aa, Artificial Sequence
  derived and/or modified sequence
MDSGTEEYELNGGLPPGTPGSPDASPARWGWRHGPINVNHYASKKSAAESMLDIALLMANASQLKAVVEQGPSFAFYVPLVVLISISLVLQIGVGVLLIFLVKYDLNNPAKHAKLDFLNNLATGLVFIIVVVNIFITAFGVQKPLMDMAPQQ

SEQ ID NO: 143851 - DNA, 459 bp, Artificial Sequence
  derived and/or modified sequence
atggactctggcactgaggaatatgaactcaacggaggactgccaccaggcacccccggctccccagacgcttctccagccaggtggggttggcggcacgggccaataaatgtgaatcattatgcctcaaagaagtccgcagcagagagcatgcttgatattgctctgttgatggccaacgcatcacagctgaaggctgtggtggaacaggggcccagtttcgccttctacgtcccactagtggttctgatctccatatctctagtgctgcaaattggcgtcggtgtgctattaattttcctggtgaagtatgacctgaacaacccagcaaagcatgctaaactggattttcttaataatttggccaccggcctggtctttattattgtggtcgtcaacattttcataacagccttcggggtgcagaagcctctgatggacatggctcctcagcagtag

SEQ ID NO: 143852 - DNA, 459 bp, Artificial Sequence
  derived and/or modified sequence
atggattctggaacagaggagtatgagctgaatggaggcctgcccccaggcaccccaggcagcccagatgccagccctgcccgctggggctggaggcatggccccatcaacgtgaaccactacgccagcaagaagtctgctgctgagagcatgctggacatcgccctgctgatggccaatgccagccagctgaaggctgtggtggagcagggccccagctttgccttctacgtgcccctggtggtgctgatcagcatcagcctggtgctgcagatcggcgtgggcgtgctgctgatcttcctggtgaagtatgacctgaacaacccagccaagcacgccaagctggacttcctgaacaacctggccaccggcctggtgttcatcatcgtggtggtgaacatcttcatcacagcctttggagtgcagaagcccctgatggacatggccccccagcagtag

SEQ ID NO: 143853 - DNA, 459 bp, Artificial Sequence
  derived and/or modified sequence
atggacagcggcaccgaggagtacgagctgaacggcggcctgcccccaggcacccctggctcaccggacgcgagcccggctagatggggctggcggcatggccccattaatgttaatcattatgcctctaaaaagtccgcagccgaatccatgctggatatcgcccttctcatggcaaacgcatctcaactcaaggcagttgtggagcaaggaccatcttttgcgttctacgtgcccttagtggtcctgatttctatcagcctggtgctacaaatcggagtgggcgtcctgcttatttttttggtgaaatatgatcttaataacccagcgaaacacgcaaagctagacttcctgaataatctcgctacaggcctggtctttatcatcgtagtcgtgaatatctttattaccgcctttggtgtccagaagccgcttatggacatggccccccagcagtag

SEQ ID NO: 143854 - DNA, 1281 bp, Artificial Sequence
  derived and/or modified sequence
cgcagctggagcctgcggctgaggctcgggcgcgctcaggcccggatcctggcggcctgggcggccgcaccatggactcgggaaccgaggagtacgagctcaacggcggcctgcctccgggcacacccggctccccggacgcctcgccggcccgctggggctggaggcacgggcccatcaacgtgaaccattacgccagcaagaagagcgcagccgagagcatgctggacatcgcgctgctgatggccaacgcgtcccagctgaaggccgtcgtggaacagggccccagcttcgccttctatgtgcccctggtggtcctcatctccatctcccttgtgctgcagatcggcgtgggggtgctgctcatcttccttgtcaagtacgaccttaacaacccggccaagcacgccaagctggacttcctcaacaacctggccacgggcctggtgttcatcatcgtggtagtcaacatcttcatcacggccttcggggtccagaagcccttgatggacatggcaccccagcagtaggacacccaggaccctggatgttgcctgccctgcaactcagctgcccgaccccaggagtcgccatacctgtgaggtgtccacctccctgcacatggcactacccagactgccagagcccaggctggcctcatctgcaccatgtccccggaccagcccttgctctgactgcggccaagcaccacgcaggaggccactcttgtctctcagcagctgttcccaggaggcagctccctcctggcacatgggggctggccacaatagcccagagggtcagaactggacagctgcagagacctgtgcccagagaagggtctcgacccactcaaggacacacagcaggtccgtggatgggctggatgagtgaccagggccagcctctgtctcaggacattccagaaggacaaggagatgtctctccctctcccaaagcaccagcgtccctgcctcccgtgggccctgtccgggttgccctggtgaccccagcctctgtccacttcctaacccagggaccctgcacagccagaactgcctttggccctacggatggccactggctctggtcttaagtgcctgggcttggtggccatcaagagggagccagtcaggcctgtgagggccgtagaccttgtatataccctgcaccagcagtgaccgggcagagcccaaccccctccacgggggtcccagcacccacttttctaatcatgaatgaacaataaagcccacgctctttgtcaggctccacatgcca

SEQ ID NO: 143855 - DNA, 459 bp, Artificial Sequence
  derived and/or modified sequence
atggacagcggaacggaagaatatgaacttaatggcggactcccgccagggacccccggatcccctgacgcaagcccggctcgatggggctggagacacggccctattaacgttaatcactacgcatccaaaaagagcgcggcagagtcaatgctggatatcgctctgctgatggccaatgcatcacagctgaaggctgttgtggaacagggtcctagtttcgccttctacgtgccacttgtcgtgttaatcagcatctccttggtactgcagatcggggtgggagtacttctgatcttcctggtaaaatatgatctaaacaaccccgcaaagcacgcaaagctcgactttctgaataacttagctacaggcctcgtgttcattatcgtggtggtgaacattttcatcactgccttcggagtgcagaagccccttatggacatggccccacagcagtag

SEQ ID NO: 143856 - DNA, 459 bp, Artificial Sequence
  derived and/or modified sequence
atggacagcggcaccgaggagtacgagctgaacggcggcctgccccccggcacccccggcagccccgacgccagccccgccagatggggctggagacacggccccatcaacgtgaaccactacgccagcaagaagagcgccgccgagagcatgctggacatcgccctgctgatggccaacgccagccagctgaaggccgtggtggagcagggccccagcttcgccttctacgtgcccctggtggtgctgatcagcatcagcctggtgctgcagatcggcgtgggcgtgctgctgatcttcctggtgaagtacgacctgaacaaccccgccaagcacgccaagctggacttcctgaacaacctggccaccggcctggtgttcatcatcgtggtggtgaacatcttcatcaccgccttcggcgtgcagaagcccctgatggacatggccccccagcagtag

SEQ ID NO: 143857 - DNA, 684 bp, Artificial Sequence
  derived and/or modified sequence
atggttaagtcttctctgcagaggattctcaactctcactgtttcgcccgcgaaaaggagggggataaaccttctgctaccatccacgctagccgtacaatgcctctgctcagtctgcacagccggggaggatcatctagcgaatcctcaagagtgagcctgcactgctgtagcaaccccggtcccgggccacggtggtgcgatgccccccaccctccattgaagatccctggtggtagaggcaatagccagcgagaccacaatctgagtgctaatctgttttattctgatgatcgtctgaacgtgaccgaagagctgacgtcaaatgacaagacaaggattcttaatgtgcagagtcgcctcacagacgcaaagagaatcaactggaggactgtgctgagtggcgggtcattgtatatcgaaattccaggcggggccctcccggagggctctaaggactcctttgctgtgctcctggagtttgcagaggagcaactgcgggccgaccacgtgtttatttgcttccacaagaaccgggaagaccgggctgcacttctgcgcaccttttccttcctggggttcgagatcgtgcgcccggggcatcctctggtgccaaagcggccagatgcgtgcttcatggcatacaccttcgagcgagaatcatctggggaagaggaagaatag

SEQ ID NO: 143858 - DNA, 684 bp, Artificial Sequence
  derived and/or modified sequence
atggtgaagagcagcctgcagaggatcctgaacagccactgctttgcccgggagaaggagggggacaagcccagcgccaccatccacgccagcaggaccatgcccctgctgagcctgcacagcagaggaggcagcagcagcgagagcagccgggtgtccctgcactgctgcagcaaccctggccctggcccccgctggtgtgatgccccccacccccccctgaagatccctgggggccggggcaacagccagagggaccacaacctgagcgccaacctcttctacagtgatgaccggctgaatgtgacagaggagctgaccagcaatgacaagacccgcatcctgaatgtgcagagccggctgacagatgccaagaggatcaactggaggacagtgctgagcggcggcagcctgtacatcgagatccctggaggagccctgcctgagggcagcaaggacagctttgctgtgctgctggagtttgctgaggagcagctgcgggctgaccacgtgttcatctgcttccacaagaaccgggaggacagagctgccctgctgcggaccttctccttcctgggctttgagatcgtgcggcccggccaccccctggtgcccaagaggccagatgcctgcttcatggcctacacctttgagcgggagagcagcggggaggaggaggagtag

SEQ ID NO: 143859 - DNA, 684 bp, Artificial Sequence
  derived and/or modified sequence
atggtgaagagcagcctgcagcggatcctgaacagccactgcttcgctcgggagaaggaaggggataaacctagcgccacaattcacgcctcccgcaccatgcccttgttatcccttcacagccggggtgggtccagcagtgagtcgtctagagtgagtcttcactgttgtagtaaccccggaccagggccgaggtggtgtgatgctcctcacccccccctgaagatccccggaggcagggggaattctcagagagatcataacttgtctgcaaacctcttttactctgacgatcgtctgaatgtcacagaggaattgaccagtaatgacaagacgcggatcttaaacgtgcagagccggttgaccgatgctaagcgtattaactggaggacagtgctcagcggcggcagcctctatattgagatccctggcggtgcactccccgaagggagcaaagactcttttgcagttctgcttgagtttgccgaagaacagctgcgcgctgaccacgtctttatctgcttccacaaaaatcgcgaggatcgcgccgcgctcctcaggacattttctttccttggatttgagatagtccggcccggccaccctttagtgccgaaaagacccgatgcttgtttcatggcctacaccttcgaaagggaaagctccggagaggaggaggagtag

SEQ ID NO: 143860 - DNA, 1142 bp, Artificial Sequence
  derived and/or modified sequence
ttttgcgaacggcgagcagcggcggcggcgcggagagacgcagcggaggttttcctggtttcggaccccagcggccggatggtgaaatcctccctgcagcggatcctcaatagccactgcttcgccagagagaaggaaggggataaacccagcgccaccatccacgccagccgcaccatgccgctcctaagcctgcacagccgcggcggcagcagcagtgagagttccagggtctccctccactgctgtagtaacccgggtccggggcctcggtggtgcgatgcccctcacccacccctgaagatcccaggtgggcgagggaatagtcagagggatcacaatctttcagctaacttattctactccgatgatcggctgaatgtaacagaggaactaacgtccaacgacaagacgaggattctcaacgtccagtccaggctcacagacgccaaacgcattaactggcgaacagtgctgagtggcggcagcctctacatcgagatcccgggcggcgcgctgcccgaggggagcaaggacagctttgcagttctcctggagttcgctgaggagcagctgcgagccgaccatgtcttcatttgcttccacaagaaccgcgaggacagagccgccttgctccgaaccttcagctttttgggctttgagattgtgagaccggggcatccccttgtccccaagagacccgacgcttgcttcatggcctacacgttcgagagagagtcttcgggagaggaggaggagtagggccgcctcggggctgggcatccggcccctggggccaccccttgtcagccgggtgggtaggaaccgtagactcgctcatctcgcctgggtttgtccgcatgttgtaatcgtgcaaataaacgctcactccgaattagcggtgtatttcttgaagtttaatattgtgtttgtgatactgaagtatttgctttaattctaaataaaaatttatattttacttttttattgctggtttaagatgattcagattatccttgtactttgaggagaagtttcttatttggagtcttttggaaacagtcttagtcttttaacttggaaagatgaggtattaatcccctccattgctctccaaaagccaataaagtgattacacccga

SEQ ID NO: 143861 - DNA, 684 bp, Artificial Sequence
  derived and/or modified sequence
atggtcaagagcagtttgcagcgcattctgaacagtcattgtttcgccagagagaaggagggagataaaccaagcgccactatccacgcgagtcgaaccatgccgctgctctccctgcacagccgcggaggatctagcagtgagtcttctagagtctcgctccattgttgttcaaatcctgggccaggcccacggtggtgcgacgctccccatccccctttgaagattcccggtgggcgagggaatagtcagcgggatcacaatctctcggccaatctgttctattccgatgacagactcaacgtaacagaagagctgacttcaaacgacaagaccagaattttgaatgtgcagagtaggcttaccgatgccaagcgaatcaactggagaaccgtactgtcagggggatccctatatatcgaaataccaggcggtgcgctccctgaaggtagcaaagattcattcgccgtgctgctggagttcgctgaagaacagctacgtgcagatcacgtgtttatctgctttcacaaaaatagagaggaccgggcagcactgctgcggacattctcttttttggggttcgagatagtgcgaccaggccaccccttagtcccaaagagacctgatgcctgcttcatggcctatacttttgaaagagagtcaagtggggaagaagaggagtag

SEQ ID NO: 143862 - DNA, 684 bp, Artificial Sequence
  derived and/or modified sequence
atggtgaagagcagcctgcagagaatcctgaacagccactgcttcgccagagagaaggagggcgacaagcccagcgccaccatccacgccagcagaaccatgcccctgctgagcctgcacagcagaggcggcagcagcagcgagagcagcagagtgagcctgcactgctgcagcaaccccggccccggccccagatggtgcgacgccccccacccccccctgaagatccccggcggcagaggcaacagccagagagaccacaacctgagcgccaacctgttctacagcgacgacagactgaacgtgaccgaggagctgaccagcaacgacaagaccagaatcctgaacgtgcagagcagactgaccgacgccaagagaatcaactggagaaccgtgctgagcggcggcagcctgtacatcgagatccccggcggcgccctgcccgagggcagcaaggacagcttcgccgtgctgctggagttcgccgaggagcagctgagagccgaccacgtgttcatctgcttccacaagaacagagaggacagagccgccctgctgagaaccttcagcttcctgggcttcgagatcgtgagacccggccaccccctggtgcccaagagacccgacgcctgcttcatggcctacaccttcgagagagagagcagcggcgaggaggaggagtag

SEQ ID NO: 143863 - protein, 404 aa, Artificial Sequence
  derived and/or modified sequence
MSHIQIPPGLTELLQGYTVEVLRQQPPDLVEFAVEYFTRLREARAPASVLPAATPRQSLGHPPPEPGPDRVADAKGDSESEEDEDLEVPVPSRFNRRVSVCAETYNPDEEEEDTDPRVIHPKTDEQRCRLQEACKDILLFKNLDQEQLSQVLDAMFERIVKADEHVIDQGDDGDNFYVIERGTYDILVTKDNQTRSVGQYDNRGSFGELALMYNTPRAATIVATSEGSLWGLDRVTFRRIIVKNNAKKRKMFESFIESVPLLKSLEVSERMKIVDVIGEKIYKDGERIITQGEKADSFYIIESGEVSILIRSRTKSNKDGGNQEVEIARCHKGQYFGELALVTNKPRAASAYAVGDVKCLVMDVQAFERLLGPCMDIMKRNISHYEEQLVKMFGSSVDLGNLGQ

SEQ ID NO: 143864 - DNA, 1215 bp, Artificial Sequence
  derived and/or modified sequence
atgtcacacatccagataccgccgggtctcaccgaactactgcagggctatacggttgaggtactccggcagcagcctcccgatctggtcgaattcgccgtggagtattttacccggctcagagaggcccgagccccagctagtgtcctcccagcagcaacaccccggcagagcctgggacatccgcctcctgagccagggcctgaccgggtcgccgacgcgaaaggcgacagcgagtccgaggaggacgaagacttggaggtgcccgtgccatcaagatttaaccgtagggtgtcagtttgtgccgaaacgtataaccccgatgaagaggaagaggataccgacccgagagtgatccaccccaagactgatgaacagaggtgcaggctccaggaggcctgtaaggatatcctgttgttcaagaatctagaccaggagcagctatctcaagtgttggatgctatgttcgaacgcatagtcaaagccgacgagcacgttatcgaccagggcgacgacggggataatttttatgtcatcgagagggggacgtacgatatcctggtgacaaaggacaaccaaacccggtcagtgggacagtatgataaccgcggaagtttcggagaactggctttaatgtacaatactcccagggccgctacaattgttgccacttctgagggaagcctgtggggtctggatcgagtcacatttcggagaattattgtcaagaacaatgcaaaaaaaaggaagatgtttgaaagcttcatcgaatctgtgccactccttaagagtcttgaggtgtcggaacgcatgaagatagtcgatgtaatcggtgaaaagatttacaaggatggtgaacgaataatcacccagggtgagaaggccgattctttttacatcatcgaaagcggggaagtgtccatcctgattcgatctcgtacgaagagcaacaaagatggcggcaaccaggaagtggagattgcacgatgccacaagggtcaatactttggcgaactcgcactcgttaccaacaaacccagagccgcttcagcctacgccgtgggtgacgtgaagtgtctagtcatggatgttcaggcattcgaacggttactcgggccttgtatggatattatgaagcgtaacatatcccattatgaggagcaactggttaagatgttcggctcatctgtcgacttgggaaatctgggtcagtag

SEQ ID NO: 143865 - DNA, 1215 bp, Artificial Sequence
  derived and/or modified sequence
atgagtcacattcagatcccccccgggctgacagaactgcttcagggttatacggtcgaagttcttaggcagcagccaccagatctcgtggagttcgctgtcgagtacttcaccagactgcgtgaggccagagccccagcaagcgtgctccctgcagcaaccccacgccagtctctggggcaccccccacctgaaccaggacccgaccgcgtggccgacgccaaaggggactcagagtctgaggaggacgaggacctggaggttcccgtgccaagtaggttcaaccggcgggtttctgtgtgcgcagaaacctataacccagacgaggaggaggaagatactgatcctagggtgatacatcctaagaccgatgagcaaagatgcaggctgcaggaagcctgcaaggatatcctcctgtttaaaaacctggatcaggagcagctgagtcaagtgctcgacgcaatgttcgaacggattgttaaggcggacgaacacgtgattgaccagggagacgacggagataatttttatgtaatcgaacggggcacttatgatatcctagtgacaaaggataatcaaacaaggagcgttggtcagtacgataatcgcggctcctttggggagctggccctcatgtacaacacaccccgcgccgcgaccatcgtcgccacttcggaagggagtttgtggggcttggatagagtgacctttaggcggatcattgttaaaaacaatgctaagaagagaaaaatgttcgagagcttcattgagagtgtgcctttattaaagagcctcgaggtgtccgaacggatgaagatcgtggacgtcataggggaaaagatatacaaggacggagagcgcatcatcacacaaggagaaaaggcagactcattctacattattgaatcgggcgaagtgagtatcctgatcaggagcagaactaaaagcaataaagatgggggcaatcaggaggttgaaattgctcggtgtcacaagggacaatatttcggagaacttgcccttgtgaccaataaaccgcgcgcggcctccgcttacgccgtgggggatgtcaagtgcctcgtgatggatgttcaagcgttcgaacggctgctcggaccatgcatggatattatgaagcggaatattagccactatgaagagcagctggtcaagatgttcggctccagcgttgacctgggtaacctggggcagtag

SEQ ID NO: 143866 - DNA, 1215 bp, Artificial Sequence
  derived and/or modified sequence
atgagccacatccagatccccccaggcctgacagagctgctgcagggctacacagtggaggtgctgcggcagcagcccccagacctggtggagtttgctgtggagtacttcacccggctgcgggaggcccgggccccagcctctgtgctgcctgctgccaccccccggcagagcctgggccaccccccacctgagcccggccctgacagagtggctgatgccaagggggacagcgagagcgaggaggatgaggacctggaggtgcctgtgcccagccgcttcaacagaagagtgtctgtgtgtgccgagacctacaacccagatgaggaggaggaggacacagaccccagggtcatccaccccaagacagatgagcagcgctgccgcctgcaggaggcctgcaaggacatcctgctcttcaagaacctggaccaggagcagctgagccaggtgctggatgccatgtttgaaagaattgtgaaggcagatgaacatgtgattgaccagggagatgatggagacaacttctacgtgattgagcggggcacctatgacatcctggtgaccaaggacaaccagaccaggtctgtgggccagtatgacaacagaggcagctttggagagctggccctgatgtacaacaccccccgggccgccaccatcgtggccaccagcgagggcagcctgtggggcctggacagagtgaccttccgccgcatcatcgtgaagaacaatgccaagaagaggaagatgtttgagagcttcatcgagagcgtgcccctgctgaagagcctggaggtgtctgagaggatgaagatcgtggatgtgattggagagaagatctacaaggatggagagcgcatcatcacccagggcgagaaggctgacagcttctacatcattgaaagtggagaggtgtccatcctgatccgcagcaggaccaagagcaacaaggatggcggcaaccaggaggtggagatcgcccgctgccacaagggccagtactttggagagctggccctggtgaccaacaagccccgggccgccagcgcctatgctgtgggagatgtgaagtgcctggtgatggatgtgcaggcctttgagcggctgctgggcccctgcatggacatcatgaagaggaacatcagccactatgaggagcagctggtgaagatgtttggcagctctgtggacctgggcaacctgggccagtag

SEQ ID NO: 143867 - DNA, 1215 bp, Artificial Sequence
  derived and/or modified sequence
atgagccacatccagatcccccccggcctgaccgagctgctgcaggggtatacagtggaagtcctaagacagcagccacctgacctcgttgaatttgcggtagaatactttactagactgcgggaagctcgggctcctgcctctgtgctccccgccgccactcctcggcagtctttaggacaccctccccccgagcctggacccgatcgagtggccgatgcaaagggcgactctgaaagcgaagaggacgaggatttggaggtgcccgtgcccagcagatttaaccgcagagtcagtgtgtgcgccgagacctataaccctgatgaggaagaagaggacactgaccctcgggttatccaccccaagactgacgaacagaggtgccgtcttcaagaggcctgcaaagacattctgttgttcaagaacctggatcaagaacagttgtcccaggttttggacgccatgttcgaacgtattgttaaggcagatgagcacgtcatagaccagggcgatgacggggacaatttttacgtaatcgaaagaggcacttacgacattctggtcaccaaagataatcagacccgtagcgtcggacagtacgataaccgaggtagcttcggagaactggcattaatgtacaacacacctagagccgcaaccatcgtcgctacttctgaaggcagtctctggggcctggatagggtcaccttccgtcgcataatcgttaaaaataatgcgaagaagcgaaaaatgtttgaatcctttattgagtctgtgcccctcctgaagagtttggaagtgtctgagcgtatgaagatcgtagatgtcatcggcgaaaagatttacaaggacggggagcgcataatcacgcaaggggaaaaggccgatagcttttacatcattgagtctggagaggttagtatcctgattagatctcggactaagtcaaacaaggatggagggaaccaggaagtcgagattgcgcgttgccacaagggccagtacttcggcgagttggccctggtgaccaacaagcccagagcagcgtccgcatacgccgtcggcgacgtgaagtgcttggtgatggacgtccaggcgtttgaaaggctgttgggcccctgtatggacatcatgaaacggaacataagtcattacgaagaacagctcgtgaaaatgttcggctcctccgtggacctaggcaacctggggcagtag

SEQ ID NO: 143868 - DNA, 1215 bp, Artificial Sequence
  derived and/or modified sequence
atgagccacatccagatcccccccggcctgaccgagctgctgcaggggtacaccgtagaagtgctccgtcaacagccgcccgacctggtggaattcgccgttgagtactttaccaggctgagagaagctcgcgccccagccagtgtcctgcctgcggcaacccctcgacagtccctcgggcaccctccgcctgagccgggaccagacagagttgcagatgcgaaaggtgatagcgagagcgaagaggacgaggatctggaagtgcccgtacccagccgttttaataggcgagtctcagtgtgcgcagaaacatacaatccagatgaggaggaggaagacacggatcctagagtgatccatcctaagactgatgaacaacgctgcagattgcaggaagcatgcaaggatatcctgctcttcaagaatttggaccaggaacaattgagtcaagtgttggatgcaatgttcgagagaatcgtgaaggccgacgagcatgtgattgaccagggagatgatggggacaacttttacgtcattgagagaggtacctatgacatactggtcactaaagataatcagacgcgcagcgtcgggcaatatgataatcgcgggagcttcggcgaattagccctaatgtacaatacacctagggctgctactattgttgccacatcagagggctcgctctggggcctagatcgtgtaacatttcgccgcatcatcgtgaagaataacgctaaaaagcgaaaaatgttcgagtccttcattgaatctgtgcccctcctgaagagtttagaagtgtctgaaaggatgaaaatcgtggacgttattggagaaaaaatttacaaggatggcgagcgcataataacccagggggagaaagccgacagcttctatatcatagaatcgggtgaggtgtccatactgatcagatcccggaccaaatccaacaaggatgggggtaaccaggaagtcgagatcgctagatgtcacaaaggtcagtattttggggaacttgcgctcgtgactaataaaccgcgggccgccagcgcttatgccgtgggggacgttaaatgtctcgtaatggacgtgcaggccttcgaacggctgctgggaccttgcatggatataatgaaaaggaatatctcccactacgaggagcagttagttaagatgtttgggtcttccgtagatctggggaaccttggacagtag

SEQ ID NO: 143869 - DNA, 1215 bp, Artificial Sequence
  derived and/or modified sequence
atgtctcacatacagattcccccagggctgacagaactcctgcaaggctataccgtggaagtgcttcgccagcagcctcccgacttagttgaattcgctgtcgagtacttcacaaggctacgcgaggccagagcgccagcttccgttctcccagccgcaacccccaggcagtccttgggccatccaccgccagagccaggtcccgatcgagttgcggacgctaagggagactctgagtccgaagaggatgaggacctcgaggtgccagtgccttctaggttcaatcgccgagtcagtgtatgtgcggagacatacaaccctgatgaagaggaggaggatacagatccgagggtgatacaccccaaaacggacgagcaacgctgtcggttgcaagaggcttgtaaagatattttgctctttaaaaacctggaccaagaacagctgagccaggtccttgatgccatgtttgaacgtatagtaaaggctgatgaacatgtaatagatcagggggacgacggcgataatttttacgtgattgagcgagggacatacgacattttggtgacgaaggacaaccagactcgatctgttggacaatacgacaacagaggaagcttcggagagctggccttaatgtacaatacccccagagctgcaactatagtggccacttctgaaggtagcctatgggggttggatcgggttaccttccgcagaataattgttaagaacaacgcgaaaaagagaaaaatgttcgagtctttcatcgagagcgtgcccctgctcaaatctcttgaagtctccgagagaatgaagatcgtggatgtaataggggaaaagatctataaagatggggagagaataattacacagggtgagaaggctgattccttttacatcatcgagtctggggaggtctctatccttatcagaagccggacaaagagcaataaagatggcggtaatcaagaagtcgagattgcaagatgtcataagggtcagtattttggtgagttagcccttgtcactaacaagccaagggccgcaagcgcttacgctgtgggcgatgtcaagtgcctggttatggacgttcaggcatttgagaggctgctcggaccctgcatggatattatgaaaaggaacatttcccattatgaggaacagctggtgaaaatgttcggttcttccgtagacctgggaaatttggggcagtag

SEQ ID NO: 143870 - DNA, 1215 bp, Artificial Sequence
  derived and/or modified sequence
atgtcccacatccaaataccacctggcttgaccgagctcctacagggttacactgtggaagttctgcgtcagcaacctccagatttagtggagtttgcagtcgagtactttactcggctcagagaggccagagccccagccagcgttctgcctgccgcaactccgagacagtctctgggccatcccccacccgaacccggacccgaccgggtagccgatgctaaaggagactctgaaagcgaggaagacgaagacctggaggtccccgtccccagcaggtttaacagacgcgtctcagtgtgcgccgagacctacaatccagacgaggaggaggaagacactgaccctagggtgatccatccaaagaccgatgagcagcgctgccggctgcaggaggcctgtaaggatattttgctcttcaagaacctcgaccaggaacagttatcacaagtcctcgacgccatgttcgaacggatcgtgaaagccgacgaacatgtgatcgatcaaggcgatgacggcgacaatttctacgtgatcgagagaggtacctatgatatactggtgaccaaagataaccagactcgctctgtcggccaatacgacaatagggggagctttggagaactcgctctcatgtataacacccctcgcgcagcaaccattgttgccactagcgaggggagcctgtgggggttggaccgggtgacctttaggaggattattgtgaaaaataacgcgaaaaagagaaaaatgtttgagagctttatcgagagtgtccccctgctgaagtctctggaagtgtcagaacggatgaagatcgtggacgtgattggcgagaaaatttacaaggatggagagcgaatcataacacaaggagagaaagccgacagtttttatatcattgagtccggcgaggtgtccattctgatcaggagtagaaccaagtctaataaagacggcggaaaccaagaagtggagatcgccagatgccataagggccaatatttcggagaactggcattggtgaccaacaaacctcgtgccgcatctgcctacgccgtaggcgacgtaaagtgccttgtgatggacgttcaagcattcgaaaggctgctgggcccttgcatggatatcatgaaaagaaacatctcacactatgaagagcagctggtgaagatgttcggaagttcagtggaccttggcaacctcggccagtag

SEQ ID NO: 143871 - DNA, 6471 bp, Artificial Sequence
  derived and/or modified sequence
agctcgcctgcccgtcggtccccgcggcggcggcggctgcccagtgacagcggcggcggtgccaggtcggccgtggtagcgtagggttgcgcggcccggaaacgcagagccggccaaagagcggcgcgacgtgagccggggccgtgcgcgaagagacctcgcgggcgcggagcgaaaggccggcgtgagtgagcgcggagacagtggccgccggcggcccaacccgtctatcccttcggccgccgccggcatgagccacatccagatcccgccggggctcacggagctgctgcagggctacacggtggaggtgctgcgacagcagccgcctgacctcgtcgaattcgcagtggagtacttcacccgcctgcgcgaggcccgcgccccagcctcagtcctgcccgccgccaccccacgccagagcctgggccaccccccgccagaacccggcccggaccgtgtcgccgacgccaaaggggacagcgagtcggaggaggacgaggacttggaagttccagttcctagcagatttaatagacgagtatcagtctgtgctgagacctataaccctgatgaggaagaggaagatacagatccaagggtgattcatcctaaaactgatgaacagagatgcagacttcaggaagcttgcaaagatattctccttttcaaaaatcttgatcaggaacagctttctcaagttctcgatgccatgtttgaaaggatagtcaaagctgatgagcatgtcattgaccaaggagatgatggagacaacttttatgtcatagaacggggaacttatgacattttagtaacaaaagataatcaaacccgctctgttggtcaatatgacaaccgtggcagttttggagaactagctctgatgtacaacaccccgagagctgctaccattgttgctacctcagaaggctccctttggggactggaccgggtgacttttagaagaatcatagtgaaaaataatgcaaagaagaggaagatgtttgaatcatttattgagtctgtgcccctccttaaatcactagaggtgtcagaacgaatgaagattgtggatgtaataggagagaagatctataaggatggagaacgcataatcactcagggtgaaaaggctgatagcttttacatcatagagtctggcgaagtgagcatcttgattagaagcaggactaaatcaaacaaggatggtgggaaccaggaggtcgagattgcccgctgccataaggggcagtactttggagagcttgccctggtcaccaacaaacccagagctgcctcagcttatgcagttggagatgtcaaatgcttagttatggatgtacaagcattcgagaggcttctggggccctgcatggacatcatgaagaggaacatctcacactatgaggaacagctggtgaagatgtttggctccagcgtggatctgggcaacctcgggcagtaggtgtgccacaccccagagccttcttagtgtgacaccaaaaccttctggtcagccacagaacacatacagaaaacagacatgacagaactgttcctgccgttgccgccactgctgccattgctgtggttatgggcatttagaaaacttgaaagtcagcactaaaggatgggcagaggttcaacccacacctccactttgcttctgaaggcccattcattagaccacttgtaaagattactccaacccagtttttatatctttggttcaaaacggcatgtctctccaacaatttaagtgcctgatacaaagtccaaagtataaacatgctcctttcctctcttgctgctactcttgcttttggaagttaccacagggtctgcagaaacctgttgtataactgtagacactctctaatggttctcaaaggaggaaatgtagccttcagtctcctcatttgtcctttgaggaagtccacatttgttcacagttgcagcctttggttttacagtgggaaatggtggtggatgatatggacatatgtagcccagtggcattgtactttctgctgacagctgcacacattacagctgtctccaaacccacagtgatgcttagggaaagaccctgctcaggacccagcaggtcagcaccccagagcagactgataggtccgtgggacccatgttagagcagaaaatttgggctcagcacattttactgttagtagagagccaggaaacgttttctgggttggggattttgtgggattttttaatttttttagtaggttttgtttaacctctgtgcagtttgtatgaatgaattgctatacatttataaggagccagggtctggagggttgctatcactttgtccagcccaaataccttcctgggcaactcctaccatttgtttgcagttgcctctactagctgatggcagtatgctggaaagaggttgtactataaagagagttctttccttctactccagagttgttgtgtagctttgccattgaaccgatcaatttttaaactctttaaagaagcagcagctatttttttgaaattaaagaaaattctcaggccaggctcaatggctcatgcctataattgtagtgctttgggaggctgagctgggaggatcgcttaagaccagcctaggcaacagagtgagatcctgtctctacaaaaacaaaaattttttttttgttttctttttgagacggagtttcgctcttgttgcccaggctggagtgcaatggtgcggtcttggctcaccgcaacctccgcctcccagattaaagtgattctcctgcctcaacctcctgagtagctgggattacaggcatgcgccaccatgccgggcgaattttgtatttttaatagagacagggtttctctgtgttggtcaggctggtctcaaactcccaacctcaggtgatccgcccacctcagcctctcagagtgctgggattacagatgtgagccactgcacctggcaaaaaaaaaatttttttttaatttgtcaggtgtggtgatgcatgcatgtagtcccaaatacttaggaggctgaggtggaaggatcacttgagcccaggaggtcaaggcaacagtgagctgtgatcatgccactgcactccagtctgggtgacacagtgagaccctgtctcttaaaaaaaaaaaaagaaagaaaaaaaattattctttaggtaatttcacttggacatattcatgtatatggagtttgtcagctgactcaggcatttaccctaaagatcaaatctgttttcaaaaattggcattggccaggcacggtgacccacacctgtaatcccagcactttgggaggccgaggcgggcggatcacgaggtcaggggttcaagaccagcctggccaacatagtgaaaccccgtctctactaaaaatacaaaaaattagctgggcatggtggtgggcgcctgtaatcccagctacttgagaggctcaggcaggagaatcgcttgaacctgggagtggaggttgcagtgagccgagattgcaccattgtattccaccccgggtgacagtgcaagactccatctcaaaaaaaaaaaaaaaatttggcatcatttacaatttcatagaattactgtgaaggcctttctagttgagatgttggggtatttgggattctaattgttaaccccagaagaaggtaatttagcttgtatttatttaaaacccatttagccttttacttatatctggtagaattccagtgatcatcctaataaggtatatttcagaataatttttttttccttcagaataacttagaatcagatgctataagggctcctaggagcagtgtgaaatttccgtaaagataaatttgaatgttgtaaccaagtttatattaaaccaagaggccatttccaatatgattttttgtttctttttaacttgttaagtccctaagagattacatgctagggcttgagtcatttctattgtagataatgatggcccacacagtcaccttcaactatccacataagctaggctttccgcttttgccacggacagtgtgaccaagatatttccagagtaaataacccaccacaaccttggtaattcctcttttcttcttaagctccaggaagcgaaagcagaaggactcttttcagactgccctctgtagcctacattgcagctttccaaaacaggcagctagcactgggaaagcccatgtggtgaccccatatttttctgaggttcttcttttccatggtgttactttattatcagaaagtaaattcagaaaacaggtcttgcccttagcagacaagaaccacaccagtttcttgtaaaggtaacggatacattgggattcaggagtgacacagaggtccagccccagaacttgtaaggattttgtttgaacactgagcagatgcctcctccctgccacccatcacactagttagggctggccatgaattctatgccagagtcactcctgcagtctgctagggatgggccttcttatcccactctcgcacacatcccagtctagtctttgccttcacagagtcctccttgacacccctgacttaatgatagttgctgttttggagtagaattgatcaggtttaagtcatcctgctcaggttgggcatagtggctcatgcctgtaatctcagcactttgggaagccaaagtgggaggattgcttgagcccaggagttccaaaccatcctgggcaacagagggagaccctgtctctaccaagaaaaaaaaaaaaaaaaaaagttaaaaaaacaattagctggacctggtggtgcacactcagtaggctgaggtgaaaggattcctttaacctgggagactgaagctgcagtgagccatgatcgtgccactgcactccagtctgggggacaaagtgggaccctatctcaaaaaaaaaaaaaaaaagtcatcctcctccaactactgattgacatatggatcatcagttcagaccctcactgcatacaggatccctagagggttctatttaatagcttgaggaagggagactttaaaaggacgtgtgtgagtgaaataggatatagccattaccacggtgccaggacctgacagcgttccaattctttttgcagcatggggaatcaaaggtggcatgccaagttcaactcagggctgaggtatccacattgtccacatcaggcaagccctgcactgacggttgagcctcatggagaggagcatgtgttggaaagagatccctttgttaactgttttgtggtgttctcttcaatgaattagagctcatgccccttttctggctttgctgttgattttggatggtagagaatattcctgagagccttccttttggcccccagcttatgccacccactctcttctcttggttgaattctctgaaggaaaggttcatgtgctattgtcctgttagtcaatagtcttcatatataattgtgttacatatattgctgtagactctcagaaatcagggtagagcttttcctttgagcagtttaatgagtgaattcagcagcaaagtcgcaagaaatggttctccagccaggagaggttatgtttatcctctgattgcccgttttctctgcacacagtgatatcgtattcagtgagaggtgctgttggcacccagcagcaccctgggcacacagcatttcatgtcatgtcacagtgtacaagctaccctctaattcagaaagaagagcattttgcacagagaaaaataaaaagatccatgaatgtcatcttttatcttttattttcagttggctgatgttggaatttttgttcttgtcatgaacttgtaaaccaatcttgccaagatacaagttgttttggtttttcactacaatgacctcttgttcctcctgtcttgactgctgacgttcctcaatgattctattgtctattttatgggaagcagccttcccataggtttccttttacacactgcagggctatctttatactttaaaaaaaaaaaaaaaaaaaaaaaaaaggacaagaactgtcactaacctcatggaggggtttgcgtaaaaccatttagcccaccttgagcaaagggtagattccgtgttgtttttttaagctcactgtaataaaataaatctaattcagcattattgtgctacctcaaaggtaaaaaatgttttaaggtcttcttttggtcctgagttctatatacagtgtttgaaatgtccttcatttggaattattttttaaattcttggagtgaattttattttaatctgttttaatcttgtattttaatctcagaagaataagtgattgaaacgtgatcaattcttgctctgtggtgttaaacatataatgaacagtcattaagaattaagtcactgtttgccataaacaaggttgatgttctttttgttgttgttaaggaaaccctagggctcggctttactcttgattaataaaggctgacaaatcatgtctga

SEQ ID NO: 143872 - DNA, 1849 bp, Artificial Sequence
  derived and/or modified sequence
agtgacagcggcggcggtgccaggtcggccgtggtagcgtagggttgcgcggcccggaaacgcagagccggccaaagagcggcgcgacgtgagccggggccgtgcgcgaagagacctcgcgggcgcggagcgaaaggccggcgtgagtgagcgcggagacagtggccgccggcggcccaacccgtctatcccttcggccgccgccggcatgagccacatccagatcccgccggggctcacggagctgctgcagggctacacggtggaggtgctgcgacagcagccgcctgacctcgtcgaattcgcagtggagtacttcacccgcctgcgcgaggcccgcgccccagcctcagtcctgcccgccgccaccccacgccagagcctgggccaccccccgccagaacccggcccggaccgtgtcgccgacgccaaaggggacagcgagtcggaggaggacgaggacttggaagttccagttcctagcagatttaatagacgagtatcagtctgtgctgagacctataaccctgatgaggaagaggaagatacagatccaagggtgattcatcctaaaactgatgaacagagatgcagacttcaggaagcttgcaaagatattctccttttcaaaaatcttgatcaggaacagctttctcaagttctcgatgccatgtttgaaaggatagtcaaagctgatgagcatgtcattgaccaaggagatgatggagacaacttttatgtcatagaacggggaacttatgacattttagtaacaaaagataatcaaacccgctctgttggtcaatatgacaaccgtggcagttttggagaactagctctgatgtacaacaccccgagagctgctaccattgttgctacctcagaaggctccctttggggactggaccgggtgacttttagaagaatcatagtgaaaaataatgcaaagaagaggaagatgtttgaatcatttattgagtctgtgcccctccttaaatcactagaggtgtcagaacgaatgaagattgtggatgtaataggagagaagatctataaggatggagaacgcataatcactcagggtgaaaaggctgatagcttttacatcatagagtctggcgaagtgagcatcttgattagaagcaggactaaatcaaacaaggatggtgggaaccaggaggtcgagattgcccgctgccataaggggcagtactttggagagcttgccctggtcaccaacaaacccagagctgcctcagcttatgcagttggagatgtcaaatgcttagttatggatgtacaagcattcgagaggcttctggggccctgcatggacatcatgaagaggaacatctcacactatgaggaacagctggtgaagatgtttggctccagcgtggatctgggcaacctcgggcagtagcatggggaatcaaaggtggcatgccaagttcaactcagggctgaggtatccacattgtccacatcaggcaagccctgcactgacggttgagcctcatggagaggagcatgtgttggaaagagatccctttgttaactgttttgtggtgttctcttcaatgaattagagctcatgccccttttctggctttgctgttgattttggatggtagagaatattcctgagagccttccttttggcccccagcttatgccacccactctcttctcttggttgaattctctgaaggaaaggttcatgtgctattgtcctgttagtcaatagtcttcatatataattgtgttacatatattgctgtagactctcagaaatcagggtagagcttttcctttgagcagtttaatgagtgaattcagcagcaaagtc

SEQ ID NO: 143873 - DNA, 1215 bp, Artificial Sequence
  derived and/or modified sequence
atgagccacatccagatcccccccggcctgaccgagctgctgcagggctacaccgtggaggtgctgagacagcagccccccgacctggtggagttcgccgtggagtacttcaccagactgagagaggccagagcccccgccagcgtgctgcccgccgccacccccagacagagcctgggccaccccccccccgagcccggccccgacagagtggccgacgccaagggcgacagcgagagcgaggaggacgaggacctggaggtgcccgtgcccagcagattcaacagaagagtgagcgtgtgcgccgagacctacaaccccgacgaggaggaggaggacaccgaccccagagtgatccaccccaagaccgacgagcagagatgcagactgcaggaggcctgcaaggacatcctgctgttcaagaacctggaccaggagcagctgagccaggtgctggacgccatgttcgagagaatcgtgaaggccgacgagcacgtgatcgaccagggcgacgacggcgacaacttctacgtgatcgagagaggcacctacgacatcctggtgaccaaggacaaccagaccagaagcgtgggccagtacgacaacagaggcagcttcggcgagctggccctgatgtacaacacccccagagccgccaccatcgtggccaccagcgagggcagcctgtggggcctggacagagtgaccttcagaagaatcatcgtgaagaacaacgccaagaagagaaagatgttcgagagcttcatcgagagcgtgcccctgctgaagagcctggaggtgagcgagagaatgaagatcgtggacgtgatcggcgagaagatctacaaggacggcgagagaatcatcacccagggcgagaaggccgacagcttctacatcatcgagagcggcgaggtgagcatcctgatcagaagcagaaccaagagcaacaaggacggcggcaaccaggaggtggagatcgccagatgccacaagggccagtacttcggcgagctggccctggtgaccaacaagcccagagccgccagcgcctacgccgtgggcgacgtgaagtgcctggtgatggacgtgcaggccttcgagagactgctgggcccctgcatggacatcatgaagagaaacatcagccactacgaggagcagctggtgaagatgttcggcagcagcgtggacctgggcaacctgggccagtag

SEQ ID NO: 143874 - protein, 156 aa, Artificial Sequence
  derived and/or modified sequence
MAVGKFLLGSLLLLSLQLGQGWGPDARGVPVADGEFSSEQVAKAGGTWLGTHRPLARLRRALSGPCQLWSLTLSVAELGLGYASEEKVIFRYCAGSCPRGARTQHGLALARLQGQGRAHGGPCCRPTRYTDVAFLDDRHRWQRLPQLSAAACGCGG

SEQ ID NO: 143875 - DNA, 471 bp, Artificial Sequence
  derived and/or modified sequence
atggccgtgggcaagtttttactgggatccttgctgttactgtcgctgcagcttggccagggttggggaccggacgcccgtggggtgcccgtggccgatggcgaatttagttctgaacaggtcgcaaaggccggtggtacttggctgggaacacatcgacctctggccaggttgcggcgggccttgagcggcccttgccagctctggtccctgacactgtctgttgccgagctcggactgggctatgcatccgaggaaaaagttatttttaggtactgtgccggcagttgtcctcggggagctagaacccagcacggcctggctttggcccgtttgcaaggccagggccgcgcacacggcgggccttgttgccggccgacccgctatactgatgtggccttcctggacgatagacatcggtggcagcggcttccccaattatctgccgccgcatgcggttgtggggggtag

SEQ ID NO: 143876 - DNA, 471 bp, Artificial Sequence
  derived and/or modified sequence
atggctgtgggcaagttcctgctgggcagcctgctgctgctgagcctgcagctgggccagggctggggcccagatgcccggggcgtgcctgtggctgatggagagttcagcagcgagcaggtggccaaggccggcggcacctggctgggcacccaccggcccctggcccggctgcggcgggccctgagcggcccctgccagctgtggagcctgaccctgtctgtggccgagctgggcctgggctacgccagcgaggagaaggtgatcttccgctactgtgccggcagctgccccaggggggcccggacccagcacggcctggccctggcccggctgcagggccagggccgggcccatggaggcccctgctgccggcccacccgctacacagatgtggccttcctggatgacagacaccgctggcagaggctgccccagctgtctgctgctgcctgtggctgcggcggctag

SEQ ID NO: 143877 - DNA, 471 bp, Artificial Sequence
  derived and/or modified sequence
atggccgtgggcaagttcctgctgggcagcctgctgctgctgagccttcaactcggtcaggggtgggggcccgatgcccgaggcgtcccagtggccgacggcgaattcagctcagaacaggtcgctaaggctggcgggacttggctgggtacacatagaccactggcacgtttgcgtcgggctttatcagggccttgtcagctgtggtcattgacattgagtgttgcagagttgggcctcgggtacgcttccgaagaaaaagttattttcaggtattgtgccggatcctgccccaggggagcgagaactcagcatggcttggccctggcgaggctgcaaggccaggggagggcgcatggagggccctgttgccggcccaccagatatacagacgtggcatttttggatgacaggcatcgatggcagagactgccacagctctctgcagctgcttgcggatgcggggggtag

SEQ ID NO: 143878 - DNA, 471 bp, Artificial Sequence
  derived and/or modified sequence
atggccgtagggaagttcctgctgggctccctgctgctcctgtccctgcagctgggacagggctggggccccgatgcccgtggggttcccgtggccgatggagagttctcgtctgaacaggtggcaaaggctggagggacctggctgggcacccaccgcccccttgcccgcctgcgccgagccctgtctggtccatgccagctgtggagcctgaccctgtccgtggcagagctaggcctgggctacgcctcagaggagaaggtcatcttccgctactgcgccggcagctgcccccgtggtgcccgcacccagcatggcctggcgctggcccggctgcagggccagggccgagcccacggcgggccctgctgccggcccactcgctacaccgacgtggccttcctcgatgaccgccaccgctggcagcggctgccccagctctcggcggctgcctgcggctgtggtggctga

SEQ ID NO: 143879 - DNA, 471 bp, Artificial Sequence
  derived and/or modified sequence
atggcggtggggaaattcctgctgggctcattgttactgctttccttgcaactaggtcaagggtggggaccggacgccaggggagtcccggtggccgacggcgaattctcctctgagcaggttgccaaagcgggaggaacgtggctgggcacgcaccgtccattggccagactcagaagggccctgagcgggccatgtcagctgtggtcactcaccctgtcagtggccgagcttggcctggggtacgcatccgaggagaaggtgatctttcgatattgtgccggatcctgccctaggggtgccagaacacaacatggccttgccctggcccgacttcagggccaggggagagcccacggcggtccctgctgtagacccactagatacaccgatgtagccttcctcgacgacagacatcgttggcagagactgccccagctgagcgccgctgcctgcggatgtggcggatag

SEQ ID NO: 143880 - DNA, 471 bp, Artificial Sequence
  derived and/or modified sequence
atggccgtgggcaagttcctgctgggcagcctgctgctgctgagcctgcagctgggccagggctggggccccgacgccagaggcgtgcccgtggccgacggcgagttcagcagcgagcaggtggccaaggccggcggcacctggctgggcacccacagacccctggccagactgagaagagccctgagcggcccctgccagctgtggagcctgaccctgagcgtggccgagctgggcctgggctacgccagcgaggagaaggtgatcttcagatactgcgccggcagctgccccagaggcgccagaacccagcacggcctggccctggccagactgcagggccagggcagagcccacggcggcccctgctgcagacccaccagatacaccgacgtggccttcctggacgacagacacagatggcagagactgccccagctgagcgccgccgcctgcggctgcggcggctag

SEQ ID NO: 143881 - protein, 272 aa, Artificial Sequence
  derived and/or modified sequence
MLIGTPTPRDTTPSSWLTSSLLVEAAPLDDTTLPTPVSSGCPGLEPTEFFQSLGGDGERNVQIEMAHGTTTLAFKFQHGVIAAVDSRASAGSYISALRVNKVIEINPYLLGTMSGCAADCQYWERLLAKECRLYYLRNGERISVSAASKLLSNMMCQYRGMGLSMGSMICGWDKKGPGLYYVDEHGTRLSGNMFSTGSGNTYAYGVMDSGYRPNLSPEEAYDLGRRAIAYATHRDSYSGGVVNMYHMKEDGWVKVESTDVSDLLHQYREANQ

SEQ ID NO: 143882 - DNA, 819 bp, Artificial Sequence
  derived and/or modified sequence
atgctaatcggaacccctacaccgagagatactactccttctagctggctgacatcttcactgctggttgaggccgctcccctcgacgatacaacactacccaccccagtgagcagcggatgtccaggtctggagcctacagagttctttcagagcctgggcggagacggggagcggaacgtgcagattgagatggcacacgggacgacaaccctcgctttcaagtttcagcacggggtcatcgctgcggtagattcaagggccagtgccggctcctacattagtgctctccgggtcaacaaggtgatcgagatcaacccatatctcttggggacgatgtccggctgcgcagctgactgccaatactgggaaaggttgctggctaaagagtgccgactgtactacctgagaaatggtgaacggatcagcgttagcgcagcctctaagctactgagtaacatgatgtgtcagtacaggggtatgggactgagcatgggaagtatgatctgcggctgggacaagaaagggcccggcctttactacgtcgatgagcacggaacaagactttctgggaatatgttctccacaggctccggcaatacttatgcttacggtgtgatggactcgggctatcggccaaatcttagtcccgaggaagcgtatgatctgggtcggcgagctatagcttatgctacacaccgggactcctactcggggggtgtggtcaacatgtaccacatgaaggaagatgggtgggtcaaggtggagtcgacagatgtcagcgacttgctgcatcaatatagggaagctaatcagtag

SEQ ID NO: 143883 - DNA, 819 bp, Artificial Sequence
  derived and/or modified sequence
atgctgatcggaactccgacacctcgagatacgacgcctagcagttggctgacaagcagcttgttggtggaagctgcacctttggatgatacaaccctgcccacaccggttagcagcgggtgccccggactggaacctaccgaattctttcagtccctgggaggagacggagagcgaaatgtgcagattgagatggcccatggcactacaacgttggcttttaagttccagcacggtgtgatcgcggccgtagactcaagggcttccgccggtagttacatctctgcgttgagagtaaacaaagtgatcgagattaatccttaccttctgggtactatgtctggatgtgctgcagactgtcagtattgggaacgactgttagccaaggaatgccgattatattatctgcggaacggcgagaggattagcgtaagtgcggcatccaaattgctgtctaatatgatgtgccagtaccgtggcatggggttatccatgggatcaatgatttgtggctgggataagaagggaccgggcctgtactacgtggacgaacatggaacacggctgtctggaaacatgttctccactggatctggcaatacttacgcctacggggttatggattccggctaccgtccaaacctgtctcccgaagaggcctacgaccttggtcggagggctatcgcctacgctacacaccgcgactcttactcaggtggtgtggtgaacatgtatcacatgaaggaggatggctgggttaaggtggagtctaccgacgtatcggacttgctgcatcagtaccgcgaggcaaaccagtag

SEQ ID NO: 143884 - DNA, 819 bp, Artificial Sequence
  derived and/or modified sequence
atgctgattggaacgcccacccccagagacactaccccatcatcctggttaacttccagtctcttggtagaagcagcacctctggacgacactaccttgcccaccccggttagctctggctgccctggactcgagcccactgaattcttccagtccctgggcggagatggcgagagaaacgttcagatcgagatggcccacgggaccactactctcgccttcaagttccagcacggtgtcatcgccgccgtcgattcccgcgccagcgccggctcctatatttcagcactgagggtaaacaaagtaatcgagataaacccatacttacttggaacaatgagtgggtgcgccgctgattgccaatactgggaacggttgctcgctaaagagtgccggctgtactatttaaggaatggcgagcgtatctcagtgtcagcagcatcaaagctattaagcaatatgatgtgccagtatagaggcatgggcctcagcatgggaagcatgatctgtggatgggacaagaagggtcctggattatattatgtagatgagcacggaacgcgcttgagcggaaacatgttcagcaccggttctggtaatacatacgcttatggcgtgatggactcaggttaccgtccaaacctgagccctgaggaagcatatgatctaggcagacgggccatagcctatgccacccatagggatagttactctggcggcgtcgttaacatgtatcatatgaaggaggatggttgggtcaaggtcgaaagcaccgatgttagcgatttactgcaccagtatagggaagcaaatcagtag

SEQ ID NO: 143885 - DNA, 819 bp, Artificial Sequence
  derived and/or modified sequence
atgcttatcggaacccctaccccacgcgatacaaccccctccagctggctgactagtagcctgctggtggaggctgcacccctcgacgacaccactctgccaactccggtctccagtggttgccccggcttagaacccacggagtttttccaatcgctcggaggggatggggaaagaaacgttcagattgaaatggcgcacggtacaacaacactggcatttaagtttcagcatggcgttatcgccgctgtggactcgcgggcgtcagcgggctcttacataagtgcactacgcgtaaataaagtgattgaaatcaatccatatttactgggtacaatgtccggctgtgctgcagactgccagtactgggagagacttctagccaaggagtgccggctctactaccttcggaacggggagcgcatctctgtatccgccgcttcaaaattactgtctaacatgatgtgccaatataggggtatgggattgagcatgggaagtatgatctgtggatgggataaaaaaggtccggggctctattacgtcgatgagcacggaacaagattatcgggcaatatgttctcaacaggctctggaaacacttatgcttatggagttatggattcaggctatcgccccaacctgtctcctgaggaggcgtatgatctcggtcggagggccattgcatacgctacacaccgggattcctactcgggaggcgttgtgaatatgtatcacatgaaggaagacggttgggtgaaagtagaaagcacagacgtctctgacttgctgcatcagtaccgagaggcaaaccaatag

SEQ ID NO: 143886 - DNA, 819 bp, Artificial Sequence
  derived and/or modified sequence
atgctgattggcactcctacccccagggatacaactccctctagttggttgacaagtagcctgctggttgaggccgcgcccttggacgataccacactgccgactccggtcagcagcggctgccctggccttgagccaaccgagttctttcagagcttggggggagacggagaacgaaatgtgcagatcgagatggcccacgggactacaacgctggcattcaagttccaacacggcgtgattgctgccgtggattcccgcgccagtgctggatcatacatatccgcactgagggtgaacaaggttattgagatcaacccatatttgctcggaacaatgagtggctgcgctgccgattgtcagtactgggagcgccttctcgcaaaagagtgcaggctgtattatttaagaaacggagagcgtatatctgtgagcgccgccagtaaattgctttcaaacatgatgtgtcagtaccggggtatgggactgagtatgggatcgatgatctgcggatgggataaaaaagggcctgggttatactacgtggatgagcacgggacccgcctaagcgggaacatgtttagcacaggcagcggcaacacttatgcatatggtgtcatggactccggatatagaccaaacctgtctcctgaagaagcatatgatctgggtcgtagggcaatcgcgtatgcgactcatcgggactcttattccggaggcgtggtcaacatgtatcacatgaaggaggacggatgggtgaaggttgagtccaccgacgtctcagatctgcttcatcagtaccgggaagccaaccaatag

SEQ ID NO: 143887 - DNA, 819 bp, Artificial Sequence
  derived and/or modified sequence
atgttgattggaactcccacacctagagacactacgccctccagttggctgacatcaagcctgctggtggaggccgcccctcttgacgacaccaccctgcctacccctgtgtccagcgggtgtccaggactggagcccacagaattcttccagtctctcggcggggacggtgagcgcaacgtgcagatcgagatggctcacggcaccaccaccctcgcctttaaattccagcacggtgtcatcgcagcggtggatagccgcgcaagtgctggaagctacatctctgcgttgcgagtaaataaggtcattgagatcaatccatacctcctgggcaccatgagcggctgcgcggccgattgccagtattgggagcggctgctagccaaagagtgtcggctatattatttgaggaacggcgagagaatctccgtgtcagcagcctcaaaacttctgtcgaacatgatgtgccagtaccggggaatggggttatccatgggcagcatgatctgtggatgggataagaagggaccagggctgtattacgtcgacgaacatgggacccgattgtccggcaatatgttcagcacagggagcggaaacacctacgcttacggggtgatggactcagggtaccgcccgaacctctcacctgaagaggcatacgacctgggacggcgtgccattgcctacgcaactcatcgggacagctactctggcggcgtggtgaatatgtaccacatgaaagaggatggatgggtgaaagtggagtcaacagacgtctctgatttgctgcaccagtatcgagaggctaaccagtag

SEQ ID NO: 143888 - DNA, 819 bp, Artificial Sequence
  derived and/or modified sequence
atgctgatcggtacgcctacaccccgcgacaccacgcccagctcatggttgactagttccttgttggtagaggcggcccccctggacgacaccaccctgccaacccccgtgagtagtgggtgcccaggcttggaacccaccgaattctttcagagtctgggcggcgacggcgagcgaaacgtgcagatagaaatggctcacggcactacaacgctggctttcaagtttcagcacggcgtcatcgccgcagtggattcgcgggccagcgccggctcgtacattagtgcactgcgcgtcaacaaagtaatcgagatcaatccctatcttttgggcaccatgtcaggttgcgccgccgactgtcaatactgggagcgcctgctggccaaggaatgtagattatactatttgaggaatggggagcggatcagcgtgtctgcagctagcaagctgctgtccaatatgatgtgccaataccggggtatgggactgagcatggggagtatgatatgtgggtgggacaagaagggtcccggcctgtattatgtggacgagcatggcacacgcctgtctggtaatatgttctcgactggctcagggaacacctacgcatacggcgtgatggactcagggtatagacctaatctaagtcccgaagaggcatacgatctgggccgaagagccattgcttatgccacgcatcgggactcttatagtggaggggtagtaaacatgtaccacatgaaggaggacgggtgggtgaaggttgagtctacagatgttagcgatcttcttcaccaatacagggaagccaaccaatag

SEQ ID NO: 143889 - DNA, 819 bp, Artificial Sequence
  derived and/or modified sequence
atgctgattggaactccgacaccccgggatacaaccccttcttcgtggctgacatcaagtttattggtggaggcagcacccctggatgacacaacactgcccacacctgtgtcgtctgggtgtccaggcctggagccaacggagttcttccagtcattgggcggcgatggagagcgcaacgtccagattgagatggctcacgggactacaaccctggccttcaagtttcagcacggagtcatcgcagcagttgacagcagggcaagtgctggtagctacatttcagctttgagagttaacaaggtaattgaaatcaatccttatctgcttggaaccatgtcgggctgtgcggcagattgtcagtactgggagagattgttggctaaggagtgtcgactgtattacctacggaatggagaaaggatctctgtgtcagctgcgagcaagctgctgtcaaatatgatgtgccagtaccgcggcatgggcctgagcatgggctcgatgatctgcggatgggacaaaaaaggtcccgggctttactacgtggatgaacacggcacaaggttgagcgggaacatgttttccacaggatctggcaacacctatgcctatggggtcatggactctggatatcgccccaatctcagtccggaggaggcttatgacctgggtaggcgagcgatcgcttacgctacccaccgcgattcgtacagtggtggcgttgtgaatatgtaccacatgaaggaggatggatgggtcaaagttgaatctactgatgtgtctgacctcctacaccagtatcgagaggcgaaccagtag

SEQ ID NO: 143890 - DNA, 819 bp, Artificial Sequence
  derived and/or modified sequence
atgctgattggcacccccaccccccgggacaccacccccagctcctggctgaccagcagcctgctggtggaggccgcccccctggatgacaccaccctgcccacccctgtgagcagcggctgccccggcctggagcccacagagttcttccagagcctgggcggagatggagagagaaatgtgcagatcgagatggcccacggcaccaccaccctggccttcaagttccagcacggcgtgattgctgctgtggacagccgggccagcgctggcagctacatcagcgccctgcgggtgaacaaggtgattgagatcaacccctacctgctgggcaccatgagcggctgtgccgctgactgccagtactgggagcggctgctggccaaggagtgccgcctgtactacctgagaaatggagagcgcatctctgtgtctgctgccagcaagctgctgagcaacatgatgtgccagtaccggggcatgggcctgtccatgggctccatgatctgtggctgggacaagaagggccctggcctgtactacgtggatgaacatggcacccggctgagcggcaacatgttcagcacaggcagcggcaacacctacgcctacggcgtgatggattctggctaccggcccaacctgagccctgaggaggcctatgacctgggcagaagagccatcgcctatgccacccaccgggacagctacagcggcggcgtggtgaacatgtaccacatgaaggaggatggctgggtgaaggtggagagcacagatgtgtctgacctgctgcaccagtaccgggaggccaaccagtag

SEQ ID NO: 143891 - DNA, 819 bp, Artificial Sequence
  derived and/or modified sequence
atgctgatcggcacccccaccccccgggacaccacccccagcagctggctgacctctagcctgttggtggaagcagctcctcttgacgataccactttacctacgccagtctctagcggatgtccaggactcgaaccaacggagttctttcagtcattgggtggcgatggggagaggaacgtccagatcgagatggcccacggcaccaccactttggcctttaaattccaacacggcgtcatcgcagctgtggatagtcgagcttccgctgggagctatatatcagcattgcgggtaaataaggtgatcgagattaatccttacctgctgggcaccatgtccgggtgcgccgctgattgccaatactgggaaagactactcgcaaaggagtgtaggctttactatctccggaacggcgaaaggatatcagtcagtgcagcctctaagctgcttagcaatatgatgtgccagtaccgcggcatgggattgagtatgggaagtatgatttgcgggtgggacaagaagggcccggggttgtactatgtggacgagcatgggacccgcctcagcgggaatatgttttcgaccggatctggtaatacatacgcctacggagttatggattcggggtacagaccaaatttatctccagaagaagcctatgacttgggtagacgcgcaatagcttacgctacccatcgcgactcctattcggggggtgtggttaacatgtaccacatgaaggaggatggatgggtgaaagtggaatccacagacgtctcagacttactgcatcagtaccgagaagccaaccaatag

SEQ ID NO: 143892 - DNA, 819 bp, Artificial Sequence
  derived and/or modified sequence
atgctgatcggcacccccaccccccgggacaccacccccagcagctggctgaccagtagtctgcttgtggaggctgccccacttgatgacaccacgctccccactccagtgagctctggatgtccggggctggaaccaactgaattctttcagagtctgggtggtgacggcgaacggaatgttcagattgaaatggcacacggtaccaccacattagcttttaaattccagcatggcgttatcgctgctgtcgactctcgggcttctgctggcagttatatatcggctttacgggtgaataaagtgatagaaattaacccttatctcctgggcactatgagtgggtgcgccgccgactgtcagtattgggagcgtctgctagcaaaggaatgtcggctatactacttacggaatggggagaggatcagcgtatccgcggcttcaaaactgctaagtaacatgatgtgtcagtataggggcatgggactgtcaatgggatccatgatctgtgggtgggataaaaaagggccaggcctgtattatgtcgacgaacatggaacccgcctcagcgggaatatgttttccacaggtagtgggaacacatacgcttatggagtgatggatagtgggtaccgccctaatctgagcccagaggaagcgtacgatttagggcgccgggcaatcgcatacgctacacacagagattcatattccggcggagttgtgaacatgtaccatatgaaagaggatggatgggtgaaggtggagtccactgatgtttccgatctgctccaccagtacagggaggctaaccaatag

SEQ ID NO: 143893 - DNA, 819 bp, Artificial Sequence
  derived and/or modified sequence
atgctgatcggcacccccaccccccgggacaccacccccagcagctggctcactagcagcttactggtcgaagccgccccactagacgacacaacgttgccgactcccgtttcgagtggatgccccggtctagagccaaccgaattcttccagtcactcggcggagacggagagagaaacgtgcagatagaaatggcacacggaacaacaactctcgcctttaagttccagcacggagtaatcgccgcggtggactcacgagcctctgccggttcctacatttcagcactcagagtgaacaaggtcatagagattaatccatacctccttgggaccatgtctggctgtgccgcagactgccagtactgggaacgcttgctcgctaaggagtgcaggctttattacctcagaaatggggaaaggatctcggtgtcagcagcatctaagctgctcagcaatatgatgtgccagtacagaggcatgggacttagcatggggtctatgatttgcggctgggataaaaagggccccggcctgtactatgttgacgagcacggcacgaggctgtcaggtaatatgttctctacgggctctggcaacacctacgcttacggggtgatggatagcggttatcgtcctaatttaagtccagaggaggcctacgacctgggtcgcagagctatcgcttatgcaacacatagggatagctattcgggtggcgtggtgaatatgtatcatatgaaagaagacgggtgggtcaaggtcgagtccactgatgtgagtgacctgctgcatcaatatagggaagccaatcaatag

SEQ ID NO: 143894 - DNA, 819 bp, Artificial Sequence
  derived and/or modified sequence
atgctgatcggcacccccaccccccgggacaccacccccagcagctggctgaccagctccttgctcgtagaggcagcaccactggacgataccacgcttccaacacccgtgagctcgggctgtcccggcctggagcccacggagttctttcagagtctgggtggggatggcgaaagaaacgttcagatcgaaatggcacacggaacaacgactctggcttttaagttccagcacggagtgatcgcagccgtagatagcagggccagcgcgggatcttatatcagcgcactgagagtaaacaaagtgatcgagatcaacccctatctgcttggcacaatgtccggctgcgccgcggactgtcagtactgggagagacttctggcaaaggagtgccgtctgtactacctaaggaacggggaaaggatctccgtgagcgccgcaagtaaattactgtcgaatatgatgtgccagtatcgaggtatgggcttgagcatgggctctatgatctgcggatgggataaaaaggggcccggtttgtattacgtcgatgagcatggcactcgcctctccgggaatatgttctccacaggaagcgggaacacttatgcgtacggcgttatggattctggttaccggcccaacttatcgccagaggaagcgtacgatcttggcagaagggccatagcctatgcgacccaccgcgactcctattctggcggtgttgtcaacatgtaccacatgaaagaagatggctgggtgaaagtggagtccaccgacgtgtccgaccttctacatcagtaccgggaggctaaccagtag

SEQ ID NO: 143895 - DNA, 819 bp, Artificial Sequence
  derived and/or modified sequence
atgctgatcggcacccccaccccccgggacaccacccccagcagctggctgacgagctctctgctagtggaagcagcccctctcgatgataccactctgcccacccccgtgtcatcgggatgtcccgggttggaaccaacggaattttttcaaagtctgggcggcgatggggagcggaatgtacaaatagagatggcccacggcactacaacattggcttttaagttccagcatggagtgattgcggcagtggactcacgagcgtctgccgggtcgtacatttccgcccttagagtgaataaggtcatcgagattaacccttatctgcttggtactatgagcgggtgtgccgcagattgccagtactgggagcgactgcttgctaaggaatgccgcttgtattacctgagaaatggggagaggatatcagtgtcagccgcatccaagctgttatccaatatgatgtgtcagtaccgggggatgggcttgtccatggggagcatgatttgcggatgggataagaaaggcccaggtttatattatgtcgacgaacatggcaccaggctgagtggcaatatgttcagcaccggctctggcaatacttatgcttacggggttatggattctggatatcgtcctaacctgtcacccgaagaggcctatgacctggggcgaagggcgatcgcctatgccacccatagagacagttacagtgggggcgtggtgaacatgtaccacatgaaagaagacggctgggtaaaggtagagtctacagacgtgtctgacctcttgcatcagtatagagaggcaaaccagtag

SEQ ID NO: 143896 - DNA, 819 bp, Artificial Sequence
  derived and/or modified sequence
atgctgatcggcacccccaccccccgggacaccacccccagcagctggttgacctccagtttgctggtcgaggcagcccctctcgacgacaccaccttgcccacccccgtgagttccgggtgcccagggttggagccaaccgaattcttccagtctttaggaggagacggggaacgcaacgtgcagattgagatggcacacggaacgacaacactggctttcaagttccagcatggggtgattgcagcagtggactcccgggccagcgcgggaagttacattagcgccttacgagtgaacaaagtgattgagatcaatccttatctcctgggaacaatgtcgggctgcgcagccgattgtcagtattgggagcgcttactggccaaggagtgtcggctttactacttaaggaatggcgagaggatcagcgtatctgccgcgtctaagctgctgagcaacatgatgtgtcagtaccgcgggatgggactgagcatgggatctatgatatgtggctgggataagaaaggtccaggtctctattacgtggatgagcacgggacccgcctctcaggaaacatgttctctacgggttccgggaatacgtacgcctatggagtgatggattctgggtacagaccaaacctgtctcccgaagaggcgtacgatctgggccggagggctattgcctacgccacacacagggactcctactccgggggggtggtcaacatgtatcatatgaaggaggacgggtgggtcaaggtggagtccactgacgtttcggatctactacatcagtatcgtgaggcaaatcagtag

SEQ ID NO: 143897 - DNA, 819 bp, Artificial Sequence
  derived and/or modified sequence
atgctgatcggcacccccaccccccgggacaccacccccagcagctggttgacctcttcacttcttgttgaggcggccccattggatgacaccaccctcccgacccccgtttcgtctggctgcccaggactggaaccaactgagttcttccaaagcctggggggcgatggtgagaggaacgtgcagatagaaatggcccatggcaccaccacactggcctttaaatttcagcacggagtgatcgcggcagtcgactcgcgcgcatctgcaggttcatatatttccgcactgcgcgtgaataaagttattgaaataaatccttacctgctaggaacaatgtctggctgcgccgctgactgtcagtattgggagcgcttgctagccaaggagtgtcgcttatactatttaaggaatggcgagagaatctccgttagcgccgcatccaaacttctgtcgaacatgatgtgtcagtataggggcatggggctttctatgggtagtatgatctgcggatgggataagaagggccccggcttgtattacgttgatgagcacgggacccgtctgagtgggaatatgttcagcaccggcagtggcaacacatacgcttatggagtgatggattccggctaccgaccaaacctctcacctgaggaggcgtacgatcttggaagacgagccattgcctacgccacccaccgagactcgtactccggaggagtggtaaatatgtaccacatgaaagaggatgggtgggtgaaggtagaaagcactgacgtgagcgacctactgcatcaatatcgcgaagccaaccagtag

SEQ ID NO: 143898 - DNA, 819 bp, Artificial Sequence
  derived and/or modified sequence
atgctgatcggcacccccaccccccgggacaccacccccagcagctggctgacctcctctcttcttgtggaggccgctcccctggatgacaccaccttaccgacacctgtctctagcggatgccctggcttggagcctactgagttcttccagtctttggggggtgatggcgagcggaatgtacagatagagatggcacatggtaccacaacactggccttcaagtttcagcacggggtcattgccgccgttgattctcgcgcatcagcagggtcctacatatctgccctccgcgtcaataaggtaattgaaataaacccatacctgcttggcacaatgagtgggtgcgctgctgactgccagtactgggaacggttactggccaaagagtgtaggctttactacctccgaaacggggagcgcatatccgtttctgctgcctccaagctcctgagtaacatgatgtgtcaataccgggggatgggcctgtctatggggagcatgatctgcggatgggataaaaagggccctggtctgtactatgtcgatgagcatggcacccgactatctggcaacatgttctccaccggttctgggaacacatacgcctacggtgtgatggatagtggatatcggcccaatctatccccagaagaagcatacgatctgggtaggagggccatcgcctatgctacgcacagggacagctattccggaggcgtggtgaatatgtatcacatgaaagaggacggctgggtcaaggtggagtccaccgacgtatccgatttattgcatcagtatcgcgaggcaaaccagtag

SEQ ID NO: 143899 - DNA, 819 bp, Artificial Sequence
  derived and/or modified sequence
atgctgatcggaaccccaactccaagggacacaacccccagctcctggctcacatctagccttttggtggaggccgctcctctggatgataccacactgcccacaccagtgagctcaggatgtcccggtctcgaaccaactgagtttttccagtctctagggggagatggtgaacggaacgtacagatcgagatggcccacgggactacgaccctagccttcaagttccagcacggtgtgattgccgcagtggacagtcgggcttctgccggtagctatatttccgccttacgggtgaacaaagtgatagagataaacccctacttacttggcaccatgagtgggtgtgctgccgattgtcagtactgggaaagactccttgctaaggagtgtaggctgtattatcttcggaacggggaaagaattagcgtaagcgcagcatcaaagctcctgagcaatatgatgtgccagtaccgagggatgggcttgtctatggggtcaatgatctgcgggtgggataagaaaggccctgggctctactatgttgacgaacacggcacacgcctctccggaaacatgttctctactggtagcggcaacacttacgcttacggtgtgatggacagcggttatagacctaacctctctcccgaagaagcctatgacctaggtcggcgtgctattgcctatgctacgcacagggacagctatagtggaggtgtagtcaacatgtaccatatgaaagaagacgggtgggtcaaagtggaatcaactgatgtcagcgacttgctgcatcaataccgcgaggcaaatcagtag

SEQ ID NO: 143900 - DNA, 819 bp, Artificial Sequence
  derived and/or modified sequence
atgcttattggtacgcccactcccagagacactaccccttcctcatggctcacttcaagcctgttggtcgaggcagcaccgctggatgacaccacgctgccgactccggtttctagcggctgtccgggacttgagcccactgaattcttccagagtctggggggtgatggagagcgcaacgtgcaaatcgagatggctcacggcacaaccacactggccttcaaatttcagcacggtgtcatcgccgctgttgactcccgcgctagtgctgggagctatatctctgccctccgggttaacaaagtcatcgagatcaatccatatctcctaggcactatgtccggttgtgctgcagattgtcagtactgggaacggcttttagcaaaagagtgcagactgtattacttgcgtaacggtgaacggataagcgtatccgctgccagtaaacttctgagtaacatgatgtgtcaatatcgtggcatgggactttccatgggttctatgatctgtggctgggacaagaaaggacccggactctactatgtagacgagcacggaacaaggctttcgggtaatatgttttctaccgggtccggaaatacttatgcctatggggtgatggactccgggtataggcccaatctgagtcctgaggaggcatatgatctggggagaagggctatcgcgtacgccacacatcgtgattcttactctggaggcgttgttaatatgtatcatatgaaggaggacggctgggtcaaagttgaatctactgacgtgtctgatctgcttcaccaatatcgggaagccaaccagtag

SEQ ID NO: 143901 - DNA, 819 bp, Artificial Sequence
  derived and/or modified sequence
atgcttatcggtacgccaacccccagggatacaaccccatcttcctggctgacttcctcccttttggtggaggcggcaccacttgacgacaccaccctgcctacacccgtgtcaagtgggtgtccgggtcttgaacccactgagttcttccagtccctgggcggtgatggagagcgcaatgtccagatagaaatggcgcatggaacaacaactctcgcctttaagttccaacacggagtgatcgccgctgtagatagcagggcttccgctggctcctacattagtgcattgcgagtgaacaaggtgatcgaaataaacccgtacttgctgggcacaatgagcgggtgcgccgctgactgtcagtactgggagcgtttattggctaaagagtgtagactgtactacttacggaatggcgagagaattagcgtttcagctgccagtaaactgcttagcaacatgatgtgtcagtacagaggcatgggcctgagcatgggtagtatgatctgcggatgggataagaagggacctggattatattatgtggatgaacacgggacacgcctgtctggcaacatgtttagtaccggtagcggtaatacatacgcttacggagttatggactctggttacaggccgaacctctcacccgaggaggcctacgatttgggcaggcgcgctatcgcttacgctacacatagagatagctatagcggtggggtggtgaacatgtatcacatgaaagaggacggctgggtgaaagtggaaagtacggacgtgtccgatctcctgcaccagtatcgagaggccaatcaatag

SEQ ID NO: 143902 - DNA, 819 bp, Artificial Sequence
  derived and/or modified sequence
atgctgatagggacacctacacctcgagacacgactccttcttcatggttgactagctctctactcgtggaagcggcacccctcgatgatactactctcccaacccctgtgagcagcggatgtccgggattggagccaactgagtttttccagagcctcgggggagatggggagcgcaacgtccagattgagatggcccacggaaccaccaccttagcatttaagtttcagcacggagtcatagctgcagtggacagtcgtgctagcgcgggaagctatatttccgcccttagagtgaacaaggtcatcgaaattaatccatacttgctaggcacgatgtccggatgtgccgctgactgtcagtactgggagaggctgctggcaaaagaatgtcggctctattacctgagaaatggagagagaataagtgtcagtgccgctagcaagctgttaagcaacatgatgtgccaatacagaggcatgggtctgtcaatgggctccatgatctgtggctgggacaagaagggccctggcctctactacgtggacgagcacggcactaggctctctggcaacatgttctccacaggcagcggaaacacttacgcctacggtgtaatggattcagggtacaggcccaacctttctcccgaagaggcttacgatctgggaaggcgagccattgcctatgcaacccaccgagattcctatagcggaggtgtggtgaatatgtaccatatgaaggaggatgggtgggtgaaggtggagtccacagacgtctccgatctactccaccaatacagagaagcgaaccagtag

SEQ ID NO: 143903 - DNA, 819 bp, Artificial Sequence
  derived and/or modified sequence
atgctaattggcactcctacccctagggataccaccccatctagttggttaacctctagcctcttggtcgaggcagccccactcgatgacaccaccctcccaacccccgtgtcatcagggtgcccagggctcgaacctactgaattttttcagtctctgggcggagacggcgaacgcaatgtccagattgagatggcacacggcaccaccacacttgcctttaaattccagcacggtgtgattgccgctgtggacagtcgggctagcgctgggtcatatatatcagcactgagagtaaacaaggtaatcgagatcaacccatacttgctgggcacaatgtcaggctgcgctgctgactgtcagtactgggagaggctcctggctaaagagtgtcgtctctattacctgaggaacggagagcggatctcagtgagcgcggcaagtaagctgttgagcaatatgatgtgtcagtaccgcggaatgggcttgtctatgggttctatgatatgtgggtgggataagaaaggccctggattatactacgtagacgagcatggcacccgcctcagcggaaatatgttttcgactggtagtgggaatacttatgcttatggggtgatggattcaggataccggcctaatttgagcccagaggaagcctatgacttggggaggagggccatcgcttatgccactcaccgtgattcttatagcggtggcgtggtaaacatgtatcacatgaaagaggatggatgggtgaaggttgaatccactgacgtatctgacttactacaccagtaccgggaagccaatcagtag

SEQ ID NO: 143904 - DNA, 819 bp, Artificial Sequence
  derived and/or modified sequence
atgttaataggtacgccaacacccagggacaccactccctcctcttggctcacatcttccctgctcgtggaagctgccccactggatgacacgactctgcctaccccggtgagtagtggatgcccaggtctggagcccaccgagtttttccaatctctaggtggtgacggagagcgaaatgtgcagattgagatggcccacggcactaccaccctcgccttcaaattccagcacggtgtcatagcagctgtcgattcaagagcttccgctggctcttacatctccgcactgagagtcaacaaggtgatcgagatcaacccatatttgctcggaaccatgtccggatgtgccgcagattgccagtactgggagcgcctgcttgcaaaggagtgccggctgtactacttgcgaaacggggagcgtataagcgtcagcgccgctagcaagctcttgagtaatatgatgtgtcaataccgcggaatggggctgtccatggggtcaatgatttgtggctgggacaagaagggtccagggctatactacgtggatgagcatggaactaggctatccggaaatatgttctccactgggtccggcaatacatacgcctacggtgttatggattccgggtacaggccaaacctgtccccagaggaggcctacgacttgggtaggcgcgcaatcgcgtatgctacgcaccgagattcatactccggtggggtcgtgaacatgtaccacatgaaggaggacgggtgggtcaaggtagaatctactgatgtgtccgacttgctacaccagtatcgtgaggctaatcagtag

SEQ ID NO: 143905 - DNA, 819 bp, Artificial Sequence
  derived and/or modified sequence
atgctcattgggacgccaacccctcgcgacactacacccagcagttggttgacttcaagcttgttggtcgaagctgcgcctctggatgataccactctgccaactccagtttcaagcggctgtcctggcctggaacccacggagttctttcagagcctcggcggagatggcgagcgcaacgtgcagattgaaatggcccacggcacaaccacattggcatttaaatttcagcacggcgtgattgccgcagtcgatagccgggcatcagcagggtcctacatcagtgccctccgagttaacaaagtgatcgagattaatccctacctgctcggtaccatgtctggctgcgctgcagattgtcagtattgggaacgactccttgctaaggaatgccgattgtactacttgcgaaacggcgagaggatttcagtgtccgcagcaagtaaactgctgagcaatatgatgtgtcagtatcggggtatggggctgagcatggggtccatgatttgtggctgggataagaaaggcccaggcctctactacgtggatgagcacggcacaaggctgtcggggaatatgttcagcactgggagtgggaacacatacgcgtatggagtgatggattccggttacagacccaaccttagcccggaagaagcctacgacttggggagaagggcaatcgcctacgccacccacagggattcatacagtgggggagtggtaaacatgtatcatatgaaagaggacggctgggtgaaggtcgagtcgactgatgtgtccgatctgcttcaccagtacagggaggctaaccagtag

SEQ ID NO: 143906 - DNA, 819 bp, Artificial Sequence
  derived and/or modified sequence
atgctgattgggacaccaactccgagagacactacacctagcagttggctgacgagctctctgttggtggaggccgctcctttggatgacacgactctcccaacgcccgtgagcagtggatgccctggtctggaaccaaccgagtttttccaaagcctcggaggggatggagagaggaacgtgcagattgagatggcccacggtaccactacgctggccttcaagtttcagcatggagtaatcgctgccgttgattcccgcgcaagtgcagggtcctatatcagtgcactgagagtaaacaaagtgattgagatcaacccctatttgcttggaacaatgtccggttgtgcagcagactgtcaatactgggagcggctccttgcgaaggaatgcaggctgtactatctgcgaaatggcgagagaatttctgtgagcgctgcgtcaaagctgctcagcaacatgatgtgccaatatcgaggaatgggcctgtcaatgggatccatgatctgcggatgggacaaaaaaggccctgggctatactatgttgatgaacacggaacaagattgtccggcaacatgtttagcaccggtagcggtaatacgtacgcctatggtgtcatggacagtggctataggcccaatctgagtcccgaggaagcttatgatctgggtcgaagagctattgcctacgctacacatcgggattcatacagcgggggagtcgtgaacatgtaccacatgaaggaggacgggtgggtcaaggttgaaagcaccgatgtgagcgacctgctgcatcagtatcgagaggctaaccagtag

SEQ ID NO: 143907 - DNA, 1351 bp, Artificial Sequence
  derived and/or modified sequence
gaagaggcggggtttagaggcgtgaaactccgcagtgctcagccaagcagggagcaacgctaggaagggcgggcagaaagggcacgctcttgtgggtgactacaggttaggagaccgttgaacctggaggggccctaggatggaccccgtggaaagattcagagactgcgccctctccctggcgccgccttcccctacacgcggcgggtatattctgttgcagttggcccaggacctgtttccaagactctgccccctcgcacttccgtccctcctggttttgtaaagtgatgctcataggaacccccaccccgcgtgacactactcccagctcctggctgacttctagtcttctggttgaagctgcgcctttagatgacacgaccctacccacccctgtttccagcggatgcccgggcctggagcccacagaattcttccagtccctgggtggggacggagaaaggaacgttcagattgagatggcccatggcaccaccacgctcgccttcaagttccagcatggagtgattgcagcagtggattctcgggcctcagctgggtcctacattagtgccttacgggtgaacaaggtgattgagattaacccttacctgcttggcaccatgtctggctgtgcagcagactgtcagtactgggagcgcctgctggccaaggaatgcaggctgtactatctgcgaaatggagaacgtatttcagtgtcggcagcctccaagctgctgtccaacatgatgtgccagtaccggggcatgggcctctctatgggcagtatgatctgtggctgggataagaagggtcctggactctactacgtggatgaacatgggactcggctctcaggaaatatgttctccacgggtagtgggaacacttatgcctacggggtcatggacagtggctatcggcctaatcttagccctgaagaggcctatgaccttggccgcagggctattgcttatgccactcacagagacagctattctggaggcgttgtcaatatgtaccacatgaaggaagatggttgggtgaaagtagaaagtacagatgtcagtgacctgctgcaccagtaccgggaagccaatcaataatggtggtggtggcagctgggcaggtctcctctgggaggtcttggccgactcagggacctaagccacgttaagtccaaggagaagaagaggcctagcctgagccaaagagagagtacgggctcagcagccagaggaggccggtgaagtgcatcttctgcgtgttctctatttgaacaagcatttcccccagggaagtttctgggtgccccactaagtagaataaagaaaaacggttataaata

SEQ ID NO: 143908 - DNA, 1299 bp, Artificial Sequence
  derived and/or modified sequence
agcaacgctaggaagggcgggcagaaagggcacgctcttgtgggtgactacaggttaggagaccgttgaacctggaggggccctaggatggaccccgtggaaagattcagagactgcgccctctccctggcgccgccttcccctacacgcggcgggtatattctgttgcagttggcccaggacctgtttccaagactctgccccctcgcacttccgtccctcctggttttgtaaagtgatgctcataggaacccccaccccgcgtgacactactcccagctcctggctgacttctagtcttctggttgaagctgcgcctttagatgacacgaccctacccacccctgtttccagcggatgcccgggcctggagcccacagaattcttccagtccctgggtggggacggagaaaggaacgttcagattgagatggcccatggcaccaccacgctcgccttcaagttccagcatggagtgattgcagcagtggattctcgggcctcagctgggtcctacattagtgccttacgggtgaacaaggtgattgagattaacccttacctgcttggcaccatgtctggctgtgcagcagactgtcagtactgggagcgcctgctggccaaggaatgcaggctgtactatctgcgaaatggagaacgtatttcagtgtcggcagcctccaagctgctgtccaacatgatgtgccagtaccggggcatgggcctctctatgggcagtatgatctgtggctgggataagaagggtcctggactctactacgtggatgaacatgggactcggctctcaggaaatatgttctccacgggtagtgggaacacttatgcctacggggtcatggacagtggctatcggcctaatcttagccctgaagaggcctatgaccttggccgcagggctattgcttatgccactcacagagacagctattctggaggcgttgtcaatatgtaccacatgaaggaagatggttgggtgaaagtagaaagtacagatgtcagtgacctgctgcaccagtaccgggaagccaatcaataatggtggtggtggcagctgggcaggtctcctctgggaggtcttggccgactcagggacctaagccacgttaagtccaaggagaagaagaggcctagcctgagccaaagagagagtacgggctcagcagccagaggaggccggtgaagtgcatcttctgcgtgttctctatttgaacaagcatttcccccagggaagtttctgggtgccccactaagtagaataaagaaaaacggttataaata

SEQ ID NO: 143909 - DNA, 819 bp, Artificial Sequence
  derived and/or modified sequence
atgctgatcggcacccccacccccagagacaccacccccagcagctggctgaccagcagcctgctggtggaggccgcccccctggacgacaccaccctgcccacccccgtgagcagcggctgccccggcctggagcccaccgagttcttccagagcctgggcggcgacggcgagagaaacgtgcagatcgagatggcccacggcaccaccaccctggccttcaagttccagcacggcgtgatcgccgccgtggacagcagagccagcgccggcagctacatcagcgccctgagagtgaacaaggtgatcgagatcaacccctacctgctgggcaccatgagcggctgcgccgccgactgccagtactgggagagactgctggccaaggagtgcagactgtactacctgagaaacggcgagagaatcagcgtgagcgccgccagcaagctgctgagcaacatgatgtgccagtacagaggcatgggcctgagcatgggcagcatgatctgcggctgggacaagaagggccccggcctgtactacgtggacgagcacggcaccagactgagcggcaacatgttcagcaccggcagcggcaacacctacgcctacggcgtgatggacagcggctacagacccaacctgagccccgaggaggcctacgacctgggcagaagagccatcgcctacgccacccacagagacagctacagcggcggcgtggtgaacatgtaccacatgaaggaggacggctgggtgaaggtggagagcaccgacgtgagcgacctgctgcaccagtacagagaggccaaccagtag

SEQ ID NO: 143910 - protein, 23 aa, Artificial Sequence
  derived and/or modified sequence
PEEMNKYLTALRHYINLVTRQRY

SEQ ID NO: 143911 - protein, 173 aa, Artificial Sequence
  derived and/or modified sequence
MSSMNPEYDYLFKLLLIGDSGVGKSCLLLRFAWDTAGQERFRTITSSYYRGAHGIIVVYDVTDQESFNNVKQWLQEIDRYASENVNKLLVGNKCDLTTKKVVDYTTAKEFADSLGIPFLETSAKNATNVEQSFMTMAAEIKKRMGPGATAGGAEKSNVKIQSTPVKQSGGGCC

SEQ ID NO: 143912 - protein, 205 aa, Artificial Sequence
  derived and/or modified sequence
MSSMNPEYDYLFKLLLIGDSGVGKSCLLLRFADDTYTESYISTIGVDFKIRTIELDGKTIKLQIWDTAGQERFRTITSSYYRGAHGIIVVYDVTDQESFNNVKQWLQEIDRYASENVNKLLVGNKCDLTTKKVVDYTTAKEFADSLGIPFLETSAKNATNVEQSFMTMAAEIKKRMGPGATAGGAEKSNVKIQSTPVKQSGGGCC

SEQ ID NO: 143913 - DNA, 522 bp, Artificial Sequence
  derived and/or modified sequence
atgagtagcatgaatccagagtacgattacctgttcaaactgttgctcattggcgactccggcgtgggaaagagctgtctcttgcttagattcgcatgggacaccgctggtcaggaacgattcaggacaatcacttccagttactatcgcggcgcccacgggatcatcgtggtttatgatgtgactgaccaggagtcatttaataacgtgaagcaatggctgcaggaaatagaccggtatgcctctgagaatgttaacaagctactcgtggggaataagtgcgatctgactacaaagaaggtggtggactacacaactgcaaaagagttcgccgattctctcggcattcccttcctcgaaacaagcgctaaaaatgcgaccaatgtggaacagtcattcatgaccatggcggccgagattaaaaaacgcatggggcccggcgccacggctggaggtgccgagaaatctaatgtgaagatacaaagtactccggtgaaacagtcgggaggagggtgctgttag

SEQ ID NO: 143914 - DNA, 618 bp, Artificial Sequence
  derived and/or modified sequence
atgtcctctatgaatcctgaatatgattaccttttcaaacttctgctgatcggtgactccggagttgggaaatcctgtttactgctgcggttcgctgacgatacctatacagagtcatacatcagtaccattggagtggatttcaagatcaggactattgagctggacggaaagacaatcaaactccagatttgggacaccgcaggtcaagagagattcagaaccatcacttcatcttattacagaggagctcacggaatcatcgtcgtatacgatgttaccgatcaggagtccttcaacaatgtaaagcaatggctgcaggaaattgatcgatacgcctcagaaaatgtcaacaagctgctagtcggtaataagtgcgacctcactaccaagaaggtggtggactatactacagccaaggagttcgcagactccctggggattccttttctggagacatcggccaagaacgccaccaacgtcgagcagtcgttcatgaccatggccgctgagattaaaaagagaatgggacccggggccacggcaggaggcgcggaaaagtccaacgtgaagattcagtccaccccagtgaagcagagcggtggcggatgttgttag

SEQ ID NO: 143915 - DNA, 522 bp, Artificial Sequence
  derived and/or modified sequence
atgagctccatgaacccagaatatgactacctgttcaagctgctgctgattggagacagcggcgtgggcaagagctgcctgctgctgcgctttgcctgggacacagctggccaggagcgcttccgcaccatcaccagcagctactacagaggagcccacggcatcatcgtggtgtatgatgtgacagaccaggagagcttcaacaacgtgaagcagtggctgcaggagattgacagatatgcctctgaaaatgtgaacaagctgctggtgggcaacaagtgtgacctgaccaccaagaaggtggtggactacaccacagccaaggagtttgctgacagcctgggcatccccttcctggagaccagcgccaagaatgccaccaacgtggagcagagcttcatgaccatggctgctgagatcaagaagaggatgggccctggggccacagctgggggcgctgagaagagcaatgtgaagatccagagcacccctgtgaagcagagcggcggcggctgctgctag

SEQ ID NO: 143916 - DNA, 618 bp, Artificial Sequence
  derived and/or modified sequence
atgagctccatgaacccagaatatgactacctgttcaagctgctgctgattggagacagcggcgtgggcaagagctgcctgctgctgcgctttgctgatgacacctacacagagagctacatcagcaccatcggcgtggacttcaagatccgcaccatcgagctggatggcaagaccatcaagctgcagatctgggacacagctggccaggagcgcttccgcaccatcaccagcagctactacagaggagcccacggcatcatcgtggtgtatgatgtgacagaccaggagagcttcaacaacgtgaagcagtggctgcaggagattgacagatatgcctctgaaaatgtgaacaagctgctggtgggcaacaagtgtgacctgaccaccaagaaggtggtggactacaccacagccaaggagtttgctgacagcctgggcatccccttcctggagaccagcgccaagaatgccaccaacgtggagcagagcttcatgaccatggctgctgagatcaagaagaggatgggccctggggccacagctgggggcgctgagaagagcaatgtgaagatccagagcacccctgtgaagcagagcggcggcggctgctgctag

SEQ ID NO: 143917 - DNA, 522 bp, Artificial Sequence
  derived and/or modified sequence
atgagcagcatgaaccccgagtacgactacctgttcaagctgctgctgattggagactctggcgttgggaagagttgcctcctcctgaggttcgcctgggacaccgcaggccaggagcggtttcgaactattacttctagttactaccggggggcacatggcatcatcgtagtgtatgacgtgaccgaccaggagagctttaacaatgtgaaacaatggctacaggaaatcgacagatacgcttcagagaatgtcaacaagctactcgtgggcaataagtgcgatctcacgacaaaaaaggtggttgactacaccacggctaaagagtttgcggattccctgggtatcccgttcttggaaaccagtgcaaagaacgccacaaacgtggagcagtcttttatgactatggccgcagagattaaaaagaggatggggcccggagcgaccgcgggaggtgcggagaaatccaatgtgaagatccagtcaaccccggtgaaacaaagcgggggcggttgttgctag

SEQ ID NO: 143918 - DNA, 618 bp, Artificial Sequence
  derived and/or modified sequence
atgagcagcatgaaccccgagtacgactacctgttcaagctgctgctcattggagactctggcgtgggcaagagttgcctgttgctccgattcgcagatgatacttatactgagtcttacatcagtaccatcggagttgactttaagatccgcactattgagctggatggtaaaactattaagttacagatctgggacactgctggccaggaacggtttcgcaccatcacgtctagctattaccgcggagcccatggaatcatagtcgtctacgatgttaccgaccaggaaagcttcaacaacgtcaaacagtggctgcaagagatcgatagatatgcgtcagagaatgtcaataagttactggttggaaataaatgtgatttgaccactaagaaggtggtggattacacaaccgccaaggagttcgcagattccctggggatcccattccttgagacgagcgccaagaatgccacgaacgtggagcaatccttcatgaccatggcagcagaaatcaaaaaaaggatgggccctggcgccaccgcaggcggggcagagaagtcgaatgtaaagatacagtcaacccccgtcaagcagagtgggggtggatgttgttag

SEQ ID NO: 143919 - DNA, 522 bp, Artificial Sequence
  derived and/or modified sequence
atgagcagcatgaatcccgaatatgactatctattcaaactcctcctcatcggggacagcggagtaggaaaatcctgccttctgctcagatttgcatgggataccgccggacaggagcgctttagaaccatcacatcgagctactatcggggagcacacgggatcatcgtggtttacgacgttacggaccaggaaagcttcaataacgtgaagcagtggctgcaggagattgatcggtatgcatctgagaacgtaaataaattgcttgtgggaaataagtgtgatctgactacaaaaaaggtggttgattatactacagcgaaggagttcgccgatagcctcggaatccctttcctagagactagtgccaagaacgcgaccaacgtcgagcaatcttttatgacaatggcagccgagattaaaaaacgcatgggacctggggctaccgctggcggagccgagaagtcaaatgtgaagatccagtctacacctgtcaagcagagtgggggaggctgttgctag

SEQ ID NO: 143920 - DNA, 618 bp, Artificial Sequence
  derived and/or modified sequence
atgtccagtatgaatcctgaatacgattatctgtttaagctgttactcatcggtgacagcggggtgggcaagtcctgtttgttgctgcgttttgcagacgatacttacacggaaagctacatcagtacaattggcgtcgacttcaaaatccgaaccatagaacttgacgggaagacaatcaagctccagatttgggacaccgcgggacaggagcgcttccggaccattactagctcttattaccgaggcgctcacggcattatcgtcgtttacgacgtgaccgaccaggagtccttcaacaatgtgaaacagtggctgcaggagatcgatcggtacgcatctgagaacgtcaataagctcttggtcggcaataaatgtgacttgactaccaagaaagtggttgattatacaaccgctaaggagtttgctgacagcttaggaatcccttttttagagacctccgccaagaatgccaccaacgtcgaacagtcctttatgaccatggccgcagagattaagaagaggatgggtccaggcgctacagccggaggcgcagagaaatcaaatgtcaaaattcagtcaacacccgtgaaacagtctggaggaggatgctgctag

SEQ ID NO: 143921 - DNA, 1333 bp, Artificial Sequence
  derived and/or modified sequence
tttgggtggaagcgatagctgagtggcggcggctgctgattgtgttctaggggacggagtaggggaagacgtttgctctcccggaacagcctatctcattcctttctttcgattacccgtggcgcggagagtcagggcggcggctgcggcagcaagggcggcggtggcggcggcggcagctgcagtgacatgtccagcatgaatcccgaatatgattatttattcaagttacttctgattggcgactcaggggttggaaagtcttgccttcttcttaggtttgcatgggacacagcaggccaggaaagatttcgaacaatcacctccagttattacagaggagcccatggcatcatagttgtgtatgatgtgacagatcaggagtccttcaataatgttaaacagtggctgcaggaaatagatcgttatgccagtgaaaatgtcaacaaattgttggtagggaacaaatgtgatctgaccacaaagaaagtagtagactacacaacagcgaaggaatttgctgattcccttggaattccgtttttggaaaccagtgctaagaatgcaacgaatgtagaacagtctttcatgacgatggcagctgagattaaaaagcgaatgggtcccggagcaacagctggtggtgctgagaagtccaatgttaaaattcagagcactccagtcaagcagtcaggtggaggttgctgctaaaatttgcctccatccttttctcacagcaatgaatttgcaatctgaacccaagtgaaaaaacaaaattgcctgaattgtactgtatgtagctgcactacaacagattcttaccgtctccacaaaggtcagagattgtaaatggtcaatactgactttttttttattcccttgactcaagacagctaacttcattttcagaactgttttaaacctttgtgtgctggtttataaaataatgtgtgtaatccttgttgctttcctgataccagactgtttcccgtggttggttagaatatattttgttttgatgtttatattggcatgtttagatgtcaggtttagtcttctgaagatgaagttcagccattttgtatcaaacagcacaagcagtgtctgtcactttccatgcataaagtttagtgagatgttatatgtaagatctgatttgctagttcttccttgtagagttataaatggaaagattacactatctgattaatagtttcttcatactctgcatataatttgtggctgcagaatattgtaatttgttgcacactatgtaacaaaacaactgaagatatgtttaataaatattgtacttattggaagtaatatcaaa

SEQ ID NO: 143922 - DNA, 2447 bp, Artificial Sequence
  derived and/or modified sequence
attttgggtggaagcgatagctgagtggcggcggctgctgattgtgttctaggggacggagtaggggaagacgtttgctctcccggaacagcctatctcattcctttctttcgattacccgtggcgcggagagtcagggcggcggctgcggcagcaagggcggcggtggcggcggcggcagctgcagtgacatgtccagcatgaatcccgaatatgattatttattcaagttacttctgattggcgactcaggggttggaaagtcttgccttcttcttaggtttgcagatgatacatatacagaaagctacatcagcacaattggtgtggatttcaaaataagaactatagagttagacgggaaaacaatcaagcttcaaatatgggacacagcaggccaggaaagatttcgaacaatcacctccagttattacagaggagcccatggcatcatagttgtgtatgatgtgacagatcaggagtccttcaataatgttaaacagtggctgcaggaaatagatcgttatgccagtgaaaatgtcaacaaattgttggtagggaacaaatgtgatctgaccacaaagaaagtagtagactacacaacagcgaaggaatttgctgattcccttggaattccgtttttggaaaccagtgctaagaatgcaacgaatgtagaacagtctttcatgacgatggcagctgagattaaaaagcgaatgggtcccggagcaacagctggtggtgctgagaagtccaatgttaaaattcagagcactccagtcaagcagtcaggtggaggttgctgctaaaatttgcctccatccttttctcacagcaatgaatttgcaatctgaacccaagtgaaaaaacaaaattgcctgaattgtactgtatgtagctgcactacaacagattcttaccgtctccacaaaggtcagagattgtaaatggtcaatactgactttttttttattcccttgactcaagacagctaacttcattttcagaactgttttaaacctttgtgtgctggtttataaaataatgtgtgtaatccttgttgctttcctgataccagactgtttcccgtggttggttagaatatattttgttttgatgtttatattggcatgtttagatgtcaggtttagtcttctgaagatgaagttcagccattttgtatcaaacagcacaagcagtgtctgtcactttccatgcataaagtttagtgagatgttatatgtaagatctgatttgctagttcttccttgtagagttataaatggaaagattacactatctgattaatagtttcttcatactctgcatataatttgtggctgcagaatattgtaatttgttgcacactatgtaacaaaacaactgaagatatgtttaataaatattgtacttattggaagtaatatcaaactgtatggtgataagtattgttttgattcttatggttaaagggaaatagagccttgcattatattcaacacagccatttgtgtgtgcacaatgcaaactaaggtattctagacctatcttagagcagcatccagtatttgctttctagataatatgcccaataacatgacctagaggggcttctgtgctgtgtagggatttaaccaacttcagtggttcagggagctcaaactatatgtaaaacaagtttagaatgtatgctatctagcccgttatctctgatccttctctaaaaccatttgaaatagcttcattgatcaacatttcataaatgcatctgtggtagaggtagaaagcagcacctttcctaattggcaaatgatcagactaatgtgtgctaatgtttttcttccatgctttcagtcagattcaactattttatcctccacagttgcttaacttggtgttggaggagggtttaagcattaagataggaagcaggaaatttgattgctctaaatttagaaattatatccctaaaaattaaaacatgaatactgggtggtaatgataattgaggcaaatgtatttattttggtgacattttgcatatatgaagattttctgaaataggaccttcaagatcctagggggttttgtttggtttttaattgtgaggaataaaaaatcttctgcccacactggcattttaaggtgactgaggtcaaacgttgtttccttaggttgaaatagcagccaaaacattcttcacgcaggggcttgggatatggctgctggcaacacattttgttgtgggctccttaatttaatgataaaatttaagctaaacacaagccaaaaatgaataggtttttttaatttttatttttcactaaacaggcaattgaaatacatggtacaaaaataagtggtaagataattgtaaaatgaaatggacagaatattcaattttccatctatgaaaatttcacaataaaaatcatagtttactttgt

SEQ ID NO: 143923 - DNA, 522 bp, Artificial Sequence
  derived and/or modified sequence
atgagcagcatgaaccccgagtacgactacctgttcaagctgctgctgatcggcgacagcggcgtgggcaagagctgcctgctgctgagattcgcctgggacaccgccggccaggagagattcagaaccatcaccagcagctactacagaggcgcccacggcatcatcgtggtgtacgacgtgaccgaccaggagagcttcaacaacgtgaagcagtggctgcaggagatcgacagatacgccagcgagaacgtgaacaagctgctggtgggcaacaagtgcgacctgaccaccaagaaggtggtggactacaccaccgccaaggagttcgccgacagcctgggcatccccttcctggagaccagcgccaagaacgccaccaacgtggagcagagcttcatgaccatggccgccgagatcaagaagagaatgggccccggcgccaccgccggcggcgccgagaagagcaacgtgaagatccagagcacccccgtgaagcagagcggcggcggctgctgctag

SEQ ID NO: 143924 - DNA, 618 bp, Artificial Sequence
  derived and/or modified sequence
atgagcagcatgaaccccgagtacgactacctgttcaagctgctgctgatcggcgacagcggcgtgggcaagagctgcctgctgctgagattcgccgacgacacctacaccgagagctacatcagcaccatcggcgtggacttcaagatcagaaccatcgagctggacggcaagaccatcaagctgcagatctgggacaccgccggccaggagagattcagaaccatcaccagcagctactacagaggcgcccacggcatcatcgtggtgtacgacgtgaccgaccaggagagcttcaacaacgtgaagcagtggctgcaggagatcgacagatacgccagcgagaacgtgaacaagctgctggtgggcaacaagtgcgacctgaccaccaagaaggtggtggactacaccaccgccaaggagttcgccgacagcctgggcatccccttcctggagaccagcgccaagaacgccaccaacgtggagcagagcttcatgaccatggccgccgagatcaagaagagaatgggccccggcgccaccgccggcggcgccgagaagagcaacgtgaagatccagagcacccccgtgaagcagagcggcggcggctgctgctag

SEQ ID NO: 143925 - protein, 215 aa, Artificial Sequence
  derived and/or modified sequence
MASRGATRPNGPNTGNKICQFKLVLLGESAVGKSSLVLRFVKGQFHEFQESTIGAAFLTQTVCLDDTTVKFEIWDTAGQERYHSLAPMYYRGAQAAIVVYDITNEESFARAKNWVKELQRQASPNIVIALSGNKADLANKRAVDFQEAQSYADDNSLLFMETSAKTSMNVNEIFMAIAKKLPKNEPQNPGANSARGRGVDLTEPTQPTRNQCCSN

SEQ ID NO: 143926 - protein, 15 aa, Artificial Sequence
  derived and/or modified sequence
MASRGATRPNGPNTG

SEQ ID NO: 143927 - DNA, 648 bp, Artificial Sequence
  derived and/or modified sequence
atggcgtcccgaggcgcgaccagacccaatggaccgaacacaggcaacaaaatttgtcaattcaagctggtcctgctcggggaatctgctgtgggtaagtccagtctggtccttaggtttgttaagggccagtttcacgagttccaagaaagtaccatcggggccgcctttcttacacagaccgtctgtctagatgatacaaccgtaaaattcgaaatttgggacaccgctggccaggagcgctatcactctctagcacctatgtactaccgaggcgctcaagccgctatcgttgtgtatgatatcacaaacgaagagagctttgccagggcgaagaattgggttaaagagctgcaacgacaggcatctcccaacatcgttattgctctgtctggtaacaaggctgatctcgccaataagagagcagtggatttccaggaggcccagtcatatgctgacgacaattccttgctctttatggagacctcggccaagacctccatgaatgtgaacgagattttcatggcaattgcaaagaaactgccgaaaaacgaaccgcagaaccccggtgctaactctgcaagggggagaggcgtggatttgaccgaacctacacaaccaactcgcaatcagtgctgttccaactag

SEQ ID NO: 143928 - DNA, 648 bp, Artificial Sequence
  derived and/or modified sequence
atggccagcagaggagccacccggcccaacggccccaacacaggcaacaagatctgccagttcaagctggtgctgctgggggagagcgctgtgggcaagagcagcctggtgctgcgctttgtgaagggccagttccacgagttccaggagagcaccatcggggccgccttcctgacccagacagtgtgcctggatgacaccaccgtgaagtttgagatctgggacacagctggccaggagcgctaccacagcctggcccccatgtactacagaggagcccaggccgccatcgtggtgtatgacatcaccaatgaggagagctttgcccgggccaagaactgggtgaaggagctgcagaggcaggccagccccaacatcgtcatcgccctgagcggcaacaaggctgacctggccaacaagagagctgtggacttccaggaggcccagagctatgcagatgacaacagcctgctcttcatggagaccagcgccaagacctccatgaatgtgaatgagatcttcatggccatcgccaagaagctgcccaagaatgagccccagaaccctggggccaacagcgcccggggccggggcgtggacctgacagagcccacccagcccaccaggaaccagtgctgcagcaactag

SEQ ID NO: 143929 - DNA, 648 bp, Artificial Sequence
  derived and/or modified sequence
atggccagccggggcgccacccggcccaacggccccaacaccggcaataaaatttgtcagttcaaactcgtcctacttggggaatcggccgtggggaagtcatctctcgtcctaagattcgtcaaaggccagtttcacgaattccaggagtcaaccatcggcgccgctttcctgacccagaccgtatgcttggatgacacaaccgttaagtttgagatttgggacaccgcgggtcaggagagatatcattcactggcccccatgtattaccgcggagcacaggccgctattgtggtgtatgacatcaccaatgaggaaagcttcgcccgagccaagaattgggtgaaagagctccaacgccaggctagccccaacattgtgattgccctttcgggtaacaaggccgatctggccaacaagcgagcagtggacttccaggaagctcagagctatgctgatgacaactcattgctttttatggagacaagcgccaaaacatctatgaatgttaatgagatttttatggccattgcaaaaaaacttcctaaaaatgagccgcagaacccaggcgctaacagtgcaaggggacgcggggtggaccttacagaacctactcagccgacacgtaatcagtgctgttccaactag

SEQ ID NO: 143930 - DNA, 648 bp, Artificial Sequence
  derived and/or modified sequence
atggcttcacgcggtgcaactcgacctaacggacccaacactggaaacaagatttgtcagttcaagctggttcttttgggcgaaagtgccgtggggaagtccagcctagtgctccgattcgtaaaggggcagtttcatgaatttcaggagtcaacaatcggggctgcctttctgacacaaaccgtgtgtctcgatgacaccacggtcaagtttgagatttgggacacagccggacaggagcggtaccacagtctcgcaccaatgtactaccgaggagcccaagccgctatcgtggtctacgacattaccaacgaagaatcatttgcgcgtgccaagaattgggtgaaagagttacagaggcaagcatcccctaacattgtgatagcgctctccggcaacaaggcagacctggccaataagcgggcagtagattttcaggaggcgcaatcctacgccgacgataatagtcttttgtttatggagacatccgctaagacaagcatgaatgtcaatgagatctttatggcaatcgcaaaaaaactgccgaagaacgagccccagaaccctggggcaaactcagcccgaggacgaggtgtcgatctcaccgagcccacacagccgacgaggaatcagtgttgcagcaactag

SEQ ID NO: 143931 - DNA, 2536 bp, Artificial Sequence
  derived and/or modified sequence
gaagtgacgaagtggcgcagttcgctgcgtgcagcgacgtggcggcggggccggcaccgggcagcggaagtggctccggcggtgggacttgagtgtttgtgttttggttcgtgaaggagccggcggctggccttaggggaggaggcagagggaggaggaggaggaagaattagtcggaactccagcgccggcggcggcggcggcggcggaggaggagaaaggaaagaggaagggggagcggcgagaggcggagacggagcccgacaggggcggcaccacggcacgagccccgcacagtccagtgtgaggggagcggcgctaagagcaggcgacgccgccgccgccaccaccaccgccatagatacactctcatcctacgggccacgcctgggccttgctgccaggaagcttcggccccgcagctcggcttgctgcggtctcaggtttctttacctccagaaagaagaatattggccccttgaattctggaagttcattgaagagtctgaaattagggacttatttcaaatttggacatggctagtcgaggcgcaacaagacccaacgggccaaatacgggaaataaaatatgccagttcaaactagtacttctgggagagtccgctgttggcaaatcaagcctagtgcttcgttttgtgaaaggccaatttcatgaatttcaagagagtaccattggggctgcttttctaacccaaactgtatgtcttgatgacactacagtaaagtttgaaatatgggatacagctggtcaagaacgataccatagcctagcaccaatgtactacagaggagcacaagcagccatagttgtatatgatatcacaaatgaggagtcctttgcaagagcaaaaaattgggttaaagaacttcagaggcaagcaagtcctaacattgtaatagctttatcgggaaacaaggccgacctagcaaataaaagagcagtagatttccaggaagcacagtcctatgcagatgacaatagtttattattcatggagacatccgctaaaacatcaatgaatgtaaatgaaatattcatggcaatagctaaaaaattgccaaagaatgaaccacaaaatccaggagcaaattctgccagaggaagaggagtagaccttaccgaacccacacaaccaaccaggaatcagtgttgtagtaactaaacctctagtttgaactagctggaatagtcttctgcttcctaaatgttaataacaatggaattggagcatttaaccagcccagtatgacttccaaaagaagagacttatgatagagtcaagtttctaatacagaattattttaagtgttttgaacttaatttttaataacatgcatgggtccctctcactaatgtttcaacaatagggaaaaatgagaactatgtggacacttgtttcattggaaggttagggggaataatttctcatcactaggaatatagacaaatgactgtctgggcccacacagttaaccagcccatttctccacactggtacagtagtcacctgtgaaaaaaaaattggaacttactaatttgggcttttcaaaaacattctttgtttagaaggagattctaaagttatttatgatgcttagccatagtattcaggcaaatgttcatttctcctggtacctgtatttaaaatgtacattccacattttaataaattaaccacaagaaaataatcccacatatacaaggtcaggggtggggaagagtattaatggtatcttaattatacccagtctggttttttttttttaaatggggtaaaaatcaaatgcaaccccatcttgttttaggaattttgagaactaataaatgcaccttaatggtcagtgttcctttcaaacatgtgagttctttaacaaaaatgaaataaaccaggtgtctgtgatttctaattaatcaccgctggccattacacaggttttgttgtttggggtggggagggggcttttgttcccttttgacataatatagtcaatgcactaacaattatgtatattcaaacttgattattttaaattcgatcttcagctgtactgtaaatagggtactgcattgtagtctccatatctgtattacttttctgtaatatttaagagttgcttaaaagcatacaaaatgtactgttactaaaacagctaattatttctctctccccctttgacaggaaggggcttcagttgttcctccatggctagaaccataataaacaatgtacccgtaatttgtaacataaagtattgcaatatgttagtaacaatcttgcagccttcctttccaaagttcattttattttgatcagttcagtatattgcactaattattttaggtattttcattatatgaaagctaccatgtgtcagagatgatttaatctatttaagtgttggactgctaggagaacttgtacatttatgataatgcagaattaggaaaacggttcaccagtgtttagttttatattgaggtgctcaggttggaataaagtggtataaaaagcaa

SEQ ID NO: 143932 - DNA, 648 bp, Artificial Sequence
  derived and/or modified sequence
atggccagcagaggcgccaccagacccaacggccccaacaccggcaacaagatctgccagttcaagctggtgctgctgggcgagagcgccgtgggcaagagcagcctggtgctgagattcgtgaagggccagttccacgagttccaggagagcaccatcggcgccgccttcctgacccagaccgtgtgcctggacgacaccaccgtgaagttcgagatctgggacaccgccggccaggagagataccacagcctggcccccatgtactacagaggcgcccaggccgccatcgtggtgtacgacatcaccaacgaggagagcttcgccagagccaagaactgggtgaaggagctgcagagacaggccagccccaacatcgtgatcgccctgagcggcaacaaggccgacctggccaacaagagagccgtggacttccaggaggcccagagctacgccgacgacaacagcctgctgttcatggagaccagcgccaagaccagcatgaacgtgaacgagatcttcatggccatcgccaagaagctgcccaagaacgagccccagaaccccggcgccaacagcgccagaggcagaggcgtggacctgaccgagcccacccagcccaccagaaaccagtgctgcagcaactag

SEQ ID NO: 143933 - protein, 134 aa, Artificial Sequence
  derived and/or modified sequence
MTRDQNGTWEMESNENFEGYMKALDIDFATRKIAVRLTQTKVIDQDGDNFKTKTTSTFRNYDVDFTVGVEFDEYTKSLDNRHVKALVTWEGDVLVCVQKGEKENRGWKQWIEGDKLYLELTCGDQVCRQVFKKK

SEQ ID NO: 143934 - protein, 24 aa, Artificial Sequence
  derived and/or modified sequence
MTRDQNGTWEMESNENFEGYMKAL

SEQ ID NO: 143935 - protein, 103 aa, Artificial Sequence
  derived and/or modified sequence
MTRDQNGTWEMESNENFEGYMKALDIDFATRKIAVRLTQTKVIDQDGDNFKTKTTSTFRNYDVDFTVGVEFDEYTKSLDNRHVKALVTWEGDVLVCVQKGEKE

SEQ ID NO: 143936 - DNA, 405 bp, Artificial Sequence
  derived and/or modified sequence
atgaccagagaccagaacggcacctgggagatggagagcaacgagaacttcgagggctacatgaaggccctggacatcgacttcgccaccagaaagatcgccgtgagactgacccagaccaaggtgatcgaccaggacggcgacaacttcaagaccaagaccaccagcaccttcagaaactacgacgtggacttcaccgtgggcgtggagttcgacgagtacaccaagagcctggacaacagacacgtgaaggccctggtgacctgggagggcgacgtgctggtgtgcgtgcagaagggcgagaaggagaacagaggctggaagcagtggatcgagggcgacaagctgtacctggagctgacctgcggcgaccaggtgtgcagacaggtgttcaagaagaagtag

SEQ ID NO: 143937 - DNA, 405 bp, Artificial Sequence
  derived and/or modified sequence
atgaccagagatcagaacggcacctgggaaatggaatctaatgagaactttgaaggctatatgaaggcgctggacatcgattttgcaacgagaaaaattgctgtgcgattgacccagactaaggtcatagaccaggacggcgacaatttcaaaacgaagaccaccagcacttttaggaactatgacgtggattttaccgtcggcgtcgagtttgatgaatatacaaaatcactcgataaccgccatgtgaaggcgcttgtgacatgggaaggcgatgttctcgtatgtgttcaaaagggagaaaaggagaatcgaggctggaaacaatggattgaaggggataagctgtacctggagttgacatgtggcgatcaggtttgtcgtcaggtctttaagaaaaaatag

SEQ ID NO: 143938 - DNA, 405 bp, Artificial Sequence
  derived and/or modified sequence
atgacccgggaccagaatggcacctgggagatggagagcaatgaaaattttgagggctacatgaaggccctggacatcgactttgccaccaggaagattgctgtgcggctgacccagaccaaggtgattgaccaggatggagacaacttcaagaccaagaccaccagcaccttcagaaattatgatgtggacttcaccgtgggcgtggagtttgatgagtacaccaagagcctggacaacagacatgtgaaggccctggtgacctgggagggagatgtgctggtgtgtgtgcagaagggggagaaggaaaatagaggctggaagcagtggattgaaggagacaagctgtacctggagctgacctgtggggaccaggtgtgccggcaggtgttcaagaagaagtag

SEQ ID NO: 143939 - DNA, 405 bp, Artificial Sequence
  derived and/or modified sequence
atgacccgggaccagaacggcacctgggagatggagagcaacgagaattttgaaggctacatgaaggccctagacattgatttcgcgacgcgcaagattgcagtgagactgacccaaactaaggtgatcgaccaggacggagacaattttaaaaccaagaccacttctacattccgaaattatgatgtggactttactgtcggagttgaatttgacgagtataccaagtcactggataatcgccacgtcaaggccctggtaacatgggagggagacgtcctagtgtgtgtgcaaaaaggggagaaagaaaatcgtggttggaaacagtggatcgaaggcgataagttgtacctagaattaacatgtggcgaccaagtatgtagacaagtcttcaagaaaaaatag

SEQ ID NO: 143940 - DNA, 405 bp, Artificial Sequence
  derived and/or modified sequence
atgacacgcgaccaaaacggcacctgggaaatggaatcaaacgagaacttcgagggctacatgaaggcccttgacatagattttgctactcgtaaaatagccgtgcgattgacccagaccaaagtgatcgatcaggacggtgataatttcaagactaagaccacctccaccttccgaaactacgatgtggattttacagtgggcgtggagtttgacgagtacacaaaaagccttgataatcgccatgtaaaggccctcgtgacttgggagggtgacgtcttggtgtgtgtccagaaaggcgaaaaggagaacagaggttggaaacagtggatcgagggtgacaaattatatctggagctgacatgtggtgatcaagtctgcagacaggtttttaaaaaaaagtag

SEQ ID NO: 143941 - DNA, 75 bp, Artificial Sequence
  derived and/or modified sequence
atgactagggaccagaatggaacctgggaaatggagtccaacgaaaattttgaaggctatatgaaggcactctag

SEQ ID NO: 143942 - DNA, 312 bp, Artificial Sequence
  derived and/or modified sequence
atgacgcgtgatcaaaacgggacgtgggaaatggaaagcaatgagaacttcgaaggttacatgaaggccctggatattgattttgcaacacgcaagatcgctgtgagacttacgcagactaaggtaattgaccaggacggagacaactttaaaaccaaaacgacttctacgttcagaaactacgatgtggactttactgttggcgttgaatttgatgagtacactaaatctttggacaatcggcacgtaaaggcactcgttacatgggagggagacgtgctggtgtgcgttcaaaaaggcgaaaaggaatag

SEQ ID NO: 143943 - DNA, 75 bp, Artificial Sequence
  derived and/or modified sequence
atgacccgggaccagaatggcacctgggagatggagagcaatgaaaattttgagggctacatgaaggccctgtag

SEQ ID NO: 143944 - DNA, 312 bp, Artificial Sequence
  derived and/or modified sequence
atgacccgggaccagaatggcacctgggagatggagagcaatgaaaattttgagggctacatgaaggccctggacatcgactttgccaccaggaagattgctgtgcggctgacccagaccaaggtgattgaccaggatggagacaacttcaagaccaagaccaccagcaccttcagaaattatgatgtggacttcaccgtgggcgtggagtttgatgagtacaccaagagcctggacaacagacatgtgaaggccctggtgacctgggagggagatgtgctggtgtgtgtgcagaagggggagaaggagtag

SEQ ID NO: 143945 - DNA, 75 bp, Artificial Sequence
  derived and/or modified sequence
atgacccgggaccagaacggcacctgggagatggagagcaacgagaactttgagggctacatgaaggctctgtag

SEQ ID NO: 143946 - DNA, 312 bp, Artificial Sequence
  derived and/or modified sequence
atgacccgggaccagaacggcacctgggagatggagagcaacgagaactttgaaggctacatgaaagcactggatatcgatttcgccacaagaaagatcgcagtgaggcttacacagaccaaagtaatagaccaggatggggacaacttcaagaccaaaaccactagtacattccgcaactatgacgtggatttcacggtgggcgtagagtttgatgagtacacaaaaagccttgacaatcgacacgtgaaagcactggtgacatgggagggagacgtcttagtctgcgtgcagaagggggaaaaggagtag

SEQ ID NO: 143947 - DNA, 75 bp, Artificial Sequence
  derived and/or modified sequence
atgactcgcgatcagaacggaacctgggaaatggagtcgaatgagaattttgagggatacatgaaagccctgtag

SEQ ID NO: 143948 - DNA, 312 bp, Artificial Sequence
  derived and/or modified sequence
atgacgcgggaccaaaacggtacttgggaaatggagtcaaacgaaaacttcgaggggtatatgaaggctttggacatagattttgccaccaggaagattgctgtgagactgacccaaacaaaggtgattgatcaagatggtgacaactttaaaacaaaaacgacatcgacattcaggaattatgacgtagactttacagtgggagtggaatttgacgaatatacaaagtccctagataaccgccatgttaaggctctcgtcacttgggaaggagatgtactcgtctgcgtccagaagggagaaaaggagtag

SEQ ID NO: 143949 - DNA, 694 bp, Artificial Sequence
  derived and/or modified sequence
ctgcagcctgctccttgccatccaccacaaaccctcaccgaaccagtggccaccaccatgacaagggaccagaatggaacctgggagatggagagtaatgaaaactttgagggctacatgaaggccctggatattgattttgccacccgcaagattgcagtacgtctcactcagacgaaggttattgatcaagatggtgataacttcaagacaaaaaccactagcacattccgcaactatgatgtggatttcactgttggagtagagtttgacgagtacacaaagagcctggataaccggcatgttaaggcactggtcacctgggaaggtgatgtccttgtgtgtgtgcaaaagggggagaaggagaaccgcggctggaagcagtggattgagggggacaagctgtacctggagctgacctgtggtgaccaggtgtgccgtcaagtgttcaaaaagaaatgatggcgacgtgggaggcctgccaagcacaagctccccactgcccacactgagtggtctactggctttgagaaacagctgtggggaccttcccactcttgacagagccccattaaggcatctgggtgggttttaaacagaatgcctatgtagcagtgatagacatattcccctcctttgaaacctagcattaaatggaaaaacaaaaattactcccatattttgaaacccttta

SEQ ID NO: 143950 - DNA, 180 bp, Artificial Sequence
  derived and/or modified sequence
tagggagccagcccaggagcccagctgctgcagtcagatgctcccaaggacagcagcctgctccttgccatccaccacaaaccctcaccgaaccagtggccaccaccatgacaagggaccagaatggaacctgggagatggagagtaatgaaaactttgagggctacatgaaggccctgg

SEQ ID NO: 143951 - DNA, 489 bp, Artificial Sequence
  derived and/or modified sequence
ctgctgcagtcagatgctcccaaggacagcagtctccagaaagcttcttgtaacctggaaagattggttatagttgatcattttcctccatcttaaaagtcacctgaagaattccacaaggacttagcctgctccttgccatccaccacaaaccctcaccgaaccagtggccaccaccatgacaagggaccagaatggaacctgggagatggagagtaatgaaaactttgagggctacatgaaggccctggatattgattttgccacccgcaagattgcagtacgtctcactcagacgaaggttattgatcaagatggtgataacttcaagacaaaaaccactagcacattccgcaactatgatgtggatttcactgttggagtagagtttgacgagtacacaaagagcctggataaccggcatgttaaggcactggtcacctgggaaggtgatgtccttgtgtgtgtgcaaaagggggagaaggagaa

SEQ ID NO: 143952 - DNA, 75 bp, Artificial Sequence
  derived and/or modified sequence
atgaccagagaccagaacggcacctgggagatggagagcaacgagaacttcgagggctacatgaaggccctgtag

SEQ ID NO: 143953 - DNA, 312 bp, Artificial Sequence
  derived and/or modified sequence
atgaccagagaccagaacggcacctgggagatggagagcaacgagaacttcgagggctacatgaaggccctggacatcgacttcgccaccagaaagatcgccgtgagactgacccagaccaaggtgatcgaccaggacggcgacaacttcaagaccaagaccaccagcaccttcagaaactacgacgtggacttcaccgtgggcgtggagttcgacgagtacaccaagagcctggacaacagacacgtgaaggccctggtgacctgggagggcgacgtgctggtgtgcgtgcagaagggcgagaaggagtag

SEQ ID NO: 143954 - protein, 664 aa, Artificial Sequence
  derived and/or modified sequence
MSGVRGLSRLLSARRLALAKAWPTVLQTGTRGFHFTVDGNKRASAKVSDSISAQYPVVDHEFDAVVVGAGGAGLRAAFGLSEAGFNTACVTKLFPTRSHTVAAQGGINAALGNMEEDNWRWHFYDTVKGSDWLGDQDAIHYMTEQAPAAVVELENYGMPFSRTEDGKIYQRAFGGQSLKFGKGGQAHRCCCVADRTGHSLLHTLYGRSLRYDTSYFVEYFALDLLMENGECRGVIALCIEDGSIHRIRAKNTVVATGGYGRTYFSCTSAHTSTGDGTAMITRAGLPCQDLEFVQFHPTGIYGAGCLITEGCRGEGGILINSQGERFMERYAPVAKDLASRDVVSRSMTLEIREGRGCGPEKDHVYLQLHHLPPEQLATRLPGISETAMIFAGVDVTKEPIPVLPTVHYNMGGIPTNYKGQVLRHVNGQDQIVPGLYACGEAACASVHGANRLGANSLLDLVVFGRACALSIEESCRPGDKVPPIKPNAGEESVMNLDKLRFADGSIRTSELRLSMQKSMQNHAAVFRVGSVLQEGCGKISKLYGDLKHLKTFDRGMVWNTDLVETLELQNLMLCALQTIYGAEARKESRGAHAREDYKVRIDEYDYSKPIQGQQKKPFEEHWRKHTLSYVDVGTGKVTLEYRPVIDKTLNEADCATVPPAIRSY

SEQ ID NO: 143955 - DNA, 1995 bp, Artificial Sequence
  derived and/or modified sequence
atgagcggcgtgagaggcctgagcagactgctgagcgccagaagactggccctggccaaggcctggcccaccgtgctgcagaccggcaccagaggcttccacttcaccgtggacggcaacaagagagccagcgccaaggtgagcgacagcatcagcgcccagtaccccgtggtggaccacgagttcgacgccgtggtggtgggcgccggcggcgccggcctgagagccgccttcggcctgagcgaggccggcttcaacaccgcctgcgtgaccaagctgttccccaccagaagccacaccgtggccgcccagggcggcatcaacgccgccctgggcaacatggaggaggacaactggagatggcacttctacgacaccgtgaagggcagcgactggctgggcgaccaggacgccatccactacatgaccgagcaggcccccgccgccgtggtggagctggagaactacggcatgcccttcagcagaaccgaggacggcaagatctaccagagagccttcggcggccagagcctgaagttcggcaagggcggccaggcccacagatgctgctgcgtggccgacagaaccggccacagcctgctgcacaccctgtacggcagaagcctgagatacgacaccagctacttcgtggagtacttcgccctggacctgctgatggagaacggcgagtgcagaggcgtgatcgccctgtgcatcgaggacggcagcatccacagaatcagagccaagaacaccgtggtggccaccggcggctacggcagaacctacttcagctgcaccagcgcccacaccagcaccggcgacggcaccgccatgatcaccagagccggcctgccctgccaggacctggagttcgtgcagttccaccccaccggcatctacggcgccggctgcctgatcaccgagggctgcagaggcgagggcggcatcctgatcaacagccagggcgagagattcatggagagatacgcccccgtggccaaggacctggccagcagagacgtggtgagcagaagcatgaccctggagatcagagagggcagaggctgcggccccgagaaggaccacgtgtacctgcagctgcaccacctgccccccgagcagctggccaccagactgcccggcatcagcgagaccgccatgatcttcgccggcgtggacgtgaccaaggagcccatccccgtgctgcccaccgtgcactacaacatgggcggcatccccaccaactacaagggccaggtgctgagacacgtgaacggccaggaccagatcgtgcccggcctgtacgcctgcggcgaggccgcctgcgccagcgtgcacggcgccaacagactgggcgccaacagcctgctggacctggtggtgttcggcagagcctgcgccctgagcatcgaggagagctgcagacccggcgacaaggtgccccccatcaagcccaacgccggcgaggagagcgtgatgaacctggacaagctgagattcgccgacggcagcatcagaaccagcgagctgagactgagcatgcagaagagcatgcagaaccacgccgccgtgttcagagtgggcagcgtgctgcaggagggctgcggcaagatcagcaagctgtacggcgacctgaagcacctgaagaccttcgacagaggcatggtgtggaacaccgacctggtggagaccctggagctgcagaacctgatgctgtgcgccctgcagaccatctacggcgccgaggccagaaaggagagcagaggcgcccacgccagagaggactacaaggtgagaatcgacgagtacgactacagcaagcccatccagggccagcagaagaagcccttcgaggagcactggagaaagcacaccctgagctacgtggacgtgggcaccggcaaggtgaccctggagtacagacccgtgatcgacaagaccctgaacgaggccgactgcgccaccgtgccccccgccatcagaagctactag

SEQ ID NO: 143956 - DNA, 1995 bp, Artificial Sequence
  derived and/or modified sequence
atgagcggggtgcgcggcctgagtcgtttactgtcggcccgacggctggccctggcaaaagcgtggccaacagtgttgcagactggcacccgaggtttccatttcacagtggatggcaacaaacgtgctagcgccaaagtgtccgattctataagcgctcaataccctgtggtcgaccacgaatttgacgcagtcgtagtcggggccggcggagccgggctgagggccgcatttgggctgtccgaggctgggtttaacactgcctgcgtgacgaagctcttcccaaccaggtctcacacggttgcagcccaaggaggaatcaacgctgccctgggcaacatggaggaggacaattggcggtggcacttctacgacacggtgaaagggtcagattggttaggagaccaggacgctatccactatatgaccgagcaggcaccagctgccgtagtagaactggagaattatggaatgcccttctctaggactgaggacggtaaaatctaccagcgagcttttggggggcaaagtctgaagtttggtaagggaggccaggcccaccgttgctgctgtgtggccgaccggaccggacactccttgctgcacaccttatatgggagatctcttcgctacgacacaagctacttcgtcgagtatttcgccctggacctgcttatggagaatggagagtgccgcggagtgattgcactgtgtattgaggatggctctatccacaggattagagcgaagaacacggtggtagccactggggggtacggccggacatactttagctgcacatccgcccacactagcaccggggacggtaccgcgatgatcacccgggccgggctcccgtgccaggatctggagtttgttcagtttcacccaaccggaatttatggcgcgggctgcctcatcactgagggctgtcggggggaagggggtatcctgattaactcccagggcgaacggttcatggaacgttacgccccagtggctaaagatctggcatcacgcgatgttgttagtcgcagcatgacactggaaatcagggaagggcgaggttgcggtcccgaaaaggatcatgtgtaccttcagctgcaccatcttccacctgaacagctggccaccagattgcccgggatttccgaaaccgccatgatttttgccggagtcgatgtgaccaaggagcctatccctgtgctgcccaccgtgcattataacatgggaggcatacccactaactacaaggggcaggtactacgacacgtgaacgggcaggatcaaatcgtgccggggctatacgcctgtggggaggcggcttgcgcctcagtgcacggtgctaaccgactgggagctaactcactgctcgacttggtcgttttcggtagagcttgcgcacttagcattgaggagtcatgccgcccaggcgataaggtgcctcctatcaagccaaacgcaggcgaggaatcagtcatgaatctagataagctgcgtttcgccgacggctccatccgcacttcagagctgagactgtccatgcagaagtcgatgcaaaaccacgccgctgtcttcagagttggctcagttctgcaggagggctgtggcaaaatttccaaactgtacggggacctcaaacatttgaagacctttgatagggggatggtttggaataccgacttggtcgaaacgcttgagctgcagaacttgatgctgtgcgctttgcagacaatttatggagcagaggctagaaaagaatcgcggggcgcacacgcccgagaggactacaaagtgcgcattgacgagtatgactacagcaagccaatccagggccagcaaaagaagccgttcgaggagcattggcggaaacacacgctttcatatgtcgatgtgggcaccgggaaggtcactctggaatatcgacctgtgatagataaaacattgaatgaggctgactgtgccacagttcctccagccatccgaagctactag

SEQ ID NO: 143957 - DNA, 1995 bp, Artificial Sequence
  derived and/or modified sequence
atgtctggagtgcggggcctgagccggctgctgagcgcccggcggctggccctggccaaggcctggcccaccgtgctgcagacaggcacccggggcttccacttcaccgtggatggcaacaagagggccagcgccaaggtgtctgacagcatcagcgcccagtaccctgtggtggaccacgagtttgatgctgtggtggtgggcgccggcggggccggcctgcgggccgccttcggcctgtctgaggccggcttcaacacagcctgtgtgaccaagctgttccccaccaggagccacacagtggccgcccagggcggcatcaatgctgccctgggcaacatggaggaggacaactggcgctggcacttctatgacacagtgaagggcagtgactggctgggggaccaggatgccatccactacatgacagagcaggccccagctgctgtggtggagctggagaactacggcatgcccttcagcaggacagaagatggcaagatctaccagagggcctttggaggccagagcctgaagtttgggaagggcggccaggcccaccgctgctgctgcgtggccgacagaacaggccacagcctgctgcacaccctgtatggccgcagcctgcgctatgacaccagctactttgtggagtactttgccctggacctgctgatggagaatggagagtgccggggcgtgattgccctgtgcattgaagatggcagcatccaccgcatccgggccaagaacacagtggtggccaccggcggctacggccgcacctacttcagctgcaccagcgcccacaccagcactggagatggaacagccatgatcaccagggctggcctgccctgccaggacctggagtttgtgcagttccaccccaccggcatctatggagctggctgcctgatcacagagggctgccgcggggagggcggcatcctgatcaacagccagggcgagcgcttcatggagagatatgcccctgtggccaaggacctggccagcagagatgtggtgagccgctccatgaccctggagatccgggagggccggggctgcggccctgagaaggaccacgtgtacctgcagctgcaccacctgcccccagagcagctggccacccggctgcccggcatcagcgagacagccatgatctttgctggggtggatgtgaccaaggagcccatccctgtgctgcccaccgtgcactacaacatgggcggcatccccaccaactacaagggccaggtgctgcggcacgtgaatggccaggaccagatcgtgcccggcctgtatgcctgtggggaggccgcctgtgcctctgtgcatggagccaaccggctgggcgccaacagcctgctggacctggtggtgtttggccgggcctgtgccctgagcattgaggagagctgcaggcctggggacaaggtgccccccatcaagcccaatgctggggaggagagcgtgatgaacctggacaagctgcgctttgctgatggcagcatccgcaccagcgagctgcggctgtccatgcagaagtccatgcagaaccacgccgctgtgttccgggtgggctctgtgctgcaggagggctgtgggaagatcagcaagctgtatggagacctgaagcacctgaagacctttgaccggggcatggtgtggaacacagacctggtggagaccctggagctgcagaacctgatgctgtgtgccctgcagaccatctacggggctgaggccaggaaggagagcagaggagcccacgcccgggaggactacaaggtgagaattgatgaatatgactacagcaagcccatccagggccagcagaagaagccctttgaggagcactggaggaagcacaccctgtcctatgtggatgtgggcaccgggaaggtgaccctggagtacagacctgtgattgacaagaccctgaatgaggccgactgtgccaccgtgcccccagccatccgcagctactag

SEQ ID NO: 143958 - DNA, 1995 bp, Artificial Sequence
  derived and/or modified sequence
atgagcggcgtgcggggcctgagccggctgctgagcgcccggcggctggctctcgctaaagcctggccaacagtgcttcagaccggcacacggggatttcatttcactgtggacggtaacaaacgagcgagcgcaaaggtgtccgatagtattagtgcccagtatcccgtcgttgatcatgagttcgacgccgtagtggttggagctgggggcgcaggcctgagagcagctttcggcttgagcgaggcaggcttcaacacagcttgcgtcaccaaactcttcccaacgagaagccatacagtcgctgctcaagggggcatcaacgccgcactaggaaacatggaggaggataattggagatggcatttttatgacacagtcaaagggtctgattggctcggagatcaagatgccatacattacatgacggaacaagcacccgccgccgtagtggagctggagaattatggtatgccattcagtaggaccgaggacggtaaaatttaccaaagggccttcggtggccagtcccttaagtttggaaagggggggcaagcccacaggtgttgttgtgtggcagacaggaccggccacagtctccttcatacactgtatggacggtcgctccgatacgacacttcctatttcgtcgaatacttcgcgctggatctcctgatggagaatggtgaatgccgcggtgtgattgctctgtgtatcgaagacggttctatccaccggataagggctaagaacacggtcgtcgcgaccgggggctatggcagaacctatttctcctgtacttcagcccatacatctactggtgatggcactgccatgatcacccgtgccgggctgccatgccaggatctcgaatttgtgcaatttcatcccacaggcatctatggcgctgggtgtctaattacggaaggatgcagaggtgagggcgggatattaattaacagccaaggagagaggttcatggaacgttacgcgccagtggccaaagatctcgcgagccgcgacgtggtgtcaagatctatgacactggagatacgggaaggaagaggctgcggccccgagaaggaccatgtgtacctccagctgcaccatctgccgcctgagcagctggccactcggctgcctggaatctctgagacagctatgattttcgccggcgtggacgtgacaaaggaacccatccctgtgcttcctacggtccattacaatatgggtggtattcctaccaactacaaggggcaagtgctgcgccacgtgaacgggcaggatcagatagtccctggcttgtacgcgtgcggagaggccgcctgcgcatccgtacacggcgctaatcgactcggagcaaactcgctgttagatctggtcgtctttgggcgggcgtgtgccctaagcatcgaggagtcctgccgtcctggcgataaagttcccccaatcaagccgaacgccggggaagaaagtgtcatgaatctagataagcttaggtttgcagacggctctattcggacgtctgaactgagactcagtatgcagaaatctatgcagaaccatgccgccgtgttcagagtggggtccgttctccaagaaggatgtggtaaaatcagcaaactgtacggagatcttaagcatctgaagacctttgatagagggatggtttggaatacagatctggtggagactctagaacttcagaacctgatgctctgcgcactacagacaatatacggggccgaggctagaaaagagtccaggggggctcacgctcgtgaagattacaaggtccggattgatgaatatgactactcaaaacccattcaaggacagcaaaagaaaccattcgaagaacattggcgcaaacacacgttgtcatatgttgatgttggtaccgggaaggtgacactcgagtaccgccctgtgatcgataaaacacttaatgaagctgattgtgcaaccgtccctccggcaatcagatcttattag

SEQ ID NO: 143959 - DNA, 1995 bp, Artificial Sequence
  derived and/or modified sequence
atgtccggtgtccggggtctatctcgcctcctgtctgccaggaggctggcactggcgaaagcctggcctactgttctgcaaactggaaccaggggttttcattttactgtggacggcaacaagagggcgtccgcaaaagtgtctgattcaatttccgcacaataccctgtggtagaccacgaattcgacgccgtggtggtgggggcagggggagctggcctgagagccgcattcgggttgtccgaagccggatttaacacggcctgtgtaacaaagctgtttcccacacgatctcacacagtggcagctcaagggggtattaatgccgcactcgggaatatggaggaggataattggcggtggcatttttacgacaccgtgaaaggttctgactggctgggagatcaggacgcaatccactatatgacggagcaagccccagctgccgtcgtggagcttgaaaactatggtatgccgttcagccggactgaggatgggaaaatttaccaacgcgctttcggcggacagtcactcaagttcggaaagggcggtcaggcacatcggtgctgttgcgtcgcggatcgcaccggtcacagccttctccacacactgtacgggagaagcctgagatacgacacttcttacttcgtggagtacttcgccctggatctgctcatggagaacggggaatgtcggggagtaatagccctgtgtatcgaagatgggtccatacatagaatcagagcaaagaatacagtggtggccacagggggttatgggcgtacatactttagttgtaccagcgcccatacttcaaccggtgatggcaccgcgatgattaccagagcaggactcccatgccaggatcttgaattcgtgcagttccatcccacagggatctatggcgcaggatgtttaatcacagaaggatgccgaggcgaaggtggaatcctcattaactcacagggcgaaaggtttatggaacgctatgccccagtggccaaagatctggctagtcgcgatgtggtgtccagatctatgactctggagattcgagagggcagaggatgcggccctgaaaaggaccatgtctatctccagctgcaccacttgccaccggaacagcttgctactcgcctgcctggtatatcagaaactgctatgatcttcgctggggtggatgtcacaaaggagccgattccagtactaccaacagttcactataacatgggcggaatacccacaaactacaagggtcaggtgctgcgccacgtgaatggccaggatcagatagttcctggcttgtacgcttgtggagaggccgcttgcgcatcagtgcacggcgctaaccgcctcggggctaactctctgctcgaccttgtggtattcggtagggcctgcgcattgagtattgaggagagctgtcgtcccggagataaggtgccacccataaagcccaatgcaggggaagagtccgtcatgaatctcgataaattgagatttgctgatggctcaatcagaacctcagagctgagactcagcatgcagaagtctatgcagaaccatgccgcagtgttccgtgtgggctccgtgttacaggagggttgcggcaagatttccaagctttacggcgatcttaagcacctgaagacttttgataggggaatggtgtggaacacagatcttgtcgaaacactggaattacagaatcttatgctgtgcgcactccaaaccatttatggcgcagaagcacgcaaggagtcacgtggggctcacgcacgcgaggattacaaagtgaggatagatgaatatgactacagcaaaccgatccagggacaacagaaaaaaccatttgaagaacactggcggaagcacactctgtcttacgtggacgtcggtacggggaaagtcacgcttgaatatcggcctgtgatcgacaaaactctcaacgaggccgactgtgccaccgtcccgcctgctattcgtagctactag

SEQ ID NO: 143960 - DNA, 2390 bp, Artificial Sequence
  derived and/or modified sequence
tccggcgtggtgcgcaggcgcggtatcccccctcccccgccagctcgaccccggtgtggtgcgcaggcgcagtctgcgcagggactggcgggactgcgcggcggcaacagcagacatgtcgggggtccggggcctgtcgcggctgctgagcgctcggcgcctggcgctggccaaggcgtggccaacagtgttgcaaacaggaacccgaggttttcacttcactgttgatgggaacaagagggcatctgctaaagtttcagattccatttctgctcagtatccagtagtggatcatgaatttgatgcagtggtggtaggcgctggaggggcaggcttgcgagctgcatttggcctttctgaggcagggtttaatacagcatgtgttaccaagctgtttcctaccaggtcacacactgttgcagcacagggaggaatcaatgctgctctggggaacatggaggaggacaactggaggtggcatttctacgacaccgtgaagggctccgactggctgggggaccaggatgccatccactacatgacggagcaggcccccgccgccgtggtcgagctagaaaattatggcatgccgtttagcagaactgaagatgggaagatttatcagcgtgcatttggtggacagagcctcaagtttggaaagggcgggcaggcccatcggtgctgctgtgtggctgatcggactggccactcgctattgcacaccttatatggaaggtctctgcgatatgataccagctattttgtggagtattttgccttggatctcctgatggagaatggggagtgccgtggtgtcatcgcactgtgcatagaggacgggtccatccatcgcataagagcaaagaacactgttgttgccacaggaggctacgggcgcacctacttcagctgcacgtctgcccacaccagcactggcgacggcacggccatgatcaccagggcaggccttccttgccaggacctagagtttgttcagttccaccctacaggcatatatggtgctggttgtctcattacggaaggatgtcgtggagagggaggcattctcattaacagtcaaggcgaaaggtttatggagcgatacgcccctgtcgcgaaggacctggcgtctagagatgtggtgtctcggtccatgactctggagatccgagaaggaagaggctgtggccctgagaaagatcacgtctacctgcagctgcaccacctacctccagagcagctggccacgcgcctgcctggcatttcagagacagccatgatcttcgctggcgtggacgtcacgaaggagccgatccctgtcctccccaccgtgcattataacatgggcggcattcccaccaactacaaggggcaggtcctgaggcacgtgaatggccaggatcagattgtgcccggcctgtacgcctgtggggaggccgcctgtgcctcggtacatggtgccaaccgcctcggggcaaactcgctcttggacctggttgtctttggtcgggcatgtgccctgagcatcgaagagtcatgcaggcctggagataaagtccctccaattaaaccaaacgctggggaagaatctgtcatgaatcttgacaaattgagatttgctgatggaagcataagaacatcggaactgcgactcagcatgcagaagtcaatgcaaaatcatgctgccgtgttccgtgtgggaagcgtgttgcaagaaggttgtgggaaaatcagcaagctctatggagacctaaagcacctgaagacgttcgaccggggaatggtctggaacacggacctggtggagaccctggagctgcagaacctgatgctgtgtgcgctgcagaccatctacggagcagaggcacggaaggagtcacggggcgcgcatgccagggaagactacaaggtgcggattgatgagtacgattactccaagcccatccaggggcaacagaagaagccctttgaggagcactggaggaagcacaccctgtcctatgtggacgttggcactgggaaggtcactctggaatatagacccgtgatcgacaaaactttgaacgaggctgactgtgccaccgtcccgccagccattcgctcctactgatgagacaagatgtggtgatgacagaatcagcttttgtaattatgtataatagctcatgcatgtgtccatgtcataactgtcttcatacgcttctgcactctggggaagaaggagtacattgaagggagattggcacctagtggctgggagcttgccaggaacccagtggccagggagcgtggcacttacctttgtcccttgcttcattcttgtgagatgataaaactgggcacagctcttaaataaaatataaatgaacaaactttcttttatttccaaa

SEQ ID NO: 143961 - protein, 524 aa, Artificial Sequence
  derived and/or modified sequence
MGKPARKGCEWKRFLKNNWVLLSTVAAVVLGITTGVLVREHSNLSTLEKFYFAFPGEILMRMLKLIILPLIISSMITGVAALDSNVSGKIGLRAVVYYFCTTLIAVILGIVLVVSIKPGVTQKVGEIARTGSTPEVSTVDAMLDLIRNMFPENLVQACFQQYKTKREEVKPPSDPEMNMTEESFTAVMTTAISKNKTKEYKIVGMYSDGINVLGLIVFCLVFGLVIGKMGEKGQILVDFFNALSDATMKIVQIIMCYMPLGILFLIAGKIIEVEDWEIFRKLGLYMATVLTGLAIHSIVILPLIYFIVVRKNPFRFAMGMAQALLTALMISSSSATLPVTFRCAEENNQVDKRITRFVLPVGATINMDGTALYEAVAAVFIAQLNDLDLGIGQIITISITATSASIGAAGVPQAGLVTMVIVLSAVGLPAEDVTLIIAVDWLLDRFRTMVNVLGDAFGTGIVEKLSKKELEQMDVSSEVNIVNPFALESTILDNEDSDTKKSYVNGGFAVDKSDTISFTQTSQF

SEQ ID NO: 143962 - DNA, 1575 bp, Artificial Sequence
  derived and/or modified sequence
atgggaaagcctgccaggaaagggtgtgaatggaagaggttcctgaagaataactgggtgctactctctacggtcgctgcagtagtgctcgggattactactggagtgcttgtcagggaacactcgaacctgtccaccctggaaaaattttactttgcctttccaggtgaaattctcatgcgaatgcttaaacttatcatactccccctgattattagttccatgatcaccggagtggccgccctagactctaacgtgtccgggaagattggcctgagagcagtcgtttattacttttgcactacgcttattgccgtgatcctaggaatcgttctggtggtgagtatcaaacccggcgttacccaaaaggtgggagagattgcgagaactggttctactccagaggtgtccaccgtagacgccatgctggatctgatccgcaacatgttcccggaaaacctcgtgcaagcttgctttcaacaatacaagacaaaacgtgaggaggtcaagccacctagcgatcctgagatgaacatgaccgaggagtcctttacagccgtaatgaccactgctatctcaaaaaataagacaaaggaatacaagatcgtgggaatgtactccgacgggatcaacgtgctaggtttaatcgttttttgcctggtgttcgggctggttatagggaaaatgggggagaagggccagatcctggttgactttttcaacgccttgtctgatgctacaatgaagattgtccagatcatcatgtgttacatgcctctggggatactgttccttattgccgggaaaatcatcgaagtggaagattgggagatattccgcaaactaggcctgtatatggcaactgttctgactggtttggccatccactccatagtcattttgccgcttatttactttatcgtggtcaggaaaaatcccttccggttcgccatgggcatggcccaggccctgctgacagcattgatgatttcttccagtagtgcgacgctacctgtgacttttcggtgcgcagaagaaaacaaccaagtggacaagcggattactagatttgtgttacctgtcggcgccacaatcaacatggatggcaccgcactgtacgaggccgtggccgccgttttcatcgcccaacttaacgacctcgatctgggtataggacagatcattaccatctccattactgccacaagtgcgagtataggggcagcaggcgtgccacaggccgggctggtgacaatggtgattgttttatcagctgttggtctcccagcagaggacgtgaccctgatcatcgcggtggattggcttctagacaggttccgaacaatggtcaatgttctcggtgatgcttttggaaccgggattgtggagaagctgagcaaaaaggagctggagcagatggacgtgagttccgaggtaaatatagtgaacccttttgccttagagtctaccattctggacaatgaagacagcgacaccaagaagtcctatgttaacggaggattcgcggtggacaaaagcgacaccatctcatttacccagaccagccagttttag

SEQ ID NO: 143963 - DNA, 1575 bp, Artificial Sequence
  derived and/or modified sequence
atgggcaagccagccaggaagggctgtgagtggaagcgcttcctgaagaacaactgggtgctgctgagcacagtggccgctgtggtgctgggcatcaccaccggggtgctggtgcgggagcacagcaacctgagcaccctggagaagttctactttgccttccctggagagatcctgatgaggatgctgaagctgatcatcctgcccctcatcatcagctccatgatcactggagtggccgccctggacagcaatgtgtctgggaagattggcctgcgggctgtggtgtactacttctgcaccaccctgattgctgtgatcctgggcatcgtgctggtggtgtccatcaagccaggagtgacccagaaggtgggggagatcgccaggacaggcagcaccccagaggtgtccacagtggatgccatgctggacctgatccggaacatgtttcctgagaacctggtgcaggcctgcttccagcagtacaagaccaagcgggaggaggtgaagcccccaagtgaccctgagatgaacatgacagaggagagcttcaccgctgtgatgaccacagccatcagcaagaacaagaccaaggagtacaagatcgtgggcatgtacagtgatggcatcaacgtgctgggcctcatcgtgttctgcctggtgtttggcctggtgattggcaagatgggagagaagggccagatcctggtggacttcttcaatgccctgagtgatgccaccatgaagatcgtgcagatcatcatgtgctacatgcccctgggcatcctcttcctgattgctgggaagatcatcgaggtggaggactgggagatcttcaggaagctgggcctgtacatggccaccgtgctgaccggcctggccatccacagcatcgtcatcctgcccctcatctacttcatcgtggtgaggaagaaccccttccgctttgccatgggcatggcccaggccctgctgacagccctgatgatcagcagcagcagcgccaccctgcctgtgaccttccgctgtgccgaggagaacaaccaggtggacaagaggatcaccaggtttgtgctgcctgtgggcgccaccatcaacatggatggaacagccctgtatgaagctgtggccgctgtgttcatcgcccagctgaatgacctggacctgggcatcggccagatcatcaccatcagcatcacagccaccagcgccagcatcggggctgctggggtgccccaggccggcctggtgaccatggtgattgtgctgtctgctgtgggcctgcctgcagaagatgtgaccctcatcatcgctgtggactggctgctggaccgcttccgcaccatggtgaatgtgctgggagatgcctttggaactggaattgtggagaagctgagcaagaaggagctggagcagatggatgtgtcctctgaggtgaacatcgtgaacccctttgccctggagagcaccatcctggacaatgaagattctgacaccaagaagagctatgtgaatggaggctttgctgtggacaagagtgacaccatctccttcacccagaccagccagttctag

SEQ ID NO: 143964 - DNA, 1575 bp, Artificial Sequence
  derived and/or modified sequence
atgggcaagcccgcccggaagggctgcgagtggaagcggttcctgaaaaacaactgggtgctcctctccactgtggcagccgtcgtcctaggcatcacgacaggagtgctggtcagagagcactcaaatctgagcacgctggaaaaattttacttcgcatttcccggggagatcctgatgcggatgctgaagctgataattcttcctttaattattagcagcatgattacaggtgtggcggcgctggatagtaatgttagtggtaaaatagggctcagggccgttgtgtattacttctgtaccaccttgatagcggtgatcctcggaatagtgctggtcgtgtccatcaagcccggtgtcacacagaaggttggtgagattgctcgaacaggtagtacacctgaggtgtccactgttgatgccatgctggatctcattcgcaacatgtttccagagaacctggtccaggcctgctttcaacaatacaagacaaaaagagaggaagtgaagccccctagtgatcccgaaatgaatatgacagaggaatctttcacagcagtgatgaccaccgccatctccaagaacaaaactaaagagtacaaaattgtgggcatgtactcagatgggattaatgttctgggcttgatcgtgttttgcctcgtatttggactggtgatcggaaagatgggggaaaagggccaaatccttgtggatttcttcaacgccctgtctgacgcgacaatgaaaatcgtccagatcatcatgtgttacatgcccttgggaatcctgttccttatcgctgggaaaatcatcgaggttgaagactgggaaatctttcgaaagctaggtctgtacatggcaacagtgttaacgggcctcgccatccattcaatcgtgattctccctttaatttacttcatagttgtccgaaagaatccctttcgcttcgctatggggatggcccaggcgctcctcactgcactcatgatatcttcatcatccgcaacattgcccgtgacctttaggtgcgccgaagagaacaaccaggtcgataagaggattacacggtttgtcctccctgtcggtgctaccatcaacatggatggtaccgccctgtacgaagctgtggctgcggtcttcatagcccagttaaacgatctggaccttgggataggccagattatcactatttcaatcactgcgacaagcgctagcattggggctgctggggtgccccaagctggactggtaaccatggtgatcgtcctatcggctgtcggactccctgcagaggatgtgactctcatcatagctgttgattggttgctggacagattcagaacaatggtcaatgtacttggggacgctttcgggactgggatagtcgaaaagctctctaagaaggaacttgaacagatggatgtgagtagtgaggttaacattgtgaatcccttcgccctggaatccacgattctcgacaacgaagacagtgacaccaaaaaaagctacgttaatggagggtttgccgtggacaagtccgacactatctcttttactcagactagccagttttag

SEQ ID NO: 143965 - DNA, 1575 bp, Artificial Sequence
  derived and/or modified sequence
atggggaagcctgctcgaaagggatgcgagtggaagagatttctgaagaacaactgggtgctgctgtctaccgtggctgcggtcgttctcggcataactactggcgtgctagtccgcgaacacagtaatctatccactctcgagaaattctactttgcattccccggagagattctgatgagaatgcttaagctgatcatactccctctcataatctcttcgatgatcaccggggtcgccgctttggactctaacgtgtctgggaaaattggtctgcgcgcagtggtgtactacttctgcacaactctgattgccgtaatcctgggaatcgtccttgtggttagcattaagcccggagtgactcagaaagtcggtgagatcgccagaaccggtagcacccccgaggtttccaccgtggatgccatgctggatttaataagaaatatgtttcccgagaatttagtgcaagcttgctttcagcagtataaaaccaagcgtgaggaggtgaagccacctagtgatcccgagatgaacatgactgaagagagctttacagcggtcatgacgacagctatttccaagaacaagactaaagagtacaaaatcgttggcatgtactctgacggaatcaatgtcctaggcctcatcgtattctgcctcgtgttcggactggtgatcgggaagatgggcgaaaaggggcagatcctggttgacttcttcaacgcgctgtctgacgctacaatgaagatcgtccaaattatcatgtgctatatgccactaggaattctcttcctgatagcgggaaagattatcgaagtcgaggactgggagatcttccggaaattaggtctttatatggccaccgtgctgactggtctggccatccattcaatcgtaatcctgcctcttatctattttatcgtggtacgcaagaacccattccggttcgccatgggcatggctcaggccctgttgaccgccttgatgatcagtagctcttccgcaactctccccgtgacttttcgctgtgctgaagaaaacaatcaagtagataagcgcataactcgattcgtgttacctgtcggtgccaccattaatatggatggaaccgccctctatgaggccgtggcggctgtttttatcgcacaactgaatgatcttgacctgggaatcgggcagatcatcaccatatctattacggccacatcagctagcatcggggctgcaggtgtaccacaagcaggattggtcacaatggtgattgtcctttctgcagtgggtcttcctgccgaggacgttacgctgatcattgctgtcgattggttactcgacaggttccggacaatggtgaacgtactgggagacgcgtttggaacgggaatcgtggaaaagctgtctaaaaaagaactggaacagatggacgtcagctccgaggtgaacattgtgaatccgtttgccctagaatcaacaatcctggacaatgaggactcggatacaaagaaatcctacgtaaacgggggattcgccgttgataagtctgacacaattagcttcacacagaccagccagttttag

SEQ ID NO: 143966 - DNA, 3722 bp, Artificial Sequence
  derived and/or modified sequence
ggaggagccgggcgcgcctgccacgcaaaactaccgggctggcagggcggcgggcgcggtgcgcgatcccgggtggcggcggcaacggcggtggtgacggcggcgactgcagcggccggctctcacctctcccctgtgcacccgcatctcgccgcgccgccgagcagccagcagtccccgggtcgcccagcccacgcgcgcacggccgagcccagcgcacaatagcggcgacagccatggggaaaccggcgaggaaaggatgcgagtggaagcgcttcctgaagaataactgggtgttgctgtccaccgtggccgcggtggtgctaggcattaccacaggagtcttggttcgagaacacagcaacctctcaactctagagaaattctactttgcttttcctggagaaattctaatgcggatgctgaaactcatcattttgccattaattatatccagcatgattacaggtgttgctgcactggattccaacgtatccggaaaaattggtctgcgcgctgtcgtgtattatttctgtaccactctcattgctgttattctaggtattgtgctggtggtgagcatcaagcctggtgtcacccagaaagtgggtgaaattgcgaggacaggcagcacccctgaagtcagtacggtggatgccatgttagatctcatcaggaatatgttccctgagaatcttgtccaggcctgttttcagcagtacaaaactaagcgtgaagaagtgaagcctcccagcgatccagagatgaacatgacagaagagtccttcacagctgtcatgacaactgcaatttccaagaacaaaacaaaggaatacaaaattgttggcatgtattcagatggcataaacgtcctgggcttgattgtcttttgccttgtctttggacttgtcattggaaaaatgggagaaaagggacaaattctggtggatttcttcaatgctttgagtgatgcaaccatgaaaatcgttcagatcatcatgtgttatatgccactaggtattttgttcctgattgctgggaagatcatagaagttgaagactgggaaatattccgcaagctgggcctttacatggccacagtcctgactgggcttgcaatccactccattgtaattctcccgctgatatatttcatagtcgtacgaaagaaccctttccgatttgccatgggaatggcccaggctctcctgacagctctcatgatctcttccagttcagcaacactgcctgtcaccttccgctgtgctgaagaaaataaccaggtggacaagaggatcactcgattcgtgttacccgttggtgcaacaatcaacatggatgggactgcgctctatgaagcagtggcagcggtgtttattgcacagttgaatgacctggacttgggcattgggcagatcatcaccatcagtatcacggccacatctgccagcatcggagctgctggcgtgccccaggctggcctggtgaccatggtgattgtgctgagtgccgtgggcctgcccgccgaggatgtcaccctgatcattgctgtcgactggctcctggaccggttcaggaccatggtcaacgtccttggtgatgcttttgggacgggcattgtggaaaagctctccaagaaggagctggagcagatggatgtttcatctgaagtcaacattgtgaatccctttgccttggaatccacaatccttgacaacgaagactcagacaccaagaagtcttatgtcaatggaggctttgcagtagacaagtctgacaccatctcattcacccagacctcacagttctagggcccctggctgcagatgactggaaacaaggaaggacatttccgtgagagtcatctcaaacactgcttaaggaaaagagaaacactaatggccaagtgtacatttgatttgatatacagacctccagattattttctatatttggattcacagcctttgcgctctgggttttgggatttgggtgtggggtaagttgaagggaaatcaatttaaaggaaagttctattatctgggttttagaaattctataagagacaaagtttggaagtacataaagtaataactgttagaattaggtaatggatatgaaagagaaaatgctttctcatgcatagacaagtgttttgggtttttaaaaaaaatattctgtcattggttacaaatttttactcaggctttctattggcatggatttcctttgacctctcacttttttataaattataatgcatctaaaccacctgtccccagttaatgtgccaaaatgtcaatttttaacttatctccagccaatttcaaagaaaacagaccagcatagttctgcaataacagttttaagatgggcatagggtttggaagaaagggagaaggattcttttttcaatgtactgtattgggacgctggtaactgttaacccagtgttcagcatagagctatatatatatatatatgtatatatttattattttcatataatttgccagacagagatcagaattgaaccgtcaatgtgaaataaagagttctccttgtacttgaataataaccacgattccaacccaggtctgctttggggcttatcagaactcctttctaaggagcactagaatgagaaatcatgttgttcgatcgtttcacatctgtatatcagctctaaagcagagatgtattatggtgatactccaaggtggcatagccattcatttacaacttccagatttgagctgcctggagggaatccatatcagctctgcataagattatatacaaagctgtcactcacaaaaggctggatgtgctttcatccaactggaaggctttattcttccaagttcattcatactcaaagaggccagtactttgccatccttgcacttctgttatcagggcccaaataacagtggcaagctaccaactaagttgtattttaataaagattccatgggttgaacaagccacgttgcagaaaaagagcttcccctaacctgggttgttgcagagtaaatcccacgacataagctggtatcagtggttcgggggaaatagttccattctatgactcttgtctcctcctccaggaggactgttctaactagtaatcttggccctattcattacatcctctgcttgtcattctgctaatttatgaagatagtttattatagtctgtacttcagttctcatcttgtaaataatgcttaacataaacttgtacttacactgaaatccaaaatagtcatgtttctgcagtattctgtagccaacttaaacctgtgctttcatgtttaagaaatgagaaattgtgccaaagatagcagaagagtagataagtgctcagtattgacgacctacatctgaaatctacaacataatgatactgaattgttatgtaaacatcataaatagtaaataatgattcaatgtgaattttaaaatgcaaatattgctattgtttataggaaataaatctaaatataaatgaaattgaatcagtaatttatcttgggctaaatggttctaccccttactaggttgccccaattagtggcactagttggcagagctgttcatgagctgccagttatcattttggagtcagtttgaaaccagcctcttaacacactgctgttaactcataaaagagaagagtgttccatttcagtctcaataaacacttccctcattctttc

SEQ ID NO: 143967 - DNA, 1575 bp, Artificial Sequence
  derived and/or modified sequence
atgggcaagcccgccagaaagggctgcgagtggaagagattcctgaagaacaactgggtgctgctgagcaccgtggccgccgtggtgctgggcatcaccaccggcgtgctggtgagagagcacagcaacctgagcaccctggagaagttctacttcgccttccccggcgagatcctgatgagaatgctgaagctgatcatcctgcccctgatcatcagcagcatgatcaccggcgtggccgccctggacagcaacgtgagcggcaagatcggcctgagagccgtggtgtactacttctgcaccaccctgatcgccgtgatcctgggcatcgtgctggtggtgagcatcaagcccggcgtgacccagaaggtgggcgagatcgccagaaccggcagcacccccgaggtgagcaccgtggacgccatgctggacctgatcagaaacatgttccccgagaacctggtgcaggcctgcttccagcagtacaagaccaagagagaggaggtgaagccccccagcgaccccgagatgaacatgaccgaggagagcttcaccgccgtgatgaccaccgccatcagcaagaacaagaccaaggagtacaagatcgtgggcatgtacagcgacggcatcaacgtgctgggcctgatcgtgttctgcctggtgttcggcctggtgatcggcaagatgggcgagaagggccagatcctggtggacttcttcaacgccctgagcgacgccaccatgaagatcgtgcagatcatcatgtgctacatgcccctgggcatcctgttcctgatcgccggcaagatcatcgaggtggaggactgggagatcttcagaaagctgggcctgtacatggccaccgtgctgaccggcctggccatccacagcatcgtgatcctgcccctgatctacttcatcgtggtgagaaagaaccccttcagattcgccatgggcatggcccaggccctgctgaccgccctgatgatcagcagcagcagcgccaccctgcccgtgaccttcagatgcgccgaggagaacaaccaggtggacaagagaatcaccagattcgtgctgcccgtgggcgccaccatcaacatggacggcaccgccctgtacgaggccgtggccgccgtgttcatcgcccagctgaacgacctggacctgggcatcggccagatcatcaccatcagcatcaccgccaccagcgccagcatcggcgccgccggcgtgccccaggccggcctggtgaccatggtgatcgtgctgagcgccgtgggcctgcccgccgaggacgtgaccctgatcatcgccgtggactggctgctggacagattcagaaccatggtgaacgtgctgggcgacgccttcggcaccggcatcgtggagaagctgagcaagaaggagctggagcagatggacgtgagcagcgaggtgaacatcgtgaaccccttcgccctggagagcaccatcctggacaacgaggacagcgacaccaagaagagctacgtgaacggcggcttcgccgtggacaagagcgacaccatcagcttcacccagaccagccagttctag

SEQ ID NO: 143968 - protein, 574 aa, Artificial Sequence
  derived and/or modified sequence
MASTEGANNMPKQVEVRMHDSHLGSEEPKHRHLGLRLCDKLGKNLLLTLTVFGVILGAVCGGLLRLASPIHPDVVMLIAFPGDILMRMLKMLILPLIISSLITGLSGLDAKASGRLGTRAMVYYMSTTIIAAVLGVILVLAIHPGNPKLKKQLGPGKKNDEVSSLDAFLDLIRNLFPENLVQACFQQIQTVTKKVLVAPPPDEEANATSAVVSLLNETVTEVPEETKMVIKKGLEFKDGMNVLGLIGFFIAFGIAMGKMGDQAKLMVDFFNILNEIVMKLVIMIMWYSPLGIACLICGKIIAIKDLEVVARQLGMYMVTVIIGLIIHGGIFLPLIYFVVTRKNPFSFFAGIFQAWITALGTASSAGTLPVTFRCLEENLGIDKRVTRFVLPVGATINMDGTALYEAVAAIFIAQMNGVVLDGGQIVTVSLTATLASVGAASIPSAGLVTMLLILTAVGLPTEDISLLVAVDWLLDRMRTSVNVVGDSFGAGIVYHLSKSELDTIDSQHRVHEDIEMTKTQSIYDDMKNHRESNSNQCVYAAHNSVIVDECKVTLAANGKSADCSVEEEPWKREK

SEQ ID NO: 143969 - DNA, 1725 bp, Artificial Sequence
  derived and/or modified sequence
atggcttctaccgaaggagctaataacatgcccaagcaagtggaagtcaggatgcacgattctcacctaggaagtgaggaacccaaacaccgacaccttggactgcgtctctgcgacaaactagggaaaaacttgctgctgacactgacggtttttggcgtaatactgggcgctgtgtgtgggggtctgttgcgtctcgcttcacctatccacccggatgtggtcatgttgatcgcattccctggtgacatcttgatgcgcatgctcaagatgttaatcctgccccttatcatcagtagtcttatcacgggacttagcggtctcgacgcaaaagccagcgggcggttggggacacgtgccatggtgtattatatgtctactaccataatcgccgccgtcctgggagtgattttggtgctggccattcatcctggcaacccaaagcttaaaaaacagctgggtccaggtaagaagaatgatgaggtgtctagcctcgatgcctttctggatctaatcagaaacctattcccagaaaatcttgtgcaggcttgcttccaacagatccagaccgtaactaaaaaggtcctcgtggccccgccccccgacgaagaagccaatgccacttccgcagtggttagcctgctcaatgagactgttacagaggtgcctgaggagacaaagatggtaatcaagaaagggctcgaatttaaggacggaatgaacgtcctgggtctcatcggcttctttatcgcttttgggattgcaatggggaagatgggtgaccaggcgaagttgatggtcgacttctttaacattctcaatgagatcgtcatgaagctggttattatgatcatgtggtattcccccctcggcattgcctgcctgatttgcgggaaaataatcgccattaaggatctggaagtggtggctcgccagctggggatgtacatggtgactgttattattgggttgataatacatggtgggatctttctccccctcatctatttcgtggttacccgcaaaaatccattttccttcttcgcaggaatattccaggcatggattaccgccctcggaaccgccagctcggccgggaccttaccagtgacgttcaggtgcctagaggagaacctcggtatagataaacgcgtaactcgctttgtcctgccagtcggggcaacaataaacatggatggcaccgctctatacgaggccgtagctgctattttcatcgcccagatgaatggcgtggtccttgacgggggtcaaattgtcactgtgagtctgacggccactctcgcttctgtaggggcagcatcgatccccagtgcagggctcgttactatgctgcttatcctcaccgccgtgggtctgcccacggaggacatctctctgttagtggcggtagactggctgctggatcgaatgagaacctccgttaatgtcgtgggtgatagctttggcgccggcattgtgtatcacctgagcaaaagcgagctcgataccattgacagtcagcatagggtgcatgaagacattgagatgacgaaaacccaatctatatacgatgatatgaaaaatcatagagagtccaactcaaatcaatgtgtgtacgccgcccacaacagcgtcatcgttgatgaatgcaaggtcacgctggctgccaacgggaagagtgccgactgcagcgtagaagaggaaccctggaaaagagagaagtag

SEQ ID NO: 143970 - DNA, 1725 bp, Artificial Sequence
  derived and/or modified sequence
atggccagcacagagggcgccaacaacatgcccaagcaggtggaggtgaggatgcatgacagccacctgggcagcgaggagcccaagcaccgccacctgggcctgcggctgtgtgacaagctgggcaagaacctgctgctgaccctgactgtgtttggagtcatcctgggcgctgtgtgtggcggcctgctgcggctggccagccccatccacccagatgtggtgatgctgattgccttccctggggacatcctgatgaggatgctgaagatgctgatcctgcccctcatcatcagcagcctcatcaccggcctgagcggcctggatgccaaggccagcggccgcctgggcacccgggccatggtgtactacatgagcaccaccatcatcgctgctgtgctgggcgtcatcctggtgctggccatccaccctggcaaccccaagctgaagaagcagctgggccctgggaagaagaatgatgaggtgagcagcctggatgccttcctggacctgatccggaacctcttccctgagaacctggtgcaggcctgcttccagcagatccagacagtgaccaagaaggtgctggtggcccctcctccagatgaggaggccaatgccaccagcgctgtggtgtccctgctgaatgagaccgtgacagaggtgcctgaggagaccaagatggtgatcaagaagggcctggagttcaaggatggcatgaatgtgctgggcctcatcggcttcttcatcgccttcggcatcgccatgggcaagatgggagaccaggccaagctgatggtggacttcttcaacatcctgaatgagatcgtgatgaagctggtgatcatgatcatgtggtacagccccctgggcatcgcctgcctgatctgtgggaagatcatcgccatcaaggacctggaggtggtggcccggcagctgggcatgtacatggtgaccgtcatcatcggcctcatcatccatggaggcatcttcctgcccctcatctactttgtggtgaccaggaagaaccccttctccttctttgctggcatcttccaggcctggatcacagccctgggcacagccagcagcgctggcaccctgcctgtgaccttccgctgcctggaggagaacctgggcatcgacaagagggtgaccaggtttgtgctgcctgtgggcgccaccatcaacatggatggaacagccctgtatgaggccgtggccgccatcttcatcgcccagatgaatggagtggtgctggatggcggccagatcgtgacagtgtccctgacagccaccctggcctctgtgggcgccgccagcatccccagcgctggcctggtgaccatgctgctgatcctgacagctgtgggcctgcccacagaggacatcagcctgctggtggccgtggactggctgctggacaggatgaggacctctgtgaatgtggtgggggacagctttggagctggcatcgtgtaccacctgagcaagtctgagctggacaccatcgacagccagcaccgggtgcatgaggacatcgagatgaccaagacccagagcatctatgatgacatgaagaaccaccgggagagcaacagcaaccagtgtgtgtatgctgcccacaacagcgtcatcgtggatgagtgcaaggtgaccctggccgccaacgggaagtctgctgactgcagcgtggaggaggagccctggaagcgggagaagtag

SEQ ID NO: 143971 - DNA, 1725 bp, Artificial Sequence
  derived and/or modified sequence
atggccagcaccgagggcgccaacaacatgcccaagcaggtggaggtccgcatgcacgattctcatctggggagcgaagaaccaaaacaccgccacctgggactccgcttatgcgacaaacttggaaaaaatctcctactcacattaaccgtgttcggagtcatcttgggcgcggtttgcggagggctcctcagattggcatccccaatacacccagacgtggtaatgctgatagcatttccaggagacatcctgatgcgcatgctgaaaatgctgatactgcctctaatcatctcatcattgatcaccggccttagcggcctcgacgccaaggctagcggacggctcggtacccgcgccatggtttactacatgagtactaccattatcgccgccgtgctgggggtcatccttgttttggctattcatcctggcaaccccaagttgaaaaaacagcttggacccggcaaaaagaacgatgaggtaagcagcctggacgccttcctcgatcttattcgaaacctatttcccgaaaatctcgtgcaggcctgctttcagcagatccagacagtgaccaagaaagtcctggtggcacccccaccggatgaggaagctaatgcaaccagtgcagtggtctccctgttgaacgaaactgtgacagaagtccctgaagaaacaaaaatggtgattaaaaaaggcttggagttcaaagacgggatgaatgtcttgggacttatcgggttttttatcgcctttggaattgcaatgggaaaaatgggcgatcaggccaaactcatggttgatttttttaacattctgaatgagatcgtcatgaagttggttatcatgattatgtggtatagtcccttggggatagcttgcctgatctgtggaaagatcattgctattaaggaccttgaggtcgttgctcggcagctcggtatgtacatggtgactgtgataattggcttaataatccacggaggcatatttttgcccctgatttattttgtggtgaccaggaaaaacccattcagtttctttgcaggcatttttcaggcttggattaccgcactgggtacggcctccagcgcaggaactttacccgtgacttttcgatgtctggaggaaaaccttggaatcgacaaacgggtcacccgcttcgtattgcctgttggggcgacaattaatatggatgggactgccttgtatgaggccgtggccgcaatctttatcgcacagatgaacggggttgtattagacggcggacagatcgtgaccgtgagtctgacggccacattagccagtgtgggggcagctagtattcctagcgctggactggttactatgctgcttatcctgacggcagtgggacttcctacagaggatatatcgttattagtggccgtcgactggctgctggaccgcatgcggacatctgtaaacgtcgttggggacagcttcggtgccggtatcgtgtaccacttgtctaaatcagagcttgacaccatagattctcagcatcgcgtgcatgaggatatcgaaatgacaaagactcagtcgatctatgatgatatgaagaatcaccgagaaagcaattctaatcagtgtgtctacgctgcacacaacagtgtgatcgtggacgaatgtaaagtgaccttggcagcgaacggaaaatcagccgactgctcagtcgaggaggagccatggaaacgtgaaaaatag

SEQ ID NO: 143972 - DNA, 1725 bp, Artificial Sequence
  derived and/or modified sequence
atggcctcaaccgagggcgctaacaacatgcccaagcaggtggaggtgcgtatgcacgactcccatcttggctcagaagagcccaagcatcgtcatttgggcctccgtctgtgtgacaagctgggtaagaatcttctactaacactaacagtgtttggagtgatactgggggctgtttgcgggggactgctccgcttggccagtccgattcatcctgacgtcgtgatgttgatcgctttccctggcgatatactgatgcgtatgctcaaaatgctgatccttcccctgatcatctcatctctgatcaccggcctatcaggactcgacgccaaagccagtggtagacttggcaccagggctatggtgtactatatgagtactaccattattgctgccgtcctcggagttatccttgtactggcaatacaccccggaaatcccaagctgaagaagcagctcggacccggtaaaaaaaatgatgaggtgagcagcctagatgctttccttgaccttatacgtaacctcttccctgagaatcttgtgcaggcctgcttccaacaaatccaaacagtcactaaaaaagttttagtggcaccgcctcctgatgaggaagctaatgccacatcagcggtcgtatcccttctgaatgagacagtgaccgaggtgcccgaagaaaccaaaatggttatcaagaaaggcctggaatttaaggacggaatgaacgtgttggggctcattgggttttttatcgcctttggcattgcaatggggaagatgggggaccaagccaaattgatggtcgattttttcaatattctcaatgagattgtgatgaagctcgttatcatgattatgtggtactcgcctctcggaattgcctgcctgatctgcggcaagatcatcgcgatcaaggaccttgaggtggtcgccagacagctggggatgtatatggtgacggtgattattggcttgattatacacggcggaatattcctgcctttgatctacttcgttgtcacacgtaagaaccctttttccttctttgctggaatattccaagcgtggataactgcccttggcactgcatccagtgccggaactcttcctgtgacatttcggtgcttggaggagaacctggggatcgataagcgagtgactaggttcgtcctgccagtcggggctaccatcaacatggatggcacggcattgtacgaggctgtggccgcaattttcatcgcgcagatgaatggcgtggtgctggatggcggacagatcgtgaccgttagtttgaccgctacgctggcatctgtgggagctgcctcgattcccagcgccggacttgtgactatgctgttgatcttaaccgctgtgggactgcccactgaagatatctccctcctcgtggccgtggattggctgctcgacagaatgcgaacctctgtgaatgtcgtaggcgactcttttggcgctggcatcgtctatcatctgtcaaagagcgaactggatactatcgattctcagcaccgcgtacacgaagatatcgagatgactaaaacccaaagcatctatgatgacatgaaaaatcaccgcgagtccaatagcaatcagtgcgtttatgctgcacacaattctgtgattgtcgatgagtgtaaggtcacactcgctgctaatgggaaaagcgctgattgctctgtcgaggaggagccctggaaacgtgagaagtag

SEQ ID NO: 143973 - DNA, 11696 bp, Artificial Sequence
  derived and/or modified sequence
caccctcggagcccccggagctccccgccaagcgccatccccgcgggcggaggggagcgcgggtcgcgcgccgtggagagccgggacgcggattagcgcccgcaggagcctcctgcgcccgttgaggcgctaaagggcttaccccggaggcgggtggaagggcgggcagaggctcctcttaaataccgctcccggccgcacttcgcgctcaccccggcgtccgctttctccctcgcccacagctgccggatagtgctgaagaggagggggcgttccccagaccatggcatctacggaaggtgccaacaatatgcccaagcaggtggaagtgcgaatgcacgacagtcatcttggctcagaggaacccaagcaccggcacctgggcctgcgcctgtgtgacaagctggggaagaatctgctgctcaccctgacggtgtttggtgtcatcctgggagcagtgtgtggagggcttcttcgcttggcatctcccatccaccctgatgtggttatgttaatagccttcccaggggatatactcatgaggatgctaaaaatgctcattctccctctaatcatctccagcttaatcacagggttgtcaggcctggatgctaaggctagtggccgcttgggcacgagagccatggtgtattacatgtccacgaccatcattgctgcagtactgggggtcattctggtcttggctatccatccaggcaatcccaagctcaagaagcagctggggcctgggaagaagaatgatgaagtgtccagcctggatgccttcctggaccttattcgaaatctcttccctgaaaaccttgtccaagcctgctttcaacagattcaaacagtgacgaagaaagtcctggttgcaccaccgccggacgaggaggccaacgcaaccagcgctgttgtctctctgttgaacgagactgtgactgaggtgccggaggagactaagatggttatcaagaagggcctggagttcaaggatgggatgaacgtcttaggtctgatagggtttttcattgcttttggcatcgctatggggaagatgggagatcaggccaagctgatggtggatttcttcaacattttgaatgagattgtaatgaagttagtgatcatgatcatgtggtactctcccctgggtatcgcctgcctgatctgtggaaagatcattgcaatcaaggacttagaagtggttgctaggcaactggggatgtacatggtaacagtgatcataggcctcatcatccacgggggcatctttctccccttgatttactttgtagtgaccaggaaaaaccccttctccttttttgctggcattttccaagcttggatcactgccctgggcaccgcttccagtgctggaactttgcctgtcacctttcgttgcctggaagaaaatctggggattgataagcgtgtgactagattcgtccttcctgttggagcaaccattaacatggatggtacagccctttatgaagcggtagccgccatctttatagcccaaatgaatggtgttgtcctggatggaggacagattgtgactgtaagcctcacagccaccctggcaagcgtcggcgcggccagtatccccagtgccgggctggtcaccatgctcctcattctgacagccgtgggcctgccaacagaggacatcagcctgctggtggctgtggactggctgctggacaggatgagaacttcagtcaatgttgtgggtgactcttttggggctgggatagtctatcacctctccaagtctgagctggataccattgactcccagcatcgagtgcatgaagatattgaaatgaccaagactcaatccatttatgatgacatgaagaaccacagggaaagcaactctaatcaatgtgtctatgctgcacacaactctgtcatagtagatgaatgcaaggtaactctggcagccaatggaaagtcagccgactgcagtgttgaggaagaaccttggaaacgtgagaaataaggatatgagtctcagcaaattcttgaataaactccccagcgtatcctatggtaactgatgatataaacaagctttctttaaaaaggaaaaaaatgcgtatatttctatgtttacttaatctgttagccgaggcttagaggagctcttgtgagtcagtgatgacaggcacggtgctgtgtctttgccaaataatgctttataaccgtctaattttctcacttgtattattatttgaatggatgctgctggaggaatcagttggaattgaagacacgttcttgccagcttcccttttctcccaagatgcagaaatgtggatgctcttttcccaggggacatgagtaaagcagtgtggtacactccagggacttgggaaaatgagcaaacacacagcgtgttattccttaaagtgttctccatgtctcgccttgttatgcacaagagattctattaaaagcctctagaagtaactccccttaaaatgtctagtaaagcttgcacatggattgattaaaagcaaatacctgtcttagggaattctgacaatttatcttccatatgctctttaagtaaaatgtttcaaagacagttttaaagggagccatgctcttaaaggcagttgattaaagaacctgttacatctctgccttaccctgtgtaatctgtgagaacaatggttgaaatttcaaagtatgtttcattattctttctaaatttgataattgattaggaagtattttatatataaccactgtagatattgacaaaagtaagagagcacagtcaacataaagtttaaccagagttaaatattcaaatttatttatgttcggtttgccttcacctggtgtagtaaaatcaaatgagattatttggtatgtgttttgctttgtttaacccaaaagattattttttggttcctaaagaaaaagatatttttaatctgtcaattatttcagtcatcatctcatcgtcctagaaagcctggtcattttactgtcctcacacatggaagacacttgtgttggctgtgcctcttttaatgtcatctcttgatgaaacaaaaatactggtatttatccaatatgttgaaagcgttttgttatcttctatcaaagcacataaaaccagttataggacacagttggaagcagagccagtcttcctcctcagtcttctcagtagaaaggaacagaaaacaaacatctgtgcaaaaccctataaaagtgatattcctatggcagagtccaggcagccttgaacaatgacatggcaacaaaggatggctctgtacaacttcacagatggaatcttgtttaaggctgtgaagttttaaggaataaataatataattggtgtagcacagtgccttgcatgcagtaggcagccaacaaatccttaatgattggtaatgcaagctaaaatttttaatgtctctactatccttttttattgaataacgcacagtattttcctaaggttgctgggtttgggagtaagcttgggacttgaatcattgagaaataaagcacatttgactctaagaagtatgtagaaccttgtttataggtgagaataggctgtattatatgaaaccagcggagggatgctgagacagtcatggtttatagaatccaaattctctgagatgagggtgcttatggacctcaaatagcctttcttatctgctccttgtgacttctctcttttaaatcagatacctttgaaacatacaagagacatgagattccagttgtttttgtctcctaaaccctagtgatttttggataaggatcactactgaacagtattaggcaacttttcatttttgcttttcaaatgacattggtctttatttccagtagatgggcagtaaacagggtcagggtggtcaagggatatgattaagtgtagtagtagaaaatgcattctttttttttttttttttttagacagagtcttgctctgttgctcaggctggagtacagtggcacgatctcagctcactgcactgcaatgtccacctctctagttcaagcgattctcctgtctcagcctcccgagtagctgggactacaggcacatgccaccatgcctggctaattttttgtatttttagtacagatgggtttcattatgttagccaggatggtctcgatctcctgacctcatgatccacccgccatggcctcccaaagtgctgggattacaggcgtgagccaccgtgcccggccagaaaatacattctttacagcaaatgttataggttaaggagacagttcctgggtttagctgtgaaactgtttaggattttctttaagtggtgttcccaagagcttttttctggtaagttggaggctataggcaaagcgtctaggagcttgttgttttttgctatggaaggccagctttgggatctatatacatgggcatgtttctcaatggagtggtcacaggattctcttctcagaactctgcctgaaacctttccggtgtgttttgtcttcaactttttcctagctatcctattagcctgtaaatatgtcagcagacaatgtgtttggaagaaacaaggtgtacaacttcacaaagcaagttttttctggtctgagacttactgtgtgcaggaagtctcgtgagaatatacttagaaaatcacacttatctggaaattcaataagtcatattaaaaatatacaatttcttgaactcaggactagcctgaaaatccaaaatgcatgtagagttgacatgttgacatatgtctatgtcctctgtttttatttaagcctcatttatttctcccttgccatgcccatttgggattttctttgcccagcatatgtgccataaacagaacaaatggatccagggtatacctctaataacctttatctaaatagaatacatttaacctgtcaattatatgtatagatttatcctaattggttcaacatatatatgaatgcttgtaatagtctgttactatttgataatgcataaatgttatatttatatacagttacagcaggccagaaacatacatacactgcatcctgtaaggtctgtaaatcagggcttcggcaatgccattttgctatagactcattcatgttttttaggaatcagaatcatttcaggagaaaaccaactaagtagactttaattcttctctttctcattcttgccctttgagaaacccaagtggaatcatcacttaattacttactcaaattcaatgaatcaaatccaatccaatcagtgagaagaatagcttatctttcaaggtaatactttaccttagatctttgagggcatgcttcccatacaaagagcatcagaaaatcagggcaatcatctagatctcacagatcttcaacataggactctaggttatgagagctgaaccacatagctatcagtttcagtttttacttcctattgagtgtgtagaaacacagcctatggttttgctgtctgcggaagttaccataccctgtaaaagacaaatatttctttctcctctcgaaccactagtcagcctggatattcatgaaagctgaaagaaggggtgccaaaatgcctagctcctggatttagactcatggaatatgagaaaggcttagggaaaattcaagtcatggggagattcctgctaggtgatgccaggaatctcaatgacctgttgattagagggtctctggtcatttccacttgtgtgtggagaaatacatcatttgcatatgtatctagtcaagaagcccttttggagcaaagtggttgggaaactcatttactgggtccaccaaaggaaacccaattctgccatgtttttgcaaatactacacgtccctttgctctcaatagcaaaagtgatgttatagttttttttacttttgtcagaatcaaggcttcggccacctgtgcaatattttcccatggaatgcagcagtaaatccaagtaggtatatccgtgctcagagagaattctccatagttctgactcctgaaaaacaagtctcattagctctcatctagtttgatgactaaaagtgcacagcagttataccccagtggaagtgatttttctcacctagctgctctctaactcttacggctatctagttgtctgagctgctggtttgttttacttattctccaactgaactcattccaaaccaagaaaaaggaccaaatgaaattttcagttattatcatacttgctccttgaataagaatgctagagtctggaggcagaagaagactaagttaaaaaaaaaacagcctgaaggaattctggagtgagttttgtaagtctaattgtcaaagaagataaatggtctcagtatctgtagtaatttctggttaagcctagagggatcactgagtgccaatccaagcaggtggcactagaggcagattgttctcctagcatagagtgagtttccagctgctcatgacacattttcttatgattttccctaaaagaaaaccaaattttctactccacctcttcctttcctatcattccacttattgttgctgctttgctaacagccagcttagtaagccatcacacaagttagtgtgaggcttggttttaaaatagataacagagaatcttgattaaatagtatccaactttgtagcataacacagctaattcaggcaatgacatagagatgataagaaacaacatggtttggtagagggaacatttgatttagactctgcccatttttagctgtatgacttacataagtcattttgtgtccaagcctcattttctcccatatgaaaagtgaaggggttggattaaatgactaaaatccccttccagccctatgagcccaatgtattatgatctctgctttgtttccttcttaagaggcttcctactataaaatgtgacctatttacattttaagttgaagtagcccacaataatgaataatcaatttagatttttctcatctcctttgggagaaattaaattcaagcctctattcatttgatgttttacaacaagcttcaaagttggccatgttcattcacagtttgatattttgagacaccaataaaagttttttaataaaagttcccttgacttaaactcaccttcctaatagaagtagtgatttggctcacggaaaaatgtttccagagtcaacatgagaggactggatgaacctacagcctcactcaagctgttgcatcattgctgctgtagcaacagagccctctctgaatacccaaaacacacaattttctccaacaattctaattgcccacccagtatgggaatttgagagcctttggtgaataaccttgatcactcttttgaaatttggtacaacacttgcacaatcacggcaactgtttgtaaatatcttttcttctccgccagtatgtagacatgcacacccattcacaagtaagcccgcaaattcattttcacattttcctcttggtttgtttttatcatgggtatcacattgcaggaagagatgctctaacttacaagaatggaattttctgactatcattgccctcttcaaggcctgattagtttgtagggtggatgggatacaatgcatggtctacaaggtccatgtcaccagccatgatctttaaacaacctcttgcactttctggcactgctgcaatggcccatggtggacacctctgctgtttgtccaaacttctgctaaatagagtagtgttggtatttgttgtgttgtgaactcctttgttgtcagagaagacttcagctcttcaggtttgcaagggcaagatgtaaagctaggactgaaaggattgggttttgtttttcggccggcttttttccattagtgcaaaaaacctgatgcaagggcagcaagataaacacaatttcttcattgacccagataagaacctgtagaaaagtgagagatgcccctaagttcctatttcatttatcctaaataatatcctgaataactactgatcagtttttttctatgtccagccttgcttcactttccaacctccaggccaaatattcattttgatattttacaaaatccttctggtttttacacagggcccttttgtgctgagaataaaaccagctattggaacagacctcactgctttgtagagtcagaagttgacctagagaatgggtagcaacaggtcctcagtttctctggagacacccccaatccttgggtgagtgttgaaacctgacaactgactgttagccttgtcatcatcctcactggagatggagatgttgcagtcggagcctcactccttctggggcactgtttcttctcatggcaaccattttgcctgcctggaaacagcctgttgcctttgctagggggcaaatacacacactagccaaggaagttggtccagcacatctctgaggtttctcccccatggacccatggagcgaattccctgagataaatgatcagaaagttggctgtctggtggtttaatactccataagagttacttcccttatagaaagtcatcctttggcatctagatttttctacaaatcaccttaactccctccctttctctttctcctggaaaacctcagcattgcatctccatgttgcacaacacagatcagattatctggtcactatagagatttgtatataaaaaaactacttttttgaggattttgtatattgtttttctatttgttttctacagcttgaggaaagagctggcaaactgtgaatctaacttgatcttgttgccagcagatatattttggcttcctggtaagagtctgtgttaccagggacaatatattgccctctgatcagtattgcaccctaaatccacaaattcctccagcccagtcttacatttttttaaacaaatcccctagcttgtttgctattatttataaagagcattagaaaatgtatttatagacctggatgttatatgtttaatattaatttagcctttaataatgttataggtttgtaactattcttcagaaattataaagaactcagtgtagactgaattaatctatttagtatctgtaattttgcagacatattttcttacagtattttctatgtaaccacacatgtagaattataactaattagagcacaagaagtttcttcagcaatttagagctaccaattgtttcttgactatatagtcacatttgacaaatttaagaacccagtctttagtgatgcaataaacaaaatgaaccattaagaacaaggaattgcttaaatcccttagctggtgaggatatacatctaaataattcatctttctaactcaaggaatggtgctgattttttaaatgtttgacaccaggccttgtttttccagctgagcattctcattttgcttttctctaagactatcaaagacaaggtattaatagtaggattattcctagatcagaatgtttcatacattcctaaaggtttatgtggaaattggcttaggaaaactttgagtagcagagactgaggatgagtgctagagatgaaatcaggacagatttgttgcagttaattcttgccaagcaaattagtggtaaatgtcacattgttatgtgaattgagcacatatttttaaagaaagtttacaaaaaatttttagaaccaactatgaggcaatactgtatcactgggggctgggagtgggggcttagaatcatactgaaattgtttaaaagcagcccaggtagtttctgtcctcaggtgaataacagactatataacttccccgaaaggtaaaacgatagccactgcagagacgaggtgtcttccttccaccaaatactttctgagatggtggtaggagtagtatttttaccgtggtttaaaaagtagtcagttacatagaaagtgtattggtatgtatttgaacctgctcttcattaaacaaacagattagatgtaccctcgactggcaataattgtatctattttcaagtacagctagctgtcaaagcatgaagctcttgtgtatacacactgacacttggttcacgcatgaagaacagtgcctatgcactttgtgtagctataatgtaggtatctaggtgtaatttcagtgaaatggtgtatagatgtattgtaatttaaatgtatatgttatttttggctattcatctaaatgcagtagacatgttgatcggtgttttgcaaacatttctttttccttcttagataactagtcgtgaatcatttctcctctttctcagtgtggcttgggaatatatatgagtgaagaatttatctgtgaatcctttgtactgatgattgtttgaaagtctgtgtgtgtccagcacctttgtaaatacacaattcagagcagggatgggctgggtgtgtgtcctggttcttagtgaaaggtcatctcatgtctgtttaatacatggtgaatgcaactgtggaacttttgattacctagacttaggtaggtttagaatgagaacatccatctacagtcctcctttgcttggtggattgggctcagaggaacaaaaagttagtctgactctgtgcatattagcatcatgtctttagagaaaggtcagcctctctggttgccaaatactcatcatgatgctcatgacttaaaggttctgaggagccttgtctcccttggatttttgagtcagggtacaggaaaaaacattgctgactaactaactgcaaatgcatctgcaggtgaaaccctacgaaagcacagttctggctataaacttcagagttctctgtaaaaaacttagagcactagaagcacaggaatagtgagtgtacagcttatgcggttgtagaggggcaactgatgaacacaggtcccacatatatgagggagtatgacgttctctacctaatatgttctgtgtgcatgttttgaatgattgaagatgggattaactaatgcaagtttacagttgcctcctaaaacacacattctgtataattatcgctaaatacaatgctgtgaggtctatagttcctgtaacccctttctcctccccaaggacagagaagaactagccatgtgctatagggaaccctgagtgccctactcttttcccaagaagggtaaagcctacaatatcatcagggggcatgaagcacattaatttgcagtggctgcttcatatgaggagatatggtggacaggctaatttttccttgaaaatgtggcttcttcaactcctttcaaatttaggatggaatacttcctgaaataaaactgggctttatgcaggattctctttgaaaattcttgtatgtccagaacaaaagataaaactaattgtattcctcacattcacaatccccattggtctgaagtcacgtagcacagagcatctatagcacatagtgtttaaagactaatgaatgcaaaaagataaaatcttcaactaatttttgaattgtttctcatatatgctactagaaaatgccttgttgatgaagcacattttgggtagttgaggtcttttgttttcgcctttagctttctaagctttcttacaatgtggactgattactgtaacatttcacgtgtaaaataactggatattctttatatactggaaataacctgtgaatccaatatttcactaagtgttttaacttttgtgtatatatctctcatcaataaatgtggatttcaattt

SEQ ID NO: 143974 - DNA, 1725 bp, Artificial Sequence
  derived and/or modified sequence
atggccagcaccgagggcgccaacaacatgcccaagcaggtggaggtgagaatgcacgacagccacctgggcagcgaggagcccaagcacagacacctgggcctgagactgtgcgacaagctgggcaagaacctgctgctgaccctgaccgtgttcggcgtgatcctgggcgccgtgtgcggcggcctgctgagactggccagccccatccaccccgacgtggtgatgctgatcgccttccccggcgacatcctgatgagaatgctgaagatgctgatcctgcccctgatcatcagcagcctgatcaccggcctgagcggcctggacgccaaggccagcggcagactgggcaccagagccatggtgtactacatgagcaccaccatcatcgccgccgtgctgggcgtgatcctggtgctggccatccaccccggcaaccccaagctgaagaagcagctgggccccggcaagaagaacgacgaggtgagcagcctggacgccttcctggacctgatcagaaacctgttccccgagaacctggtgcaggcctgcttccagcagatccagaccgtgaccaagaaggtgctggtggcccccccccccgacgaggaggccaacgccaccagcgccgtggtgagcctgctgaacgagaccgtgaccgaggtgcccgaggagaccaagatggtgatcaagaagggcctggagttcaaggacggcatgaacgtgctgggcctgatcggcttcttcatcgccttcggcatcgccatgggcaagatgggcgaccaggccaagctgatggtggacttcttcaacatcctgaacgagatcgtgatgaagctggtgatcatgatcatgtggtacagccccctgggcatcgcctgcctgatctgcggcaagatcatcgccatcaaggacctggaggtggtggccagacagctgggcatgtacatggtgaccgtgatcatcggcctgatcatccacggcggcatcttcctgcccctgatctacttcgtggtgaccagaaagaaccccttcagcttcttcgccggcatcttccaggcctggatcaccgccctgggcaccgccagcagcgccggcaccctgcccgtgaccttcagatgcctggaggagaacctgggcatcgacaagagagtgaccagattcgtgctgcccgtgggcgccaccatcaacatggacggcaccgccctgtacgaggccgtggccgccatcttcatcgcccagatgaacggcgtggtgctggacggcggccagatcgtgaccgtgagcctgaccgccaccctggccagcgtgggcgccgccagcatccccagcgccggcctggtgaccatgctgctgatcctgaccgccgtgggcctgcccaccgaggacatcagcctgctggtggccgtggactggctgctggacagaatgagaaccagcgtgaacgtggtgggcgacagcttcggcgccggcatcgtgtaccacctgagcaagagcgagctggacaccatcgacagccagcacagagtgcacgaggacatcgagatgaccaagacccagagcatctacgacgacatgaagaaccacagagagagcaacagcaaccagtgcgtgtacgccgcccacaacagcgtgatcgtggacgagtgcaaggtgaccctggccgccaacggcaagagcgccgactgcagcgtggaggaggagccctggaagagagagaagtag

SEQ ID NO: 143975 - protein, 635 aa, Artificial Sequence
  derived and/or modified sequence
MARGLPTIASLARLCQKLNRLKPLEDSTMETSLRRCLSTLDLTLLGVGGMVGSGLYVLTGAVAKEVAGPAVLLSFGVAAVASLLAALCYAEFGARVPRTGSAYLFTYVSMGELWAFLIGWNVLLEYIIGGAAVARAWSGYLDSMFSHSIRNFTETHVGSWQVPLLGHYPDFLAAGIILLASAFVSCGARVSSWLNHTFSAISLLVILFIVILGFILAQPHNWSADEGGFAPFGFSGVMAGTASCFYAFVGFDVIAASSEEAQNPRRSVPLAIAISLAIAAGAYILVSTVLTLMVPWHSLDPDSALADAFYQRGYRWAGFIVAAGSICAMNTVLLSLLFSLPRIVYAMAADGLFFQVFAHVHPRTQVPVAGTLAFGLLTAFLALLLDLESLVQFLSLGTLLAYTFVATSIIVLRFQKSSPPSSPGPASPGPLTKQQSSFSDHLQLVGTVHASVPEPGELKPALRPYLGFLDGYSPGAVVTWALGVMLASAITIGCVLVFGNSTLHLPHWGYILLLLLTSVMFLLSLLVLGAHQQQYREDLFQIPMVPLIPALSIVLNICLMLKLSYLTWVRFSIWLLMGLAVYFGYGIRHSKENQRELPGLNSTHYVVFPRGSLEETVQAMQPPSQAPAQDPGHME

SEQ ID NO: 143976 - protein, 82 aa, Artificial Sequence
  derived and/or modified sequence
MARGLPTIASLARLCQKLNRLKPLEDSTMETSLRRCLSTLDLTLLGVGGMVGSGLYVLTGAVAKEVAGPAVLLSFGVAAVAS

SEQ ID NO: 143977 - DNA, 1908 bp, Artificial Sequence
  derived and/or modified sequence
atggccagaggcctgcccaccatcgccagcctggccagactgtgccagaagctgaacagactgaagcccctggaggacagcaccatggagaccagcctgagaagatgcctgagcaccctggacctgaccctgctgggcgtgggcggcatggtgggcagcggcctgtacgtgctgaccggcgccgtggccaaggaggtggccggccccgccgtgctgctgagcttcggcgtggccgccgtggccagcctgctggccgccctgtgctacgccgagttcggcgccagagtgcccagaaccggcagcgcctacctgttcacctacgtgagcatgggcgagctgtgggccttcctgatcggctggaacgtgctgctggagtacatcatcggcggcgccgccgtggccagagcctggagcggctacctggacagcatgttcagccacagcatcagaaacttcaccgagacccacgtgggcagctggcaggtgcccctgctgggccactaccccgacttcctggccgccggcatcatcctgctggccagcgccttcgtgagctgcggcgccagagtgagcagctggctgaaccacaccttcagcgccatcagcctgctggtgatcctgttcatcgtgatcctgggcttcatcctggcccagccccacaactggagcgccgacgagggcggcttcgcccccttcggcttcagcggcgtgatggccggcaccgccagctgcttctacgccttcgtgggcttcgacgtgatcgccgccagcagcgaggaggcccagaaccccagaagaagcgtgcccctggccatcgccatcagcctggccatcgccgccggcgcctacatcctggtgagcaccgtgctgaccctgatggtgccctggcacagcctggaccccgacagcgccctggccgacgccttctaccagagaggctacagatgggccggcttcatcgtggccgccggcagcatctgcgccatgaacaccgtgctgctgagcctgctgttcagcctgcccagaatcgtgtacgccatggccgccgacggcctgttcttccaggtgttcgcccacgtgcaccccagaacccaggtgcccgtggccggcaccctggccttcggcctgctgaccgccttcctggccctgctgctggacctggagagcctggtgcagttcctgagcctgggcaccctgctggcctacaccttcgtggccaccagcatcatcgtgctgagattccagaagagcagcccccccagcagccccggccccgccagccccggccccctgaccaagcagcagagcagcttcagcgaccacctgcagctggtgggcaccgtgcacgccagcgtgcccgagcccggcgagctgaagcccgccctgagaccctacctgggcttcctggacggctacagccccggcgccgtggtgacctgggccctgggcgtgatgctggccagcgccatcaccatcggctgcgtgctggtgttcggcaacagcaccctgcacctgccccactggggctacatcctgctgctgctgctgaccagcgtgatgttcctgctgagcctgctggtgctgggcgcccaccagcagcagtacagagaggacctgttccagatccccatggtgcccctgatccccgccctgagcatcgtgctgaacatctgcctgatgctgaagctgagctacctgacctgggtgagattcagcatctggctgctgatgggcctggccgtgtacttcggctacggcatcagacacagcaaggagaaccagagagagctgcccggcctgaacagcacccactacgtggtgttccccagaggcagcctggaggagaccgtgcaggccatgcagccccccagccaggcccccgcccaggaccccggccacatggagtag

SEQ ID NO: 143978 - DNA, 249 bp, Artificial Sequence
  derived and/or modified sequence
atggccagaggcctgcccaccatcgccagcctggccagactgtgccagaagctgaacagactgaagcccctggaggacagcaccatggagaccagcctgagaagatgcctgagcaccctggacctgaccctgctgggcgtgggcggcatggtgggcagcggcctgtacgtgctgaccggcgccgtggccaaggaggtggccggccccgccgtgctgctgagcttcggcgtggccgccgtggccagctag

SEQ ID NO: 143979 - DNA, 1908 bp, Artificial Sequence
  derived and/or modified sequence
atggcgcgtgggctccctacaatcgcatccctagcgaggctttgtcagaaattgaatcggttgaaacccttggaagactccacaatggaaacatcgcttagacgctgtctaagcacactggacctgaccctgttaggcgtgggtgggatggtcggctctggcctctatgtcctgactggagccgtagctaaggaggttgcaggccctgcggtgttgctctccttcggagttgccgcggtagcaagcctattggctgcactgtgctacgcagagttcggcgcccgtgtgccaagaacgggatctgcttacctgtttacttacgtttctatgggtgagttatgggcttttctgatcggatggaatgtcctgctcgagtacatcatcggtggagcggctgtggcccgagcttggagtggctacttagatagtatgttttcgcacagcattagaaactttactgaaactcacgtcggatcgtggcaagtgcctcttctgggccactatccagattttctagctgccggaatcatcctcctggcctcagccttcgtctcatgtggagctagggtctcatcctggttgaatcacactttctcggccattagtctcttagtgatacttttcatagtcatcctcggcttcatcctggcacagccccataactggtcagctgacgaaggcggattcgcccccttcggatttagcggggtcatggcaggcacagccagctgcttctatgctttcgttggttttgacgtgatcgcagccagctccgaggaggcccagaatcccagacgcagcgtccccctggctatagctataagtttagctattgcagcaggggcctacatcctggttagcacagtgctcactcttatggttccttggcacagtctggatcctgacagtgccctggcagacgctttctaccagcgcggatataggtgggcgggcttcattgtggcggccggttccatctgtgctatgaacactgtgcttctctccttgctcttctcattaccacgtatagtctatgcaatggcagctgatggcctgttttttcaggtgtttgcacacgttcatcccaggacacaggtaccagtcgcagggactctggcgtttggcctcctgactgcatttttagctctcctgttggacttggagtcgctggtccagttcctgtctttgggcaccctgctggcatacacatttgtggctacgtctatcatcgtgctcagatttcaaaaaagcagtccacccagcagcccaggaccggcctccccaggaccgctgactaagcagcaatcctcattttcggaccatctgcagctggtgggtacggtgcacgcctcagtgcctgagcccggcgagcttaaacccgcacttcgcccctacctcggattcctggatggatattctcctggcgccgtcgtcacctgggccttaggggttatgctggctagtgcgataaccatcggctgcgttcttgtctttggaaactctaccctccatttgccccactgggggtatatactgctgctactcttaacatctgtaatgttcctccttagcctgctggtactcggggcccaccagcagcagtatcgcgaggacctgttccagattccaatggtccctctgatacccgcgctcagcatcgttttgaatatctgcctcatgctgaagctctcttatctgacatgggtaagattttccatttggctgctgatgggtctggctgtgtacttcgggtatggaattcggcattccaaagaaaaccagcgcgagctcccaggtctcaactccacacattatgtcgtgttccctcgcggatccctggaggaaaccgtgcaggcaatgcagcctccaagtcaggccccggcacaggaccccggacacatggaatag

SEQ ID NO: 143980 - DNA, 1908 bp, Artificial Sequence
  derived and/or modified sequence
atggcccgaggactgcctactattgcctccttagcccggttgtgccagaagcttaaccgacttaagccactggaggatagcactatggagacatcactcagaaggtgcctaagcaccctcgacctgactctgctgggtgtaggcggcatggttggctctggactgtatgtactgactggcgccgtggcgaaagaggtcgcaggccctgcagtcttattaagcttcggggtcgccgctgttgcctcattgttagctgctctgtgctacgcagagtttggcgccagggtcccgaggacagggtccgcctatctgttcacttacgtctccatgggtgaactgtgggcgtttcttattggatggaatgttctgctggaatacatcattggtggggctgctgtggcgagggcatggagcggatacctggactccatgttctcccactccatcagaaactttacagagacgcatgtaggctcgtggcaggtgccacttctgggacactacccagatttcttggccgccggcattatcttgctcgccagcgcattcgtgtcgtgtggagcaagggtgagtagttggctaaaccatactttttccgccatcagcctacttgttatcctgtttattgtgatcctggggttcatcctggcccagccacacaattggagcgccgacgaaggaggatttgctccattcggcttctctggagtgatggcaggtacagcctcctgcttttatgctttcgtgggatttgatgtgatcgcagctagctcggaggaggcgcagaatccgcgccggagcgtgccattggctattgccatcagtctggccatcgccgccggggcgtacattcttgtctccaccgttttgactctcatggtcccctggcactctctagaccctgacagtgctttagccgatgccttttaccaaaggggctaccgctgggcagggttcatcgttgccgcaggctccatttgtgcaatgaacacagttttgctctcactgctgttttccctgccccgcatcgtgtacgctatggccgccgatggactgtttttccaagtttttgcacatgtgcacccaaggacacaagtgcctgtggccggcacactagccttcggcctgctcaccgccttcttggcacttctgctggatttggaatccctcgtgcaattcctgagccttggtaccctcctagcttacacattcgtcgccactagcatcattgtgttgcggtttcaaaagtccagccctccttcaagtcctggccccgccagtcccgggcccctgactaagcaacagtcctcctttagcgaccatctgcagctcgtcggcaccgtgcatgcgtcagtgccagagcccggggagctgaaacccgccctgcggccttatctggggttccttgacgggtactcaccgggcgccgttgtgacatgggcgttgggcgtaatgttagcgtccgccattactattggctgtgtgctggtctttggcaattctaccctacatctgcctcactggggctacatactcctgctgctgctcactagtgtcatgtttctgctctccttgttggtcttgggtgctcaccagcagcagtaccgcgaagatctgtttcaaattccgatggtccccctgatccctgcgctctccattgttcttaatatctgtctgatgctcaaactttcctacctcacgtgggtgagattcagcatctggttgctcatgggactggcagtttattttggctacgggattcggcatagtaaggaaaaccaacgggagctacctggactcaactcaactcattatgtggtatttccacgcggctcactggaggagactgtgcaggccatgcagcctccttctcaggcgccagcgcaagatccaggccacatggaatag

SEQ ID NO: 143981 - DNA, 249 bp, Artificial Sequence
  derived and/or modified sequence
atggccagagggctccccacgattgcgagcctcgcacgtttatgccagaagctgaaccgcctgaaaccactggaggatagcaccatggaaacgagtctcaggaggtgtttaagcaccctggacttgactttgcttggggtgggaggcatggtggggtcaggcctctatgtattaactggggctgtggccaaagaagtcgctggccccgctgtcctgctgtcattcggggtggccgccgtggcttcttag

SEQ ID NO: 143982 - DNA, 1908 bp, Artificial Sequence
  derived and/or modified sequence
atggcccggggcctgcccaccatcgccagcctggcccggctgtgccagaagctgaaccggctgaagcccctggaggacagcaccatggagaccagcctgcggcgctgcctgagcaccctggacctgaccctgctgggcgtgggcggcatggtgggcagcggcctgtatgtgctgactggagctgtggccaaggaggtggccggccctgctgtgctgctgagctttggagtggccgctgtggccagcctgctggccgccctgtgctacgccgagtttggagcccgggtgcccaggactggaagtgcctacctgttcacctacgtgtccatgggagagctgtgggccttcctgattggctggaatgtgctgctggagtacatcatcggcggcgctgctgtggcccgggcctggagcggctacctggacagcatgttcagccacagcatccggaacttcacagagacccacgtgggctcctggcaggtgcccctgctgggccactacccagacttcctggccgccggcatcatcctgctggccagcgcctttgtgtcctgtggggcccgggtgtcctcctggctgaaccacaccttcagcgccatcagcctgctggtgatcctcttcatcgtcatcctgggcttcatcctggcccagccccacaactggagcgcagatgaaggaggctttgcccccttcggcttctctggagtgatggccggcacagccagctgcttctacgcctttgtgggctttgatgtgattgctgccagcagcgaggaggcccagaaccccaggagatctgtgcccctggccatcgccatcagcctggccatcgccgccggggcctacatcctggtgtccacagtgctgaccctgatggtgccctggcacagcctggaccctgattctgccctggctgatgccttctaccagaggggctaccgctgggccggcttcatcgtggccgccggcagcatctgtgccatgaacacagtgctgctgagcctgctcttcagcctgcccagaattgtgtatgccatggctgctgatggcctcttcttccaggtgtttgcccacgtgcaccccaggacccaggtgcctgtggccggcaccctggccttcggcctgctgacagccttcctggccctgctgctggacctggagagcctggtgcagttcctgagcctgggcaccctgctggcctacacctttgtggccaccagcatcatcgtgctgcgcttccagaagagcagcccccccagcagccctggccctgccagccctggccccctgaccaagcagcagagcagcttcagtgaccacctgcagctggtgggcaccgtgcacgcctctgtgcctgagcctggagagctgaagccagccctgcggccctacctgggcttcctggatggctacagccctggagctgtggtgacctgggccctgggcgtgatgctggccagcgccatcaccatcggctgtgtgctggtgtttggaaacagcaccctgcacctgccccactggggctacatcctgctgctgctgctgacctctgtgatgttcctgctgagcctgctggtgctgggcgcccaccagcagcagtacagagaagatctcttccagatccccatggtgcccctcatcccagccctgagcatcgtgctgaacatctgcctgatgctgaagctgagctacctgacctgggtgcgcttcagcatctggctgctgatgggcctggccgtgtacttcggctacggcatccgccacagcaaggagaaccagcgggagctgcccggcctgaacagcacccactacgtggtgttcccccggggcagcctggaggagaccgtgcaggccatgcagccccccagccaggccccagcccaggaccccggccacatggagtag

SEQ ID NO: 143983 - DNA, 249 bp, Artificial Sequence
  derived and/or modified sequence
atggcccggggcctgcccaccatcgccagcctggcccggctgtgccagaagctgaaccggctgaagcccctggaggacagcaccatggagaccagcctgcggcgctgcctgagcaccctggacctgaccctgctgggcgtgggcggcatggtgggcagcggcctgtatgtgctgactggagctgtggccaaggaggtggccggccctgctgtgctgctgagctttggagtggccgctgtggccagctag

SEQ ID NO: 143984 - DNA, 1908 bp, Artificial Sequence
  derived and/or modified sequence
atggcccggggcctgcccaccatcgccagcctggcccggctgtgccagaagctcaacagattgaagcctctcgaagattccacaatggagacctccctgcgaagatgcctctctacgttggatctgaccctgctgggcgttgggggcatggtgggatcggggctttacgtcctgaccggtgcagttgcaaaagaggtggcagggccggccgtcctgttgtccttcggggtggcagccgtggcctctcttctggctgccctttgctatgcagaattcggggcgcgagtacccagaactggatccgcatacctgttcacttatgtgtcaatgggcgagctttgggccttcttgattggctggaacgtgttactcgagtacatcattggaggcgccgccgtggccagagcgtggtctgggtacttggattctatgttcagtcactccattaggaactttacggaaacgcacgtgggctcatggcaagtccccctgcttgggcactaccctgacttcctggcggctggaataattctgctcgcgtctgcgtttgtgagctgcggagctcgcgtctcaagctggctgaatcatactttcagcgcaattagccttctggtgatcctgttcattgtgatcttgggcttcatcctggctcagccacacaactggtccgctgacgagggcggtttcgcgccttttggcttcagcggggtcatggctggcaccgccagctgtttctacgcttttgtgggctttgatgtgatagcggcctctagtgaggaggctcagaaccctcgaaggagcgtgcccttggcaattgctatttccctcgcaatcgcagctggcgcctacatactggtatctacggtcctgactctgatggtcccctggcacagtctggaccctgactccgcgctcgccgacgccttctatcagcggggctatcgttgggccggattcatcgtagccgccgggagcatctgcgccatgaacaccgtgttattgtccctgttattttcccttcctcgaatcgtgtacgctatggccgcagatggtttgttctttcaagtgtttgcacatgtgcaccccagaacacaggtgcctgtcgctggaactctagctttcggcctgctcacagcattcttggcacttctgctggatctggaatcccttgttcaatttctctctctcggcacgcttctcgcctacacctttgttgccaccagcataattgtgcttcggttccagaagagcagccctccatcctcccccgggccggcgtcaccaggacctcttacaaagcagcagagctcattctccgatcacttgcagctggtaggaacggtgcacgcgagtgtgcctgagccaggggagctgaagccagcactgagaccctacttaggcttcttagatggatattcaccaggtgcagtggtcacatgggccctgggggtcatgctcgctagcgctatcactatcggatgcgtgctggtgttcggtaattcgacactgcacctgcctcactgggggtatatactactgctcctgcttacctcggtgatgttccttttgagtttattagtgctgggcgcccatcaacagcagtatcgggaggacctgtttcagatcccgatggtcccattgatccccgccctttctattgttttgaacatctgtttaatgttgaagctgagctaccttacctgggtccgtttctctatctggcttttgatgggactggccgtctacttcggatacggcattcggcacagtaaagaaaaccagagagaactccccggcttgaacagcacacattacgtggttttcccaagaggcagcctggaagaaaccgtccaggccatgcagccaccctcacaggcacctgctcaggatcccgggcacatggagtag

SEQ ID NO: 143985 - DNA, 1908 bp, Artificial Sequence
  derived and/or modified sequence
atggcccggggcctgcccaccatcgccagcctggcccggctgtgccaaaagctgaaccgcctgaagcccttggaggatagtaccatggagactagcctccgacgctgcctgagcacgctagacctcaccttgttgggcgtgggtgggatggtgggtagcggactctatgtactgacgggtgcggtcgccaaggaggtggctggcccagccgttcttctgtcttttggggtagccgccgtagcctccctgttggctgcgctgtgctacgcagagtttggggctagagtcccgcgaactgggtccgcctacctattcacctatgttagcatgggggaattgtgggcattccttatcgggtggaacgtgttgctagaatatatcatcggaggcgcggccgttgcccgggcttggagtggctatcttgatagcatgttcagccattcaatccggaattttaccgagacacacgtgggttcgtggcaggtgcccctgctggggcactatcccgatttcctggccgctggaatcatcctgctggcctccgcttttgtgtcatgcggggcccgtgtgtccagttggctgaaccacacttttagtgcaatctcacttctggtgatccttttcatcgtgatccttgggtttatactggcacagccccacaactggagtgccgatgaagggggcttcgcgcccttcggtttctccggagtaatggcaggcacagcctcttgcttttacgccttcgtgggattcgacgtcattgcagccagcagtgaggaagcacaaaatccacgacgctcagtccccttggccatcgccatcagtctcgccattgccgctggtgcatacatcttggtgtctactgtgttgacactaatggttccttggcacagcttagatcctgatagtgcactggccgacgccttctaccagcgcggctacaggtgggcgggattcatcgttgcagccggaagcatctgcgccatgaacacagttctgctcagcttgctcttcagtctcccaagaatcgtttatgccatggcagccgatggcttgttcttccaagtctttgcacacgtgcaccctagaacccaggtgccagtagcagggaccttggccttcggcttgctaacagcttttctcgccctactactggatctggagagcctggtccagttcctgagtttgggtacccttttagcatatacatttgtggcaacatcaatcatagtgttgcggttccagaaatccagccccccgagtagcccagggccagcaagcccaggcccacttaccaagcagcaaagcagcttctcagaccacttgcagctggtggggacggttcacgcaagtgtgcccgaacccggcgaactcaagcctgccttgaggccttacctcgggtttttggacggttatagccccggggctgtggtgacgtgggcactgggcgtgatgctggcttctgccattacaatagggtgtgtcctcgtcttcggcaactccactctccacttgccgcactggggttacatcctcctgttactgctcacctcagtgatgtttcttttgtcactgcttgtgttgggggcccaccagcagcagtacagggaagatctcttccagattccgatggtaccgctcatacccgccttaagcatcgtcctcaacatctgcctgatgctcaaactgagttatctgacatgggttcggttttccatttggcttctcatgggactagcggtatacttcgggtacggaatacggcatagtaaagaaaatcagcgtgagctgcccggcctcaattctacccactacgttgtgtttccaagaggttctctagaggagacagttcaggcaatgcagcccccctcccaagcacctgcacaggatcccggccatatggagtag

SEQ ID NO: 143986 - DNA, 249 bp, Artificial Sequence
  derived and/or modified sequence
atggcccggggcctgcccaccatcgccagcctggcccggctgtgccaaaaacttaatcgtctaaagccactggaagacagcacaatggagacatcccttcgaaggtgtcttagcactctggacctgacccttctgggcgtgggcggaatggtaggctctggcctttatgtgttgaccggggcggttgccaaggaagtggctggtcctgccgtcctgctatctttcggtgtggccgccgttgcctcttag

SEQ ID NO: 143987 - DNA, 1908 bp, Artificial Sequence
  derived and/or modified sequence
atggccagagggctccccacaattgcctcacttgccagattgtgtcagaagcttaacagactaaaacctctagaggattctacgatggagacaagcctccggaggtgtctgtcaactctagatctcacgctcctcggcgtcgggggaatggttggcagcggcctctacgtacttaccggggctgtggctaaagaagtcgccggtccggcagtgttgctatcctttggggtcgctgcagttgcctccttattagccgcactctgctatgcagaatttggagcacgtgtcccccgaacaggcagcgcatacctgttcacatatgtctccatgggggagctatgggcctttctcattggttggaacgtgttgctagaatacataattggaggggctgctgtcgcaagggcttggtccggatacctggattcaatgttctcacattccatcaggaacttcactgagacgcacgttggttcctggcaggtgccattgctgggacactatcccgattttttagctgcgggaattattctgctggcctcagcctttgtaagctgcggagctcgggttagcagctggttaaaccatacattcagcgccatatctctcctggttattctctttatcgtgatcctgggattcattctcgcccaaccgcacaattggagcgcggacgagggaggattcgccccttttgggttcagtggagtcatggctggaactgccagctgcttctacgcttttgtcggcttcgacgtgatcgctgctagtagcgaggaagcccaaaacccacgacgcagcgttcctcttgccattgcgatctctcttgctatagccgctggcgcatacatcttggtgtctaccgtgctcaccttgatggtgccctggcacagcttagatcccgacagcgccctcgcggatgcgttttaccagaggggctacaggtgggccggttttattgtggcagccggaagtatttgcgccatgaatacggtgctgctgtctctgctgttctccttacctaggatagtgtatgctatggctgcagatggattatttttccaggtattcgctcacgtgcacccgagaacccaggtgcccgtagccggtaccctagcattcgggctgctaaccgccttcctggccctgctgctggacctagagtcccttgtgcaattcctgtctttgggaaccttgctggcctatactttcgtcgctacatcaatcattgtgctccgcttccagaaatccagcccaccctccagtcccggacctgcctcacctggacctttgacaaagcaacaaagcagcttttccgatcacttgcagctggtgggcaccgtgcacgcttccgtccccgagccgggagaacttaagcccgctttaaggccctatttgggctttctggatggatactcacccggagctgtggttacgtgggccctcggcgtcatgctggcatccgcgatcactatcggctgtgttctggtcttcggtaacagcaccctgcacctgccacactgggggtatatcctgctgctcctcctgacctctgtgatgtttttgctatccctcttggtcttaggcgcacaccagcagcagtaccgcgaagacctatttcagatccccatggtgccactcattcctgccctatctatagtgctgaacatatgtctgatgctgaagcttagctacctgacctgggtgaggttctctatctggctactcatgggcctggccgtgtattttggttatggaatccgacattcaaaggagaaccaacgtgaacttcccggtttaaactccacgcactatgtggtctttcccagaggcagcctcgaggagactgtgcaggcaatgcagcctccgagtcaagctcctgcacaggatccaggacacatggagtag

SEQ ID NO: 143988 - DNA, 1908 bp, Artificial Sequence
  derived and/or modified sequence
atggccagagggctgcctaccatagcttctctagcaaggttgtgccaaaagctcaatcgattgaaacccctcgaagactctacgatggaaaccagcttgaggcggtgcctgagcactttggacctaacactgctgggcgttggcggaatggttgggtccgggttatacgtactgacgggagccgtggcaaaggaagtggctgggccagctgttctgttgtctttcggagtggccgctgtcgccagcctgttagccgctctgtgttacgcggagtttggcgctcgcgttcctcgcacagggtccgcttatttattcacatacgtttccatgggtgagctgtgggcttttctgattgggtggaatgtgctgctggagtatattatcggcggtgcggctgtcgccagagcgtggtctggatacttggatagcatgttctctcacagcatcaggaattttaccgagactcacgtcgggtcttggcaggtgcccctgctgggacattatcccgacttcctcgccgcaggcattatcctgctggcatctgctttcgtgtcatgtggggctcgagtaagctcttggctcaatcacaccttctcagccatcagtctcctggtgatactcttcatcgttatccttggctttatcttggctcaaccgcataactggagcgctgacgaaggaggtttcgccccattcggattctccggggtgatggcgggaaccgctagctgcttctacgcattcgtggggttcgatgtcatcgcagcaagctccgaggaagcacagaatccccgtcgatcagtgcccctggccatcgcaatttcactcgccattgccgctggcgcttacatactggtgtccaccgtgctgacacttatggtgccatggcactccctcgatccggattcagctctggcagacgctttctaccagcgtggctatagatgggcgggttttatcgtggcagccggaagcatatgtgctatgaatacagtgcttctgagtctcttattcagccttcctagaattgtttacgcaatggcagccgacgggctcttcttccaagtgttcgctcatgtccatccaaggacacaggtgcccgtggccggaaccctggcttttgggctgctgactgccttcctcgcactcctgctcgacctggagtctcttgtccaattcctcagcctcggaacactgctggcatatactttcgtggctactagcatcatagttctccggtttcagaaaagctcacctcctagctccccaggccctgcctctcctggaccgctgactaaacagcagtcatccttctcggaccacttacaactggtgggtactgtgcacgcttctgtaccagagccgggagaactgaaaccagccttgcggccatatttaggttttctggatggatacagtccaggcgctgtggtgacctgggcccttggcgttatgctcgcaagtgccattaccatcggatgcgtgctggtgttcggcaattctaccttgcatcttccccattggggctatatccttcttttgttattaacatccgtgatgttccttctgtccctgctggtactcggagcacaccagcagcagtatagggaggacttattccagattccaatggtgcccctcataccagcgctctcgatcgtgttaaacatatgtctaatgttgaaactgtcctatttgacatgggttagattctcaatctggctgctgatggggcttgccgtgtactttggctatggtatacgacatagtaaggaaaatcagagggagctccccggactgaactccacccactacgtagtgttcccaagagggagtttagaagaaactgtgcaagcaatgcagccaccgtcacaggcacccgctcaggatccaggacatatggagtag

SEQ ID NO: 143989 - DNA, 249 bp, Artificial Sequence
  derived and/or modified sequence
atggccagaggcctgccaactatagcctccctggcaaggctgtgccaaaagctgaatagactaaagccccttgaggattccaccatggaaactagcctccgtcggtgtctttcaacactcgacttaaccctgctgggcgtgggtggaatggttggctctgggttgtatgtgctgacaggcgctgtggctaaagaagttgccggacccgctgtactgctctccttcggcgtagcagcagtggcctcttag

SEQ ID NO: 143990 - DNA, 2313 bp, Artificial Sequence
  derived and/or modified sequence
gcggaggcagcggctgcggcagcagcaggttccagtagctggctcggtgctcttctcggccacctgccatggcccgggggctgcccaccattgctagcctggcacgcttatgccagaagctgaaccgcctgaagccgctggaggactccaccatggagacgtcactgcggcgctgcctgtccacgctggacctgactcttctgggcgtgggtggcatggtgggctcgggtctctacgtgctcacaggtgccgtggccaaggaggtggctggccctgctgtgctcttgtccttcggtgtggccgctgtggcctccctgctggcagccctatgctatgcagaatttggggcacgtgtgccacgcacgggctctgcctacctgttcacctacgtatccatgggcgagctgtgggccttcctcatcggctggaatgttctcctcgaatacatcatcggtggcgccgccgtggcccgtgcctggagtggctacctggactctatgttcagccacagcatccgcaacttcactgagacccacgtgggttcttggcaggtgcccctcctgggccactacccggacttcctggctgctggcatcatcctcctggcctctgcctttgtctcctgtggagcccgcgtgtcctcctggctcaatcacaccttctcggccatcagcctgcttgtcattctcttcattgtcatcctgggcttcatcctggcccagcctcacaactggagcgctgacgaaggcggctttgcacccttcggcttctccggcgtcatggccggcactgcctcctgcttctatgctttcgtgggcttcgacgtcattgccgcctccagtgaggaggcccagaacccacggcggtctgtgcctctggccatcgccatctcgcttgccattgcagctggtgcctacatccttgtctccaccgtgctaaccctcatggtgccctggcacagcctggaccccgactcagcgcttgcagatgccttctaccagcggggctacaggtgggctggcttcatcgtggcagctggctccatctgcgccatgaacaccgtcctgctcagcctcctcttctccctgccacgcattgtctatgccatggccgccgatgggctcttcttccaggtgtttgcccatgtgcacccccggacacaggtgcctgtggcgggcaccctggcgttcgggctcctcacggccttcctggcactgctgctggacctggagtcgctggttcagttcctgtcccttggcacactcctggcctacacattcgtggccaccagtatcattgtgctgcgcttccagaagtcttccccgcccagctccccaggcccagccagccctggccccctgaccaagcagcagagctccttctcagaccacctacagctggtgggcactgtacacgcctccgtccctgagccaggggagctgaagccagccctgaggccctacctgggcttcttggatgggtacagccctggagcagtggtgacttgggcgcttggcgttatgttggcctcagccatcaccataggctgcgtgcttgtctttgggaactcgaccctgcacctcccacactggggttacatcctgctgctcctgctcaccagtgtcatgtttctgctcagcctccttgtcctgggggctcaccagcaacagtatcgggaagacttatttcagatccccatggttcccctgattccagccctgagcatcgtcctcaacatctgcctcatgctgaaacttagctatctgacctgggtgcgcttctccatctggctgctgatgggacttgcagtgtatttcggctatggcatccggcatagcaaggagaaccagcgggagctgccagggctgaactccacacactacgtggtattccccaggggcagcctggaggagacagtgcaggctatgcagccccccagccaggcaccagcacaggaccctggccatatggagtagctgatcagcccacacttgccccgccctcccacacctgcttgggaggccagagaggccagacaagccgagagccccttctgttgtgggcagcctgggtttgcaggcctgcacaggctggggagtcctcaggaccttaggaccttcatccaggggctgggcttcgggtcttcaggagtgggccttggctggtgctggtgccatggactctgcccagagccttcttgtttatgatcagctccagctacctgggcagttgtggtggggtggatgggaaggcccacagcccaagggatccataataataattgcttggccagccatgtggcctgctggcgta

SEQ ID NO: 143991 - DNA, 2307 bp, Artificial Sequence
  derived and/or modified sequence
gcggctgcggcagcagcagcaggttccagtagctggctcggtgctcttctcggccacctgccatggcccgggggctgcccaccattgctagcctggcacgcttatgccagaagctgaaccgcctgaagccgctggaggactccaccatggagacgtcactgcggcgctgcctgtccacgctggacctgactcttctgggcgtgggtggcatggtgggctcgggtctctacgtgctcacaggtgccgtggccaaggaggtggctggccctgctgtgctcttgtccttcggtgtggccgctgtggcctccctgctggcagccctatgctatgcagaatttggggcacgtgtgccacgcacgggctctgcctacctgttcacctacgtatccatgggcgagctgtgggccttcctcatcggctggaatgttctcctcgaatacatcatcggtggcgccgccgtggcccgtgcctggagtggctacctggactctatgttcagccacagcatccgcaacttcactgagacccacgtgggttcttggcaggtgcccctcctgggccactacccggacttcctggctgctggcatcatcctcctggcctctgcctttgtctcctgtggagcccgcgtgtcctcctggctcaatcacaccttctcggccatcagcctgcttgtcattctcttcattgtcatcctgggcttcatcctggcccagcctcacaactggagcgctgacgaaggcggctttgcacccttcggcttctccggcgtcatggccggcactgcctcctgcttctatgctttcgtgggcttcgacgtcattgccgcctccagtgaggaggcccagaacccacggcggtctgtgcctctggccatcgccatctcgcttgccattgcagctggtgcctacatccttgtctccaccgtgctaaccctcatggtgccctggcacagcctggaccccgactcagcgcttgcagatgccttctaccagcggggctacaggtgggctggcttcatcgtggcagctggctccatctgcgccatgaacaccgtcctgctcagcctcctcttctccctgccacgcattgtctatgccatggccgccgatgggctcttcttccaggtgtttgcccatgtgcacccccggacacaggtgcctgtggcgggcaccctggcgttcgggctcctcacggccttcctggcactgctgctggacctggagtcgctggttcagttcctgtcccttggcacactcctggcctacacattcgtggccaccagtatcattgtgctgcgcttccagaagtcttccccgcccagctccccaggcccagccagccctggccccctgaccaagcagcagagctccttctcagaccacctacagctggtgggcactgtacacgcctccgtccctgagccaggggagctgaagccagccctgaggccctacctgggcttcttggatgggtacagccctggagcagtggtgacttgggcgcttggcgttatgttggcctcagccatcaccataggctgcgtgcttgtctttgggaactcgaccctgcacctcccacactggggttacatcctgctgctcctgctcaccagtgtcatgtttctgctcagcctccttgtcctgggggctcaccagcaacagtatcgggaagacttatttcagatccccatggttcccctgattccagccctgagcatcgtcctcaacatctgcctcatgctgaaacttagctatctgacctgggtgcgcttctccatctggctgctgatgggacttgcagtgtatttcggctatggcatccggcatagcaaggagaaccagcgggagctgccagggctgaactccacacactacgtggtattccccaggggcagcctggaggagacagtgcaggctatgcagccccccagccaggcaccagcacaggaccctggccatatggagtagctgatcagcccacacttgccccgccctcccacacctgcttgggaggccagagaggccagacaagccgagagccccttctgttgtgggcagcctgggtttgcaggcctgcacaggctggggagtcctcaggaccttaggaccttcatccaggggctgggcttcgggtcttcaggagtgggccttggctggtgctggtgccatggactctgcccagagccttcttgtttatgatcagctccagctacctgggcagttgtggtggggtggatgggaaggcccacagcccaagggatccataataataattgcttggccagccatgtggcctgctggcgta

SEQ ID NO: 143992 - DNA, 416 bp, Artificial Sequence
  derived and/or modified sequence
agaaggtgggctgcggactttcagacgtggcccttaacctccccgaactgacctaggctagtcagtcagccggcggtctgaccttctccatctgtgactgagtcacagtcacagggcttccctagaccccggttccagtagctggctcggtgctcttctcggccacctgccatggcccgggggctgcccaccattgctagcctggcacgcttatgccagaagctgaaccgcctgaagccgctggaggactccaccatggagacgtcactgcggcgctgcctgtccacgctggacctgactcttctgggcgtgggtggcatggtgggctcgggtctctacgtgctcacaggtgccgtggccaaggaggtggctggccctgctgtgctcttgtccttcggtgtggccgctgtggcctc

SEQ ID NO: 143993 - protein, 834 aa, Artificial Sequence
  derived and/or modified sequence
MWGLGARGPDRGLLLALALGGLARAGGVEVEPGGAHGESGGFQVVTFEWAHVQDPYVIALWILVASLAKIGFHLSHKVTSVVPESALLIVLGLVLGGIVWAADHIASFTLTPTVFFFYLLPPIVLDAGYFMPNRLFFGNLGTILLYAVVGTVWNAATTGLSLYGVFLSGLMGDLQIGLLDFLLFGSLMAAVDPVAVLAVFEEVHVNEVLFIIVFGESLLNDAVTVVLYNVFESFVALGGDNVTGVDCVKGIVSFFVVSLGGTLVGVVFAFLLSLVTRFTKHVRIIEPGFVFIISYLSYLTSEMLSLSAILAITFCGICCQKYVKANISEQSATTVRYTMKMLASSAETIIFMFLGISAVNPFIWTWNTAFVLLTLVFISVYRAIGVVLQTWLLNRYRMVQLEPIDQVVLSYGGLRGAVAFALVVLLDGDKVKEKNLFVSTTIIVVFFTVIFQGLTIKPLVQWLKVKRSEHREPRLNEKLHGRAFDHILSAIEDISGQIGHNYLRDKWSHFDRKFLSRVLMRRSAQKSRDRILNVFHELNLKDAISYVAEGERRGSLAFIRSPSTDNVVNVDFTPRSSTVEASVSYLLRENVSAVCLDMQSLEQRRRSIRDAEDMVTHHTLQQYLYKPRQEYKHLYSRHELTPTEDEKQDREIFHRTMRKRLESFKSTKLGLNQNKKAAKLYKRERAQKRRNSSIPNGKLPMESPAQNFTIKEKDLELSDTEEPPNYDEEMSGGIEFLASVTKDTASDSPAGIDNPVFSPDEALDRSLLARLPPWLSPGETVVPSQRARTQIPYSPGTFCRLMPFRLSSKSVDSFLQADGPEERPPAALPESTHM

SEQ ID NO: 143994 - DNA, 2505 bp, Artificial Sequence
  derived and/or modified sequence
atgtggggcctgggcgccagaggccccgacagaggcctgctgctggccctggccctgggcggcctggccagagccggcggcgtggaggtggagcccggcggcgcccacggcgagagcggcggcttccaggtggtgaccttcgagtgggcccacgtgcaggacccctacgtgatcgccctgtggatcctggtggccagcctggccaagatcggcttccacctgagccacaaggtgaccagcgtggtgcccgagagcgccctgctgatcgtgctgggcctggtgctgggcggcatcgtgtgggccgccgaccacatcgccagcttcaccctgacccccaccgtgttcttcttctacctgctgccccccatcgtgctggacgccggctacttcatgcccaacagactgttcttcggcaacctgggcaccatcctgctgtacgccgtggtgggcaccgtgtggaacgccgccaccaccggcctgagcctgtacggcgtgttcctgagcggcctgatgggcgacctgcagatcggcctgctggacttcctgctgttcggcagcctgatggccgccgtggaccccgtggccgtgctggccgtgttcgaggaggtgcacgtgaacgaggtgctgttcatcatcgtgttcggcgagagcctgctgaacgacgccgtgaccgtggtgctgtacaacgtgttcgagagcttcgtggccctgggcggcgacaacgtgaccggcgtggactgcgtgaagggcatcgtgagcttcttcgtggtgagcctgggcggcaccctggtgggcgtggtgttcgccttcctgctgagcctggtgaccagattcaccaagcacgtgagaatcatcgagcccggcttcgtgttcatcatcagctacctgagctacctgaccagcgagatgctgagcctgagcgccatcctggccatcaccttctgcggcatctgctgccagaagtacgtgaaggccaacatcagcgagcagagcgccaccaccgtgagatacaccatgaagatgctggccagcagcgccgagaccatcatcttcatgttcctgggcatcagcgccgtgaaccccttcatctggacctggaacaccgccttcgtgctgctgaccctggtgttcatcagcgtgtacagagccatcggcgtggtgctgcagacctggctgctgaacagatacagaatggtgcagctggagcccatcgaccaggtggtgctgagctacggcggcctgagaggcgccgtggccttcgccctggtggtgctgctggacggcgacaaggtgaaggagaagaacctgttcgtgagcaccaccatcatcgtggtgttcttcaccgtgatcttccagggcctgaccatcaagcccctggtgcagtggctgaaggtgaagagaagcgagcacagagagcccagactgaacgagaagctgcacggcagagccttcgaccacatcctgagcgccatcgaggacatcagcggccagatcggccacaactacctgagagacaagtggagccacttcgacagaaagttcctgagcagagtgctgatgagaagaagcgcccagaagagcagagacagaatcctgaacgtgttccacgagctgaacctgaaggacgccatcagctacgtggccgagggcgagagaagaggcagcctggccttcatcagaagccccagcaccgacaacgtggtgaacgtggacttcacccccagaagcagcaccgtggaggccagcgtgagctacctgctgagagagaacgtgagcgccgtgtgcctggacatgcagagcctggagcagagaagaagaagcatcagagacgccgaggacatggtgacccaccacaccctgcagcagtacctgtacaagcccagacaggagtacaagcacctgtacagcagacacgagctgacccccaccgaggacgagaagcaggacagagagatcttccacagaaccatgagaaagagactggagagcttcaagagcaccaagctgggcctgaaccagaacaagaaggccgccaagctgtacaagagagagagagcccagaagagaagaaacagcagcatccccaacggcaagctgcccatggagagccccgcccagaacttcaccatcaaggagaaggacctggagctgagcgacaccgaggagccccccaactacgacgaggagatgagcggcggcatcgagttcctggccagcgtgaccaaggacaccgccagcgacagccccgccggcatcgacaaccccgtgttcagccccgacgaggccctggacagaagcctgctggccagactgcccccctggctgagccccggcgagaccgtggtgcccagccagagagccagaacccagatcccctacagccccggcaccttctgcagactgatgcccttcagactgagcagcaagagcgtggacagcttcctgcaggccgacggccccgaggagagaccccccgccgccctgcccgagagcacccacatgtag

SEQ ID NO: 143995 - DNA, 2505 bp, Artificial Sequence
  derived and/or modified sequence
atgtggggccttggagcgagaggtccggataggggtctcttactggcacttgccctgggcgggctggctcgggctggcggagtagaggtcgagcctggaggcgcccacggagaatccggtggattccaggtggtaacatttgagtgggctcacgtgcaggacccgtacgtaatcgccctgtggattctggttgctagtttggccaaaataggattccatctaagtcacaaagtgacctccgttgtaccagaatccgctcttcttattgtgctggggctggtacttggaggtattgtgtgggccgccgatcacatcgcctctttcacactaaccccgacagtattcttcttttacctcctccctcctatcgtgctagacgccggctactttatgccgaaccggctctttttcggcaacctgggaacgattctgctatacgccgtggtgggtaccgtgtggaatgccgccaccaccggactgtctctatatggtgtgttcctatcaggcctcatgggggatctccagattggtttgctggattttctgctgttcgggtcactgatggcagcagtagacccagtcgcagtcctggccgttttcgaggaagtgcacgtaaacgaggttctctttattattgtattcggcgagagcctgttgaatgatgcggttaccgtagtactgtacaacgtgttcgaaagtttcgttgcactcggtggtgacaatgtaaccggcgtggactgtgtaaaagggatcgtctccttttttgttgtaagtctcgggggtactctggtcggcgtggtgttcgctttcctgttgtcacttgtgactagatttaccaagcatgttaggattatcgaaccagggttcgtcttcattattagttatttatcctatctgacatcggagatgttaagtttgagtgccatcctcgcaattacattctgtggtatctgttgccagaaatacgtgaaggccaatattagcgagcagtcagctaccacagttcgttacacgatgaaaatgctagcctcgtccgcagaaacaatcatctttatgttcttgggaatcagcgcagtcaaccctttcatctggacgtggaacacagccttcgtgctcctgacgcttgtgtttatctcagtctaccgagccattggagtcgttctacagacatggctcctgaataggtacagaatggttcaattagagccgattgatcaagtggtcctctcatacggcggtttgcgaggtgcggtggctttcgccttagtcgtgttgttggatggggataaggttaaggagaagaatctgttcgttagcacgacaataatagttgtgttttttacagttatctttcagggtctgactatcaagcccctggtccagtggcttaaagtaaaacgttccgaacaccgggagccgcgcttaaacgaaaaactgcacggtagagccttcgaccacatcctttccgccatagaggatatctcagggcagatcggccacaactacctgagggataagtggtctcacttcgatcgaaagttcctctcacgcgtgctaatgcggcgctctgctcagaagagcagggatagaatcctgaatgtgttccatgagcttaacctcaaggatgccatttcatacgtggctgagggggagagaagagggagtcttgcattcatacgtagcccaagcaccgacaacgtggtgaacgtggatttcacaccccggagttctaccgttgaagcaagcgtgtcatacctgctccgggagaacgtgtcagcagtatgcttggacatgcaaagcctggagcaaagacgacgtagtatccgtgatgctgaagacatggtcacccaccatacactgcagcagtatctgtataagccccgacaggaatacaaacacctgtattcccgtcacgagctgacaccaacggaggacgagaaacaagaccgagagatatttcatagaacgatgcgcaaacgcctggagtcattcaagtccactaagcttggactgaatcagaacaaaaaagctgcaaagctatacaagagggagcgggcgcaaaagagaaggaattcatccatccccaatggaaagttgcctatggagagccctgcacagaacttcaccatcaaggaaaaggatctggaactcagtgacacggaagaacctccgaattacgacgaggaaatgagcggcggaattgagttcttggcctcagtgacaaaagataccgcttctgattctcccgccggcattgataacccggtgttttccccagacgaagcactggaccgttcgctgctggctcggctacccccctggctctcccctggcgagaccgtggtgccatcgcagcgggctcgcacccagattccttactctccaggaacattttgccgcctcatgccatttcgactgagtagtaagtccgtggacagtttcctgcaggccgacggacccgaagaacggcccccggccgcattgccagagagcacgcatatgtag

SEQ ID NO: 143996 - DNA, 2505 bp, Artificial Sequence
  derived and/or modified sequence
atgtggggcctgggcgcccggggccctgaccggggcctgctgctggccctggccctgggcggcctggcccgggccggcggcgtggaggtggagcccggcggggcccacggggagagcggcggcttccaggtggtgacctttgagtgggcccacgtgcaggacccctacgtgattgccctgtggatcctggtggccagcctggccaagattggcttccacctgagccacaaggtgacctctgtggtgcctgagagcgccctgctgattgtgctgggcctggtgctgggcggcatcgtgtgggccgctgaccacatcgccagcttcaccctgacccccaccgtcttcttcttctacctgctgccccccatcgtgctggatgctggctacttcatgcccaacagactcttctttggaaacctgggcaccatcctgctgtatgctgtggtgggcaccgtgtggaatgctgccaccaccggcctgagcctgtatggagtcttcctgagcggcctgatgggagacctgcagatcggcctgctggacttcctgctgtttggcagcctgatggctgctgtggaccctgtggccgtgctggccgtgtttgaggaggtgcacgtgaatgaggtgctcttcatcatcgtgtttggagagagcctgctgaatgatgctgtgacagtggtgctgtacaacgtgtttgagagctttgtggccctgggcggggacaacgtgactggagtggactgtgtgaagggcatcgtgtccttctttgtggtgtccctgggcggcaccctggtgggcgtggtgtttgccttcctgctgagcctggtgacccgcttcaccaagcacgtgcgcatcatcgagcccggctttgtgttcatcatctcctacctgagctacctgaccagcgagatgctgagcctgagcgccatcctggccatcaccttctgtggcatctgctgccagaagtatgtgaaggccaacatcagcgagcagagcgccaccaccgtgcgctacaccatgaagatgctggccagcagcgctgagaccatcatcttcatgttcctgggcatctctgctgtgaaccccttcatctggacctggaacacagcctttgtgctgctgaccctggtgttcatctctgtgtaccgggccatcggcgtggtgctgcagacctggctgctgaaccgctacaggatggtgcagctggagcccatcgaccaggtggtgctgtcctatggaggcctgcggggagctgtggcctttgccctggtggtgctgctggatggagacaaggtgaaggagaagaacctgtttgtgtccaccaccatcatcgtggtgttcttcaccgtcatcttccagggcctgaccatcaagcccctggtgcagtggctgaaggtgaagaggtctgagcaccgggagccccggctgaatgagaagctgcacggccgggcctttgaccacatcctgagcgccatcgaggacatcagcggccagatcggccacaactacctgcgggacaagtggagccactttgacaggaagttcctgagccgggtgctgatgagaagaagtgcccagaagagccgggaccgcatcctgaatgtgttccacgagctgaacctgaaggatgccatctcctatgtggccgagggggagcggcggggcagcctggccttcatccgcagccccagcacagacaacgtggtgaatgtggacttcacccccaggagcagcacagtggaggcctctgtgtcctacctgctgagagaaaatgtgtctgctgtgtgcctggacatgcagagcctggagcagaggagaagaagcatcagagatgctgaggacatggtgacccaccacaccctgcagcagtacctgtacaagccccggcaggagtacaagcacctgtacagcagacatgagctgacccccacagaagatgagaagcaggaccgggagatcttccacaggaccatgaggaagaggctggagagcttcaagagcaccaagctgggcctgaaccagaacaagaaggccgccaagctgtacaagcgggagcgggcccagaagagaagaaacagcagcatccccaacgggaagctgcccatggagagccctgcccagaacttcaccatcaaggagaaggacctggagctgagtgacacagaggagccccccaactatgatgaggagatgtctgggggcatcgagttcctggcctctgtgaccaaggacacagccagtgacagccctgctggcatcgacaaccctgtgttctccccagatgaggccctggacaggagcctgctggcccggctgcccccctggctgagccctggagagaccgtggtgcccagccagagggcccggacccagatcccctacagccctggcaccttctgccgcctgatgcccttccggctgagcagcaagtctgtggacagcttcctgcaggctgatggccctgaggagcggcccccagctgccctgcctgagagcacccacatgtag

SEQ ID NO: 143997 - DNA, 2505 bp, Artificial Sequence
  derived and/or modified sequence
atgtggggcctgggcgcccggggccccgaccggggcctgctgctggcccttgccctgggaggactggccagggctggaggggttgaggtggagcccggcggggcccatggggagagtggtggttttcaggtggtcaccttcgaatgggcgcacgttcaggacccttatgtaattgcactgtggatactcgtggcttctctcgctaaaattggtttccatctttcacataaagtgacctccgtggtgcccgaatctgctttgctcatcgtgctcgggttggtgctaggcggtatcgtttgggcagcggaccacattgcaagtttcactctgacacccacagtgttctttttttacctactccccccgattgtgcttgatgctggatatttcatgcctaatagattattctttggaaacctaggcactattctgctctatgcagtggttggaaccgtgtggaacgccgctacaactggcctgagcctgtatggagtgtttctgtctggtctaatgggggacctgcagattggactcctggactttctgcttttcgggtctctcatggcagccgtggacccagtcgccgtgttggcggtattcgaggaggttcatgtgaacgaagtgctgtttatcatcgtttttggggagagcctgctgaatgacgcagtgacggtggttctgtacaatgtgtttgaatcctttgtggctcttggcggcgacaatgtgaccggcgtggactgtgttaaaggaatagtctccttttttgtcgtgtcacttggcgggaccctggtgggcgtggtgtttgcctttcttctcagcttggttacccgtttcacaaagcatgtgaggatcattgaacccggatttgtgtttatcattagctatctgtcttacctcacttctgagatgttaagtctttccgctatccttgctataacattctgtggaatctgttgccaaaagtatgtaaaggctaacatatccgaacagagcgccacaacagtcagatacaccatgaagatgttggcaagcagcgccgaaacaattatcttcatgtttctcggcatttctgctgtaaatccatttatctggacatggaacactgccttcgtattactgacactggtgttcattagcgtgtatcgggcaatcggtgtcgtactgcagacttggctcctcaacaggtatcgtatggtgcagctcgagcccattgaccaagttgtgctgtcctacggaggcctgagaggtgcggtggcttttgcccttgttgttctgctggacggtgacaaagtcaaggagaaaaacttatttgtcagcaccacaatcatagtggtattctttactgtcatttttcaggggctaaccatcaagccacttgtccaatggctgaaagttaaaagatccgagcaccgggaaccccgtctgaatgaaaagttacacggaagggctttcgaccatattctttccgctatcgaagatattagcggccaaatcggtcacaactatctgcgggacaagtggagccacttcgaccgcaaatttctgtcccgggtcctgatgcggagatctgcccagaagtcgcgcgaccgtatcctaaacgtgtttcacgagctgaatctcaaagatgctatcagttatgttgcagagggtgaacgccgcggatccttggcattcatacgcagcccctccacagacaatgtggtaaatgtggattttacgccccggagttccactgtggaagccagcgtgtcatatcttctgagggagaatgtgtccgccgtttgcttggatatgcagagtctggagcagcgtaggcgctccatcagagatgctgaagacatggtgacccaccacaccctgcagcagtatctttacaagcctcggcaggaatacaagcatttgtatagccgccatgagctgaccccaacagaggacgagaaacaggacagagagatttttcacaggacaatgcgcaagaggttagaaagcttcaagagtactaagctgggacttaatcagaacaaaaaggctgccaagctgtataagcgtgagcgggcacagaagcgccgcaactccagcatccctaacggaaaactgccaatggagagtcccgcccagaacttcaccattaaagaaaaggacttagaattatcggacacagaagaacctcccaactacgacgaggaaatgagcggcggcatcgaattcctggctagcgtgacaaaggacacagcttctgacagtccggcggggatcgacaatcctgtgttttcgccggatgaagcacttgaccgctctctcctggctcgtttgcccccctggctctctccaggggagaccgtggtgccatcccaaagggccagaacccaaataccctactctcccgggactttctgcagattgatgccattccggctcagttctaagtccgtggacagctttctgcaggccgacgggccagaggaacgcccccccgccgcattgccagagagcacccatatgtag

SEQ ID NO: 143998 - DNA, 2505 bp, Artificial Sequence
  derived and/or modified sequence
atgtggggactcggagcgcgtggacctgaccgaggactgcttctagcacttgcgctagggggtctggctcgcgctggaggggtggaagtggaacccggaggagcccatggagagtccggcggatttcaagtcgtgacttttgagtgggcacatgtgcaagatccatatgtaatcgctctttggatcctcgtggcttccctggccaagatcggtttccatttaagccataaagtgacgtctgtcgtgcccgaaagcgcactgctgattgtgcttggcctagtgctcggtggcatcgtgtgggctgccgatcacatcgccagcttcacacttacccccaccgtcttctttttctatctgttaccacctattgtcctcgatgccggatatttcatgcccaatagactgttcttcggtaatctaggcaccatcctactttacgctgtcgttgggactgtgtggaatgctgcgaccacgggactgagcttgtacggggtatttctaagcggcctaatgggggatctccagatcggactgctcgacttcctgctgttcggtagtttaatggcggcagtggatcccgtggcggtactggccgtttttgaagaggtccacgtgaatgaggtcctgttcattatcgtgtttggtgagtctcttctgaatgatgccgttaccgtggttctgtacaatgtatttgagagttttgtggctctaggcggtgataatgtgacaggcgtcgattgtgtgaaaggcatagtgtcattcttcgtagtctcattagggggaacccttgtcggggtagtcttcgccttcttgctgtctctggttacccgattcacaaagcacgtgagaatcatagaacctggattcgtgtttattatctcttatctgtcctacctaactagcgagatgctgtccttatcagctatactggctattaccttttgtgggatctgttgtcagaagtacgtgaaggctaacattagtgaacaaagcgcaactaccgtcagatacactatgaaaatgttggccagttccgccgagacgatcatctttatgtttctgggcatctccgcagttaacccattcatctggacttggaacactgcatttgtgctgctgacactcgtgttcattagcgtctacagggccatcggcgtggtcctccagacttggttactgaatcgttataggatggtgcaacttgagcctatagaccaggtggtgctgagttacggtggcttgcggggagctgttgcatttgctcttgtggtgctacttgacggtgacaaagttaaggaaaagaatctattcgtgtctaccactattattgtcgtgttcttcacagtcatctttcaggggctcaccatcaaaccactcgtccagtggctcaaggttaaacgatctgagcatagggaacccagactgaatgagaagcttcatggcagagcatttgaccacatactctccgcaattgaggacatctcaggccagatcggccacaattatttacgggacaagtggtcccactttgacagaaaattcctcagccgggtgctgatgcggcgtagtgcccagaagtcccgggaccgtattctgaacgtgtttcacgaactcaatctaaaggatgccatcagttatgttgcagagggagaacgaagaggatccttagcttttattcgttctcctagcactgataacgtcgtgaacgtggattttaccccccgaagcagcacagtggaggcctctgtgtcttacctgctccgcgaaaatgtgtccgcggtatgtctagacatgcagtcgttggaacagaggagacgcagcattagggacgctgaagacatggttacgcaccacacattgcaacagtacctgtataaaccacgccaggaatataagcatctttattccagacatgagcttaccccaacagaagatgaaaagcaggatagagaaatctttcatcggactatgcggaagcgcttggaatccttcaaatcgaccaaactgggcttgaatcaaaacaagaaggccgctaagttgtataagagggaaagagcccagaagcggagaaatagttcaattccgaacggaaaactccccatggagagccctgcacagaactttacaatcaaagaaaaagatctggaattaagcgacactgaggaacctcccaattacgatgaagaaatgtctggagggattgagttcttagcctctgtaactaaggatactgcctcggatagtcctgctgggattgataaccccgttttcagtccagatgaggccctggaccgtagcctcctcgctagactccccccttggctttcgccgggtgagactgtggtgccctctcagagggccagaacccagatcccctatagcccaggaactttttgtagactgatgccatttcgattgagtagtaagagtgtggacagcttcctgcaggcggatggacctgaagaacgaccgccagccgctctgcctgaatctacacacatgtag

SEQ ID NO: 143999 - DNA, 2584 bp, Artificial Sequence
  derived and/or modified sequence
gcaggcggcaatgtggggactcggggcccggggccccgaccgggggctgctgctggcgctggcgctgggcgggctggcgcgggccgggggcgtcgaggtggagcccggcggcgcgcacggcgagagcgggggcttccaggtggtcaccttcgagtgggcccacgtgcaggatccctacgtcatcgcgctctggatcctcgtggccagcttggccaagatcgggttccacctgtcccacaaggtcaccagcgtggttcccgagagcgccctgctcatcgtgctgggcctggtgctgggcggcatcgtctgggcggccgaccacatcgcgtccttcacactgacgcccaccgtcttcttcttctacctgctgccccccatcgtgctggacgccggctacttcatgcccaaccgcctcttcttcggcaacctggggaccatcctgttgtacgccgtcgtgggtaccgtgtggaacgcggccaccaccgggctgtccctctacggcgtcttcctcagtgggctcatgggcgacctgcagattgggctgctggacttcctcctgtttggcagcctcatggcggctgtggacccggtggccgtcctggccgtgtttgaggaggtccatgtcaacgaggtcctgttcatcatcgtcttcggggagtcgctgctgaacgacgcagtcaccgtggttctgtacaatgtgtttgaatctttcgtggcgctgggaggtgacaacgtgactggcgtggactgcgtgaagggcatagtgtccttcttcgtggtgagcctggggggcacgctggtgggggtggtcttcgccttcctgctgtcgctggtgacgcgcttcaccaagcatgtgcgtatcatcgagcccggcttcgtgttcatcatctcctacctgtcctacctgacgtccgagatgctgtcgctgtcggccatcctcgccatcaccttctgtggcatctgctgtcagaagtatgtgaaggccaacatctcggagcagtcggccaccaccgtgcgctacaccatgaagatgctggccagcagcgccgagaccatcatcttcatgttcctgggtatctcggccgtgaacccgttcatctggacctggaacacggccttcgtgctcctgacgctggtcttcatctccgtgtaccgggccatcggtgtggtcctgcagacctggcttctgaaccgctaccgcatggtgcagctggagcccattgaccaggtggtcctgtcctacgggggcctgcgcggggccgtggcctttgccctggtggtgcttctggatggagacaaggtcaaggagaagaacctgttcgtcagcaccaccatcatcgtagtgttcttcaccgtcatcttccagggcctgaccatcaagcctctggtgcagtggctgaaggtgaagaggagcgagcaccgggaacctcggctcaacgagaagctgcacgggcgcgctttcgaccacatcctctcggccatcgaggacatatccggacagatcgggcacaattatctcagagacaagtggtcccacttcgacaggaagttcctcagcagggtcctcatgagacggtcggcccagaagtctcgagaccggatcctgaatgtcttccacgagctgaacctgaaggatgccatcagctacgtggctgagggagagcgccgcgggtccctggccttcatccgctcccccagcaccgacaacgtggtcaacgtggacttcacgccacgatcgtccaccgtggaggcctctgtctcctacctcctgagagaaaatgtcagcgctgtctgcctggacatgcagtctctggagcagcgacggcggagcatccgggacgcggaggacatggtcacgcaccacacgctacagcagtacctgtacaagccgcggcaggagtacaagcatctgtacagccgacacgagctcacgcccacggaggacgagaaacaggaccgggaaatcttccacaggaccatgcggaagcgcctggagtccttcaagtcgaccaagctggggctcaaccagaacaagaaggcggccaagctgtacaagcgggagcgtgcccagaagcggagaaacagcagcatccccaatgggaagctgcccatggagagccctgcgcagaatttcaccatcaaggagaaagacttggaactttcagacaccgaggagccccccaactatgatgaggagatgagtggggggatcgagttcctggctagtgtcaccaaggacacagcgtccgactcccctgcaggaattgacaaccctgtgttttctccggacgaggccctggaccgcagcctcctggccaggctgccgccctggctgtctcccggggagacggtggtcccctcgcagagggcccgcacgcagattccctactctcccggcaccttctgccgcctgatgcccttccgcctcagcagcaagtccgtggactccttcctgcaggcagacggccccgaggagcggccccccgccgccctccccgagtccacacacatgtgacaccggctccgacacgccgctaaccggccgctcgtccccgcgccacggtccgcccaccgccgccgccgc

SEQ ID NO: 144000 - protein, 126 aa, Artificial Sequence
  derived and/or modified sequence
MSIGVPIKVLHEAEGHIVTCETNTGEVYRGKLIEAEDNMNCQMSNITVTYRDGRVAQLEQVYIRGSKIRFLILPDMLKNAPMLKSMKNKNQGSGAGRGKAAILKAQVAARGRGRGMGRGNIFQKRR

SEQ ID NO: 144001 - protein, 120 aa, Artificial Sequence
  derived and/or modified sequence
MSIGVPIKVLHEAEGHIVTCETNTGEVYRGKLIEAEDNMNCQMSNITVTYRDGRVAQLEQVYIRGSKIRFLILPDMLKNAPMLKSMKNKNQGSGAGRGKAAILKAQGYLSSLEWVLVHIC

SEQ ID NO: 144002 - DNA, 381 bp, Artificial Sequence
  derived and/or modified sequence
atgagcatcggcgtgcccatcaaggtgctgcacgaggccgagggccacatcgtgacctgcgagaccaacaccggcgaggtgtacagaggcaagctgatcgaggccgaggacaacatgaactgccagatgagcaacatcaccgtgacctacagagacggcagagtggcccagctggagcaggtgtacatcagaggcagcaagatcagattcctgatcctgcccgacatgctgaagaacgcccccatgctgaagagcatgaagaacaagaaccagggcagcggcgccggcagaggcaaggccgccatcctgaaggcccaggtggccgccagaggcagaggcagaggcatgggcagaggcaacatcttccagaagagaagatag

SEQ ID NO: 144003 - DNA, 381 bp, Artificial Sequence
  derived and/or modified sequence
atgtcaatcggggttcctatcaaagtacttcacgaggccgagggccacattgtgacttgtgagaccaatacaggggaagtgtatcgaggcaagctgattgaggcggaggataatatgaattgccagatgagtaatatcactgttacgtaccgcgacggtagggtggcccaactggagcaggtctatattcggggatctaaaattcgattccttatactgcccgacatgctcaagaatgcccccatgctcaagtctatgaaaaacaagaaccagggctcaggggccggcaggggtaaagccgctatactaaaggctcaggtggcggctcggggcagaggacgaggtatgggtagaggcaatatcttccagaagagacggtag

SEQ ID NO: 144004 - DNA, 381 bp, Artificial Sequence
  derived and/or modified sequence
atgagcattggagtgcccatcaaggtgctgcatgaagctgagggccacatcgtgacctgtgagaccaacacaggagaggtgtaccggggcaagctgattgaagctgaggacaacatgaactgccagatgagcaacatcaccgtgacctacagagatggccgggtggcccagctggagcaggtgtacatccggggcagcaagatccgcttcctgatcctgcctgacatgctgaagaatgcccccatgctgaagtccatgaagaacaagaaccagggcagcggggccggccggggcaaggccgccatcctgaaggcccaggtggccgcccggggccggggccggggcatgggccggggcaacatcttccagaagagaagatag

SEQ ID NO: 144005 - DNA, 381 bp, Artificial Sequence
  derived and/or modified sequence
atgagcatcggcgtgcccatcaaggtgctgcacgaggccgagggccacatcgtaacgtgcgagaccaatacaggagaggtttatcgggggaaactaatcgaagccgaagataatatgaactgtcagatgagcaatataacagtcacttatagggacggacgcgttgcccagctggaacaggtgtacataagaggtagcaagattcggttcttgattcttccagatatgctgaaaaatgctcctatgctgaagtctatgaagaacaaaaatcagggatccggggcagggcgcgggaaagccgccatcctcaaggcccaggtggctgctagaggccgcggtcggggaatgggtaggggtaacatttttcagaagagacgctag

SEQ ID NO: 144006 - DNA, 381 bp, Artificial Sequence
  derived and/or modified sequence
atgtcaatcggcgtgcctataaaagtgctgcatgaagcagaggggcacatcgtgacttgtgaaaccaacacaggagaggtgtatagagggaaactgatcgaagcagaagataatatgaattgccagatgtcaaatatcactgttacctatcgcgacggtcgggtggctcagcttgaacaggtgtatatcaggggttccaagatcagattcctaatcctccccgatatgctcaaaaatgccccaatgctgaaaagtatgaagaacaaaaatcagggcagtggtgccggtcgcggaaaggctgctatcctgaaggcccaggtggccgctcggggacgcggtagaggcatgggacgtgggaacatcttccagaaacgtagatag

SEQ ID NO: 144007 - DNA, 363 bp, Artificial Sequence
  derived and/or modified sequence
atgagcatcggcgtgcccatcaaggtgctgcacgaggccgagggccacatcgtgacctgcgagaccaacaccggcgaggtgtacagaggcaagctgatcgaggccgaggacaacatgaactgccagatgagcaacatcaccgtgacctacagagacggcagagtggcccagctggagcaggtgtacatcagaggcagcaagatcagattcctgatcctgcccgacatgctgaagaacgcccccatgctgaagagcatgaagaacaagaaccagggcagcggcgccggcagaggcaaggccgccatcctgaaggcccagggctacctgagcagcctggagtgggtgctggtgcacatctgctag

SEQ ID NO: 144008 - DNA, 363 bp, Artificial Sequence
  derived and/or modified sequence
atgagtatcggagtgcctattaaggtacttcacgaagctgagggtcacattgtgacttgcgaaaccaatactggagaagtgtatcgcggtaagctgatcgaagctgaggacaacatgaactgtcaaatgagcaacatcacagtaacctaccgcgacggaagagtcgcccaactggagcaggtgtatatcagagggtccaaaatcaggtttctgatcctgccagacatgttgaagaatgcccctatgttgaagtctatgaagaacaaaaatcagggtagcggagccggtcggggaaaagcagcgatcctaaaggcacaaggctacttatcttccctggagtgggtcctcgtgcacatttgctag

SEQ ID NO: 144009 - DNA, 1763 bp, Artificial Sequence
  derived and/or modified sequence
aagcaactctcctccaactgtctttagggataaccctgagcgggcagccgctctactctatacctaactttatccgtaccagatacctagcctcactcagggccccccttacctggcggtgccgggatcaacaaatgaaattgtgacgggaagtcctggcccttggcccaacctcctgctgtccccggtctgagggcccaagccccgcgtctccgccttgccgtccagcctgtccttggtgtggggtgcttggaagtgtgagcaccctctctggctctttgccggccccaagggtcgttgcggcggcccccgggcccagtcatcagccctcttttccggtgccggaactatcgtactggtgccctagtttcccagccggcaggcggagtgaggaggaagcggaggcgagaccgcgctcaacactggggaaaggaaggaggcgggccctgcgcgcagcattttgggaaagagtggaattctgggtgttaggcccgccattcgcttgactcacgccttcgccgtagcatctttcgcagcggaccgaagagaagaaaagtaggccagagccgaactctcttcctgccaagatgtctattggtgtgccgattaaagtactgcatgaggccgagggccacattgtgacatgtgagacgaacaccggtgaggtatatcgggggaagctcattgaagcagaggacaacatgaactgccagatgtccaacatcacagtcacatacagagatggccgagtggcacagctggagcaggtatacatccgtggcagcaaaatccgctttctgattttgcctgacatgctgaagaacgcacccatgttaaagagcatgaaaaataaaaaccaaggctcaggggctggccgaggaaaagctgctattctcaaggcccaagtggccgcaagaggaagaggacgtggaatgggacgtggaaacatctttcaaaagcgaagataattttctaagttgaacagaactttgtccttttttctttcaggttatctgagttcattggagtgggtgcttgtgcatatatgctaggtatcttttgccatctttctctttagatcaggggaaatgtttaagctaaataaatctggggggttttttgttctgttttgttttgttttctttgagaaaataaggactttgtgttcatttgaagtttgctttggctaaattttgacaccctgggggatgtcctgggagaatgccagtactttgaaatagcacagctattgatgagattttaagctgctgttcctggccagttgcaggttaagccccagaaaagttcaccttggagaagctccgagaacacacagattgtgtctcattcatcttcagacacaggcacatagtgtggcactttgttcagttaacatttgtggagctgtcatcagctcagctttaacaacacaggtgactctttcccttgataaagtcataggtaattcaggggctgggtgcggcggctcacgcatgtaatcccagcactttgggaggccaaggcgggcggatcacgaggtcaggagttcgagaccagcctggccaatatggtgaaacctcgtgtgtactaaaaataaaaaaattagccgggtgcggtggcatgtacctgtagtcccagctactcgggaggctgaggcagaagattcgcttgaacccaggaggtggacattgcagtgagcagagatcatgccactgtactccagcttgggtgacagagcgagactgcacctcaaaaaaaaaaaa

SEQ ID NO: 144010 - DNA, 363 bp, Artificial Sequence
  derived and/or modified sequence
atgagcattggagtgcccatcaaggtgctgcatgaagctgagggccacatcgtgacctgtgagaccaacacaggagaggtgtaccggggcaagctgattgaagctgaggacaacatgaactgccagatgagcaacatcaccgtgacctacagagatggccgggtggcccagctggagcaggtgtacatccggggcagcaagatccgcttcctgatcctgcctgacatgctgaagaatgcccccatgctgaagtccatgaagaacaagaaccagggcagcggggccggccggggcaaggccgccatcctgaaggcccagggctacctgagcagcctggagtgggtgctggtgcacatctgctag

SEQ ID NO: 144011 - DNA, 363 bp, Artificial Sequence
  derived and/or modified sequence
atgagcatcggcgtgcccatcaaggtgctgcacgaggccgagggccatatcgttacgtgtgaaaccaataccggggaggtgtatcgtggcaagctcattgaggcggaagacaatatgaattgtcagatgtccaacatcaccgtgacttatagggacgggcgcgtagcacaactggagcaggtttacattagaggcagtaagatacgatttctgatactacctgacatgctgaaaaacgcaccaatgctaaagtctatgaaaaacaagaaccagggctctggcgccggtagaggaaaggctgccattctaaaggcccagggctacctctcgagtctcgaatgggtactcgttcacatttgctag

SEQ ID NO: 144012 - DNA, 567 bp, Artificial Sequence
  derived and/or modified sequence
gactcacgccttcgccgtagcatctttcgcagcggaccgaagagaagaaaagtaggccagagccgaactctcttcctgccaagatgtctattggtgtgccgattaaagtactgcatgaggccgagggccacattgtgacatgtgagacgaacaccggtgaggtatatcgggggaagctcattgaagcagaggacaacatgaactgccagatgtccaacatcacagtcacatacagagatggccgagtggcacagctggagcaggtatacatccgtggcagcaaaatccgctttctgattttgcctgacatgctgaagaacgcacccatgttaaagagcatgaaaaataaaaaccaaggctcaggggctggccgaggaaaagctgctattctcaaggcccaaggttatctgagttcattggagtgggtgcttgtgcatatatgctaggtcccagagaaaaacctccatgctgggttgatagcagcagctaggatcagttgcccaagactctggattctcgagatgaagaccgtcagcagaggctgatctctcctgtgggctcatgtcc

SEQ ID NO: 144013 - DNA, 363 bp, Artificial Sequence
  derived and/or modified sequence
atgagcatcggagtgccaatcaaggtgcttcacgaggcagaaggccatatcgtgacgtgcgagactaacactggagaagtctaccggggaaaactcatagaggctgaggacaatatgaattgccagatgagtaacattacagtcacatatagggacggaagagtggcccagctcgagcaggtgtacatcagaggctccaagatcagattccttatcctgcctgacatgcttaagaatgcaccaatgctgaagtccatgaagaacaagaaccaaggaagcggggctgggaggggaaaggcagctatcttgaaagctcagggttatctgtcttctttagagtgggtactggtgcacatttgctag

SEQ ID NO: 144014 - protein, 1147 aa, Artificial Sequence
  derived and/or modified sequence
MDEPPFSEAALEQALGEPCDLDAALLTDIEDMLQLINNQDSDFPGLFDPPYAGSGAGGTDPASPDTSSPGSLSPPPATLSSSLEAFLSGPQAAPSPLSPPQPAPTPLKMYPSMPAFSPGPGIKEESVPLSILQTPTPQPLPGALLPQSFPAPAPPQFSSTPVLGYPSPPGGFSTGSPPGNTQQPLPGLPLASPPGVPPVSLHTQVQSVVPQQLLTVTAAPTAAPVTTTVTSQIQQVPVLLQPHFIKADSLLLTAMKTDGATVKAAGLSPLVSGTTVQTGPLPTLVSGGTILATVPLVVDAEKLPINRLAAGSKAPASAQSRGEKRTAHNAIEKRYRSSINDKIIELKDLVVGTEAKLNKSAVLRKAIDYIRFLQHSNQKLKQENLSLRTAVHKSKSLKDLVSACGSGGNTDVLMEGVKTEVEDTLTPPPSDAGSPFQSSPLSLGSRGSGSGGSGSDSEPDSPVFEDSKAKPEQRPSLHSRGMLDRSRLALCTLVFLCLSCNPLASLLGARGLPSPSDTTSVYHSPGRNVLGTESRDGPGWAQWLLPPVVWLLNGLLVLVSLVLLFVYGEPVTRPHSGPAVYFWRHRKQADLDLARGDFAQAAQQLWLALRALGRPLPTSHLDLACSLLWNLIRHLLQRLWVGRWLAGRAGGLQQDCALRVDASASARDAALVYHKLHQLHTMGKHTGGHLTATNLALSALNLAECAGDAVSVATLAEIYVAAALRVKTSLPRALHFLTRFFLSSARQACLAQSGSVPPAMQWLCHPVGHRFFVDGDWSVLSTPWESLYSLAGNPVDPLAQVTQLFREHLLERALNCVTQPNPSPGSADGDKEFSDALGYLQLLNSCSDAAGAPAYSFSISSSMATTTGVDPVAKWWASLTAVVIHWLRRDEEAAERLCPLVEHLPRVLQESERPLPRAALHSFKAARALLGCAKAESGPASLTICEKASGYLQDSLATTPASSSIDKAVQLFLCDLLLVVRTSLWRQQQPPAPAPAAQGTSSRPQASALELRGFQRDLSSLRRLAQSFRPAMRRVFLHEATARLMAGASPTRTHQLLDRSLRRRAGPGGKGGAVAELEPRPTRREHAEALLLASCYLPPGFLSAPGQRVGMLAEAARTLEKLGDRRLLHDCQQMLMRLGGGTTVTSS

SEQ ID NO: 144015 - protein, 1071 aa, Artificial Sequence
  derived and/or modified sequence
MDEPPFSEAALEQALGEPCDLDAALLTDIEDMLQLINNQDSDFPGLFDPPYAGSGAGGTDPASPDTSSPGSLSPPPATLSSSLEAFLSGPQAAPSPLSPPQPAPTPLKMYPSMPAFSPGPGIKEESVPLSILQTPTPQPLPGALLPQSFPAPAPPQFSSTPVLGYPSPPGGFSTGSPPGNTQQPLPGLPLASPPGVPPVSLHTQVQSVVPQQLLTVTAAPTAAPVTTTVTSQIQQVPVLLQPHFIKADSLLLTAMKTDGATVKAAGLSPLVSGTTVQTGPLPTLVSGGTILATVPLVVDAEKLPINRLAAGSKAPASAQSRGEKRTAHNAIEKRYRSSINDKIIELKDLVVGTEAKLNKSAVLRKAIDYIRFLQHSNQKLKQENLSLRTAVHKSKSLKDLVSACGSGGNTDVLMEGVKTEVEDTLTPPPSDAGSPFQSSPLSLGSRGSGSGGSGSDSEPDSPVFEDSKAKPEQRPSLHSRGMLDRSRLALCTLVFLCLSCNPLASLLGARGLPSPSDTTSVYHSPGRNVLGTESRDGPGWAQWLLPPVVWLLNGLLVLVSLVLLFVYGEPVTRPHSGPAVYFWRHRKQADLDLARGDFAQAAQQLWLALRALGRPLPTSHLDLACSLLWNLIRHLLQRLWVGRWLAGRAGGLQQDCALRVDASASARDAALVYHKLHQLHTMGKHTGGHLTATNLALSALNLAECAGDAVSVATLAEIYVAAALRVKTSLPRALHFLTRFFLSSARQACLAQSGSVPPAMQWLCHPVGHRFFVDGDWSVLSTPWESLYSLAGNPVDPLAQVTQLFREHLLERALNCVTQPNPSPGSADGDKEFSDALGYLQLLNSCSDAAGAPAYSFSISSSMATTTGVDPVAKWWASLTAVVIHWLRRDEEAAERLCPLVEHLPRVLQESERPLPRAALHSFKAARALLGCAKAESGPASLTICEKASGYLQDSLATTPASSSIDKAVQLFLCDLLLVVRTSLWRQQQPPAPAPAAQGTSSRPQASALELRGFQRDLSSLRRLAQSFRPAMRRLMDVLTSESAWALPQHLGKGFPSPSGHKVPGWHGRMD

SEQ ID NO: 144016 - protein, 893 aa, Artificial Sequence
  derived and/or modified sequence
MKTDGATVKAAGLSPLVSGTTVQTGPLPTLVSGGTILATVPLVVDAEKLPINRLAAGSKAPASAQSRGEKRTAHNAIEKRYRSSINDKIIELKDLVVGTEAKLNKSAVLRKAIDYIRFLQHSNQKLKQENLSLRTAVHKSKSLKDLVSACGSGGNTDVLMEGVKTEVEDTLTPPPSDAGSPFQSSPLSLGSRGSGSGGSGSDSEPDSPVFEDSKAKPEQRPSLHSRGMLDRSRLALCTLVFLCLSCNPLASLLGARGLPSPSDTTSVYHSPGRNVLGTESRDGPGWAQWLLPPVVWLLNGLLVLVSLVLLFVYGEPVTRPHSGPAVYFWRHRKQADLDLARGDFAQAAQQLWLALRALGRPLPTSHLDLACSLLWNLIRHLLQRLWVGRWLAGRAGGLQQDCALRVDASASARDAALVYHKLHQLHTMGKHTGGHLTATNLALSALNLAECAGDAVSVATLAEIYVAAALRVKTSLPRALHFLTRFFLSSARQACLAQSGSVPPAMQWLCHPVGHRFFVDGDWSVLSTPWESLYSLAGNPVDPLAQVTQLFREHLLERALNCVTQPNPSPGSADGDKEFSDALGYLQLLNSCSDAAGAPAYSFSISSSMATTTGVDPVAKWWASLTAVVIHWLRRDEEAAERLCPLVEHLPRVLQESERPLPRAALHSFKAARALLGCAKAESGPASLTICEKASGYLQDSLATTPASSSIDKAVQLFLCDLLLVVRTSLWRQQQPPAPAPAAQGTSSRPQASALELRGFQRDLSSLRRLAQSFRPAMRRVFLHEATARLMAGASPTRTHQLLDRSLRRRAGPGGKGGAVAELEPRPTRREHAEALLLASCYLPPGFLSAPGQRVGMLAEAARTLEKLGDRRLLHDCQQMLMRLGGGTTVTSS

SEQ ID NO: 144017 - protein, 470 aa, Artificial Sequence
  derived and/or modified sequence
MDEPPFSEAALEQALGEPCDLDAALLTDIEDMLQLINNQDSDFPGLFDPPYAGSGAGGTDPASPDTSSPGSLSPPPATLSSSLEAFLSGPQAAPSPLSPPQPAPTPLKMYPSMPAFSPGPGIKEESVPLSILQTPTPQPLPGALLPQSFPAPAPPQFSSTPVLGYPSPPGGFSTGSPPGNTQQPLPGLPLASPPGVPPVSLHTQVQSVVPQQLLTVTAAPTAAPVTTTVTSQIQQVPVLLQPHFIKADSLLLTAMKTDGATVKAAGLSPLVSGTTVQTGPLPTLVSGGTILATVPLVVDAEKLPINRLAAGSKAPASAQSRGEKRTAHNAIEKRYRSSINDKIIELKDLVVGTEAKLNKSAVLRKAIDYIRFLQHSNQKLKQENLSLRTAVHKSKSLKDLVSACGSGGNTDVLMEGVKTEVEDTLTPPPSDAGSPFQSSPLSLGSRGSGSGGSGSDSEPDSPVFEDSKTE

SEQ ID NO: 144018 - DNA, 4922 bp, Artificial Sequence
  derived and/or modified sequence
agcagagctgcggccgggggaacccagtttccgaggaacttttcgccggcgccgggccgcctctgaggccagggcaggacacgaacgcgcggagcggcggcggcgactgagagccggggccgcggcggcgctccctaggaagggccgtacgaggcggcgggcccggcgggcctcccggaggaggcggctgcgccatggacgagccacccttcagcgaggcggctttggagcaggcgctgggcgagccgtgcgatctggacgcggcgctgctgaccgacatcgaagacatgcttcagcttatcaacaaccaagacagtgacttccctggcctatttgacccaccctatgctgggagtggggcagggggcacagaccctgccagccccgataccagctccccaggcagcttgtctccacctcctgccacattgagctcctctcttgaagccttcctgagcgggccgcaggcagcgccctcacccctgtcccctccccagcctgcacccactccattgaagatgtacccgtccatgcccgctttctcccctgggcctggtatcaaggaagagtcagtgccactgagcatcctgcagacccccaccccacagcccctgccaggggccctcctgccacagagcttcccagccccagccccaccgcagttcagctccacccctgtgttaggctaccccagccctccgggaggcttctctacaggaagccctcccgggaacacccagcagccgctgcctggcctgccactggcttccccgccaggggtcccgcccgtctccttgcacacccaggtccagagtgtggtcccccagcagctactgacagtcacagctgcccccacggcagcccctgtaacgaccactgtgacctcgcagatccagcaggtcccggtcctgctgcagccccacttcatcaaggcagactcgctgcttctgacagccatgaagacagacggagccactgtgaaggcggcaggtctcagtcccctggtctctggcaccactgtgcagacagggcctttgccgaccctggtgagtggcggaaccatcttggcaacagtcccactggtcgtagatgcggagaagctgcctatcaaccggctcgcagctggcagcaaggccccggcctctgcccagagccgtggagagaagcgcacagcccacaacgccattgagaagcgctaccgctcctccatcaatgacaaaatcattgagctcaaggatctggtggtgggcactgaggcaaagctgaataaatctgctgtcttgcgcaaggccatcgactacattcgctttctgcaacacagcaaccagaaactcaagcaggagaacctaagtctgcgcactgctgtccacaaaagcaaatctctgaaggatctggtgtcggcctgtggcagtggagggaacacagacgtgctcatggagggcgtgaagactgaggtggaggacacactgaccccacccccctcggatgctggctcacctttccagagcagccccttgtcccttggcagcaggggcagtggcagcggtggcagtggcagtgactcggagcctgacagcccagtctttgaggacagcaaggcaaagccagagcagcggccgtctctgcacagccggggcatgctggaccgctcccgcctggccctgtgcacgctcgtcttcctctgcctgtcctgcaaccccttggcctccttgctgggggcccgggggcttcccagcccctcagataccaccagcgtctaccatagccctgggcgcaacgtgctgggcaccgagagcagagatggccctggctgggcccagtggctgctgcccccagtggtctggctgctcaatgggctgttggtgctcgtctccttggtgcttctctttgtctacggtgagccagtcacacggccccactcaggccccgccgtgtacttctggaggcatcgcaagcaggctgacctggacctggcccggggagactttgcccaggctgcccagcagctgtggctggccctgcgggcactgggccggcccctgcccacctcccacctggacctggcttgtagcctcctctggaacctcatccgtcacctgctgcagcgtctctgggtgggccgctggctggcaggccgggcagggggcctgcagcaggactgtgctctgcgagtggatgctagcgccagcgcccgagacgcagccctggtctaccataagctgcaccagctgcacaccatggggaagcacacaggcgggcacctcactgccaccaacctggcgctgagtgccctgaacctggcagagtgtgcaggggatgccgtgtctgtggcgacgctggccgagatctatgtggcggctgcattgagagtgaagaccagtctcccacgggccttgcattttctgacacgcttcttcctgagcagtgcccgccaggcctgcctggcacagagtggctcagtgcctcctgccatgcagtggctctgccaccccgtgggccaccgtttcttcgtggatggggactggtccgtgctcagtaccccatgggagagcctgtacagcttggccgggaacccagtggaccccctggcccaggtgactcagctattccgggaacatctcttagagcgagcactgaactgtgtgacccagcccaaccccagccctgggtcagctgatggggacaaggaattctcggatgccctcgggtacctgcagctgctgaacagctgttctgatgctgcgggggctcctgcctacagcttctccatcagttccagcatggccaccaccaccggcgtagacccggtggccaagtggtgggcctctctgacagctgtggtgatccactggctgcggcgggatgaggaggcggctgagcggctgtgcccgctggtggagcacctgccccgggtgctgcaggagtctgagagacccctgcccagggcagctctgcactccttcaaggctgcccgggccctgctgggctgtgccaaggcagagtctggtccagccagcctgaccatctgtgagaaggccagtgggtacctgcaggacagcctggctaccacaccagccagcagctccattgacaaggccgtgcagctgttcctgtgtgacctgcttcttgtggtgcgcaccagcctgtggcggcagcagcagcccccggccccggccccagcagcccagggcaccagcagcaggccccaggcttccgcccttgagctgcgtggcttccaacgggacctgagcagcctgaggcggctggcacagagcttccggcccgccatgcggagggtgttcctacatgaggccacggcccggctgatggcgggggccagccccacacggacacaccagctcctcgaccgcagtctgaggcggcgggcaggccccggtggcaaaggaggcgcggtggcggagctggagccgcggcccacgcggcgggagcacgcggaggccttgctgctggcctcctgctacctgccccccggcttcctgtcggcgcccgggcagcgcgtgggcatgctggctgaggcggcgcgcacactcgagaagcttggcgatcgccggctgctgcacgactgtcagcagatgctcatgcgcctgggcggtgggaccactgtcacttccagctagaccccgtgtccccggcctcagcacccctgtctctagccactttggtcccgtgcagcttctgtcctgcgtcgaagctttgaaggccgaaggcagtgcaagagactctggcctccacagttcgacctgcggctgctgtgtgccttcgcggtggaaggcccgaggggcgcgatcttgaccctaagaccggcggccatgatggtgctgacctctggtggccgatcggggcactgcaggggccgagccattttggggggcccccctccttgctctgcaggcaccttagtggcttttttcctcctgtgtacagggaagagaggggtacatttccctgtgctgacggaagccaacttggctttcccggactgcaagcagggctctgccccagaggcctctctctccgtcgtgggagagagacgtgtacatagtgtaggtcagcgtgcttagcctcctgacctgaggctcctgtgctactttgccttttgcaaactttattttcatagattgagaagttttgtacagagaattaaaaatgaaattatttataatctgggttttgtgtcttcagctgatggatgtgctgactagtgagagtgcttgggccctcccccagcacctagggaaaggcttcccctccccctccggccacaaggtacacaacttttaacttagctcttcccgatgtttgtttgttagtgggaggagtggggagggctggctgtatggcctccagcctacctgttccccctgctcccagggcacatggttgggctgtgtcaacccttagggcctccatggggtcagttgtcccttctcacctcccagctctgtccccatcaggtccctgggtggcacgggaggatggactgacttccaggacctgttgtgtgacaggagctacagcttgggtctccctgcaagaagtctggcacgtctcacctcccccatcccggcccctggtcatctcacagcaaagaagcctcctccctcccgacctgccgccacactggagagggggcacaggggcgggggaggtttcctgttctgtgaaaggccgactccctgactccattcatgcccccccccccagcccctcccttcattcccattccccaacctaaagcctggcccggctcccagctgaatctggtcggaatccacgggctgcagattttccaaaacaatcgttgtatctttattgacttttttttttttttttttctgaatgcaatgactgttttttactcttaaggaaaataaacatcttttagaaacaaaaaaaaaaaa

SEQ ID NO: 144019 - DNA, 3444 bp, Artificial Sequence
  derived and/or modified sequence
atggacgagccccccttcagcgaggccgccctggagcaggccctgggcgagccctgcgacctggacgccgccctgctgaccgacatcgaggacatgctgcagctgatcaacaaccaggacagcgacttccccggcctgttcgaccccccctacgccggcagcggcgccggcggcaccgaccccgccagccccgacaccagcagccccggcagcctgagccccccccccgccaccctgagcagcagcctggaggccttcctgagcggcccccaggccgcccccagccccctgagccccccccagcccgcccccacccccctgaagatgtaccccagcatgcccgccttcagccccggccccggcatcaaggaggagagcgtgcccctgagcatcctgcagacccccaccccccagcccctgcccggcgccctgctgccccagagcttccccgcccccgcccccccccagttcagcagcacccccgtgctgggctaccccagcccccccggcggcttcagcaccggcagcccccccggcaacacccagcagcccctgcccggcctgcccctggccagcccccccggcgtgccccccgtgagcctgcacacccaggtgcagagcgtggtgccccagcagctgctgaccgtgaccgccgcccccaccgccgcccccgtgaccaccaccgtgaccagccagatccagcaggtgcccgtgctgctgcagccccacttcatcaaggccgacagcctgctgctgaccgccatgaagaccgacggcgccaccgtgaaggccgccggcctgagccccctggtgagcggcaccaccgtgcagaccggccccctgcccaccctggtgagcggcggcaccatcctggccaccgtgcccctggtggtggacgccgagaagctgcccatcaacagactggccgccggcagcaaggcccccgccagcgcccagagcagaggcgagaagagaaccgcccacaacgccatcgagaagagatacagaagcagcatcaacgacaagatcatcgagctgaaggacctggtggtgggcaccgaggccaagctgaacaagagcgccgtgctgagaaaggccatcgactacatcagattcctgcagcacagcaaccagaagctgaagcaggagaacctgagcctgagaaccgccgtgcacaagagcaagagcctgaaggacctggtgagcgcctgcggcagcggcggcaacaccgacgtgctgatggagggcgtgaagaccgaggtggaggacaccctgacccccccccccagcgacgccggcagccccttccagagcagccccctgagcctgggcagcagaggcagcggcagcggcggcagcggcagcgacagcgagcccgacagccccgtgttcgaggacagcaaggccaagcccgagcagagacccagcctgcacagcagaggcatgctggacagaagcagactggccctgtgcaccctggtgttcctgtgcctgagctgcaaccccctggccagcctgctgggcgccagaggcctgcccagccccagcgacaccaccagcgtgtaccacagccccggcagaaacgtgctgggcaccgagagcagagacggccccggctgggcccagtggctgctgccccccgtggtgtggctgctgaacggcctgctggtgctggtgagcctggtgctgctgttcgtgtacggcgagcccgtgaccagaccccacagcggccccgccgtgtacttctggagacacagaaagcaggccgacctggacctggccagaggcgacttcgcccaggccgcccagcagctgtggctggccctgagagccctgggcagacccctgcccaccagccacctggacctggcctgcagcctgctgtggaacctgatcagacacctgctgcagagactgtgggtgggcagatggctggccggcagagccggcggcctgcagcaggactgcgccctgagagtggacgccagcgccagcgccagagacgccgccctggtgtaccacaagctgcaccagctgcacaccatgggcaagcacaccggcggccacctgaccgccaccaacctggccctgagcgccctgaacctggccgagtgcgccggcgacgccgtgagcgtggccaccctggccgagatctacgtggccgccgccctgagagtgaagaccagcctgcccagagccctgcacttcctgaccagattcttcctgagcagcgccagacaggcctgcctggcccagagcggcagcgtgccccccgccatgcagtggctgtgccaccccgtgggccacagattcttcgtggacggcgactggagcgtgctgagcaccccctgggagagcctgtacagcctggccggcaaccccgtggaccccctggcccaggtgacccagctgttcagagagcacctgctggagagagccctgaactgcgtgacccagcccaaccccagccccggcagcgccgacggcgacaaggagttcagcgacgccctgggctacctgcagctgctgaacagctgcagcgacgccgccggcgcccccgcctacagcttcagcatcagcagcagcatggccaccaccaccggcgtggaccccgtggccaagtggtgggccagcctgaccgccgtggtgatccactggctgagaagagacgaggaggccgccgagagactgtgccccctggtggagcacctgcccagagtgctgcaggagagcgagagacccctgcccagagccgccctgcacagcttcaaggccgccagagccctgctgggctgcgccaaggccgagagcggccccgccagcctgaccatctgcgagaaggccagcggctacctgcaggacagcctggccaccacccccgccagcagcagcatcgacaaggccgtgcagctgttcctgtgcgacctgctgctggtggtgagaaccagcctgtggagacagcagcagccccccgcccccgcccccgccgcccagggcaccagcagcagaccccaggccagcgccctggagctgagaggcttccagagagacctgagcagcctgagaagactggcccagagcttcagacccgccatgagaagagtgttcctgcacgaggccaccgccagactgatggccggcgccagccccaccagaacccaccagctgctggacagaagcctgagaagaagagccggccccggcggcaagggcggcgccgtggccgagctggagcccagacccaccagaagagagcacgccgaggccctgctgctggccagctgctacctgccccccggcttcctgagcgcccccggccagagagtgggcatgctggccgaggccgccagaaccctggagaagctgggcgacagaagactgctgcacgactgccagcagatgctgatgagactgggcggcggcaccaccgtgaccagcagctag

SEQ ID NO: 144020 - DNA, 3216 bp, Artificial Sequence
  derived and/or modified sequence
atggacgagccccccttcagcgaggccgccctggagcaggccctgggcgagccctgcgacctggacgccgccctgctgaccgacatcgaggacatgctgcagctgatcaacaaccaggacagcgacttccccggcctgttcgaccccccctacgccggcagcggcgccggcggcaccgaccccgccagccccgacaccagcagccccggcagcctgagccccccccccgccaccctgagcagcagcctggaggccttcctgagcggcccccaggccgcccccagccccctgagccccccccagcccgcccccacccccctgaagatgtaccccagcatgcccgccttcagccccggccccggcatcaaggaggagagcgtgcccctgagcatcctgcagacccccaccccccagcccctgcccggcgccctgctgccccagagcttccccgcccccgcccccccccagttcagcagcacccccgtgctgggctaccccagcccccccggcggcttcagcaccggcagcccccccggcaacacccagcagcccctgcccggcctgcccctggccagcccccccggcgtgccccccgtgagcctgcacacccaggtgcagagcgtggtgccccagcagctgctgaccgtgaccgccgcccccaccgccgcccccgtgaccaccaccgtgaccagccagatccagcaggtgcccgtgctgctgcagccccacttcatcaaggccgacagcctgctgctgaccgccatgaagaccgacggcgccaccgtgaaggccgccggcctgagccccctggtgagcggcaccaccgtgcagaccggccccctgcccaccctggtgagcggcggcaccatcctggccaccgtgcccctggtggtggacgccgagaagctgcccatcaacagactggccgccggcagcaaggcccccgccagcgcccagagcagaggcgagaagagaaccgcccacaacgccatcgagaagagatacagaagcagcatcaacgacaagatcatcgagctgaaggacctggtggtgggcaccgaggccaagctgaacaagagcgccgtgctgagaaaggccatcgactacatcagattcctgcagcacagcaaccagaagctgaagcaggagaacctgagcctgagaaccgccgtgcacaagagcaagagcctgaaggacctggtgagcgcctgcggcagcggcggcaacaccgacgtgctgatggagggcgtgaagaccgaggtggaggacaccctgacccccccccccagcgacgccggcagccccttccagagcagccccctgagcctgggcagcagaggcagcggcagcggcggcagcggcagcgacagcgagcccgacagccccgtgttcgaggacagcaaggccaagcccgagcagagacccagcctgcacagcagaggcatgctggacagaagcagactggccctgtgcaccctggtgttcctgtgcctgagctgcaaccccctggccagcctgctgggcgccagaggcctgcccagccccagcgacaccaccagcgtgtaccacagccccggcagaaacgtgctgggcaccgagagcagagacggccccggctgggcccagtggctgctgccccccgtggtgtggctgctgaacggcctgctggtgctggtgagcctggtgctgctgttcgtgtacggcgagcccgtgaccagaccccacagcggccccgccgtgtacttctggagacacagaaagcaggccgacctggacctggccagaggcgacttcgcccaggccgcccagcagctgtggctggccctgagagccctgggcagacccctgcccaccagccacctggacctggcctgcagcctgctgtggaacctgatcagacacctgctgcagagactgtgggtgggcagatggctggccggcagagccggcggcctgcagcaggactgcgccctgagagtggacgccagcgccagcgccagagacgccgccctggtgtaccacaagctgcaccagctgcacaccatgggcaagcacaccggcggccacctgaccgccaccaacctggccctgagcgccctgaacctggccgagtgcgccggcgacgccgtgagcgtggccaccctggccgagatctacgtggccgccgccctgagagtgaagaccagcctgcccagagccctgcacttcctgaccagattcttcctgagcagcgccagacaggcctgcctggcccagagcggcagcgtgccccccgccatgcagtggctgtgccaccccgtgggccacagattcttcgtggacggcgactggagcgtgctgagcaccccctgggagagcctgtacagcctggccggcaaccccgtggaccccctggcccaggtgacccagctgttcagagagcacctgctggagagagccctgaactgcgtgacccagcccaaccccagccccggcagcgccgacggcgacaaggagttcagcgacgccctgggctacctgcagctgctgaacagctgcagcgacgccgccggcgcccccgcctacagcttcagcatcagcagcagcatggccaccaccaccggcgtggaccccgtggccaagtggtgggccagcctgaccgccgtggtgatccactggctgagaagagacgaggaggccgccgagagactgtgccccctggtggagcacctgcccagagtgctgcaggagagcgagagacccctgcccagagccgccctgcacagcttcaaggccgccagagccctgctgggctgcgccaaggccgagagcggccccgccagcctgaccatctgcgagaaggccagcggctacctgcaggacagcctggccaccacccccgccagcagcagcatcgacaaggccgtgcagctgttcctgtgcgacctgctgctggtggtgagaaccagcctgtggagacagcagcagccccccgcccccgcccccgccgcccagggcaccagcagcagaccccaggccagcgccctggagctgagaggcttccagagagacctgagcagcctgagaagactggcccagagcttcagacccgccatgagaagactgatggacgtgctgaccagcgagagcgcctgggccctgccccagcacctgggcaagggcttccccagccccagcggccacaaggtgcccggctggcacggcagaatggactag

SEQ ID NO: 144021 - DNA, 1413 bp, Artificial Sequence
  derived and/or modified sequence
atggacgagccccccttcagcgaggccgccctggagcaggccctgggcgagccctgcgacctggacgccgccctgctgaccgacatcgaggacatgctgcagctgatcaacaaccaggacagcgacttccccggcctgttcgaccccccctacgccggcagcggcgccggcggcaccgaccccgccagccccgacaccagcagccccggcagcctgagccccccccccgccaccctgagcagcagcctggaggccttcctgagcggcccccaggccgcccccagccccctgagccccccccagcccgcccccacccccctgaagatgtaccccagcatgcccgccttcagccccggccccggcatcaaggaggagagcgtgcccctgagcatcctgcagacccccaccccccagcccctgcccggcgccctgctgccccagagcttccccgcccccgcccccccccagttcagcagcacccccgtgctgggctaccccagcccccccggcggcttcagcaccggcagcccccccggcaacacccagcagcccctgcccggcctgcccctggccagcccccccggcgtgccccccgtgagcctgcacacccaggtgcagagcgtggtgccccagcagctgctgaccgtgaccgccgcccccaccgccgcccccgtgaccaccaccgtgaccagccagatccagcaggtgcccgtgctgctgcagccccacttcatcaaggccgacagcctgctgctgaccgccatgaagaccgacggcgccaccgtgaaggccgccggcctgagccccctggtgagcggcaccaccgtgcagaccggccccctgcccaccctggtgagcggcggcaccatcctggccaccgtgcccctggtggtggacgccgagaagctgcccatcaacagactggccgccggcagcaaggcccccgccagcgcccagagcagaggcgagaagagaaccgcccacaacgccatcgagaagagatacagaagcagcatcaacgacaagatcatcgagctgaaggacctggtggtgggcaccgaggccaagctgaacaagagcgccgtgctgagaaaggccatcgactacatcagattcctgcagcacagcaaccagaagctgaagcaggagaacctgagcctgagaaccgccgtgcacaagagcaagagcctgaaggacctggtgagcgcctgcggcagcggcggcaacaccgacgtgctgatggagggcgtgaagaccgaggtggaggacaccctgacccccccccccagcgacgccggcagccccttccagagcagccccctgagcctgggcagcagaggcagcggcagcggcggcagcggcagcgacagcgagcccgacagccccgtgttcgaggacagcaagaccgagtag

SEQ ID NO: 144022 - DNA, 3444 bp, Artificial Sequence
  derived and/or modified sequence
atggacgaacccccgttttccgaggctgctctagaacaggcactgggcgaaccatgcgacctggatgccgcgctcctcacagacattgaggacatgctgcaactgatcaataatcaggactcagacttcccgggcctgtttgatccgccatatgcggggagcggagcaggcggaaccgatccggcctctcctgatacttcgtcccccggatccctgtccccccccccagcaaccctgagctcctccctggaagccttcctttcaggacctcaggccgccccaagccccctgagcccccctcagccggcacctaccccactgaagatgtacccctccatgcctgccttctcccccgggccgggaatcaaagaagaatcagtaccattgtctatattacagacacccactcctcagcctttgccaggcgctttactccctcagtccttccctgccccagccccaccgcagttttctagcactcccgtgcttgggtacccctctccacccgggggcttttctaccgggtcccctcccggaaatacacagcagccgctcccaggcctccctctcgccagtccccctggagtcccccctgtgagcctgcacacgcaggtgcagagcgtcgtcccccagcagcttctcaccgtgacagccgctcctaccgccgccccggtgacaacgaccgtgaccagtcagattcagcaggtaccagttctgttgcagccccactttataaaggccgactcccttcttctcaccgccatgaagaccgatggcgccacagttaaagcagcaggcctcagtccactggtatcagggactactgtacaaacagggcccttgccaactctcgtaagcggcgggaccattttggcgacagttcctctcgtggttgacgccgagaaactgcccatcaatcggttagcagccggttcaaaggcccctgcatcagcacagagtcgcggagaaaagaggaccgcacacaatgctattgagaaaagatataggagctcaatcaacgataaaattattgaactgaaggatttagtggtgggcaccgaggcaaagctgaataagtccgccgtgttgaggaaggccattgattacatcagatttttacagcattcaaaccagaaactgaagcaggaaaacctttctttgaggacagccgtgcataagagcaagagcctgaaagacctagtcagtgcctgcggtagcggcggaaacacagacgtcctgatggaaggagttaagacggaggtagaagacacgctgacacctccaccctcagatgcggggtcgcctttccagtcctccccactatccctggggtcaagaggctccggcagtggaggctctgggagcgatagcgaaccagattcccccgtgttcgaggattccaaagctaagcctgagcagcggccttcactccactcccggggaatgctggaccgcagcaggctagctctctgtacacttgtttttctgtgtttatcttgcaatccattggcgtcccttctcggagcacgtggtcttccctcgcctagcgacactacatccgtttatcactcccccggacgaaatgtgcttggtacagaatcccgcgatggtcccgggtgggcccagtggctcttgcctcccgtcgtttggctgcttaacgggcttctggttctcgtgagcctcgtgctgttgttcgtatatggtgaaccagtcacacggccgcacagcggccctgccgtttacttctggcgccatcgcaagcaggccgatttggacctggcaaggggggatttcgcacaggccgcacagcagctctggctcgctttaagagctttgggacgccctctgccgaccagtcatctggacctggcttgtagtctgttatggaacctgataaggcacttgctccagaggctgtgggttggacgctggctggccgggagagctggtggcctgcagcaggactgcgccctgagagtggatgccagcgcctctgcccgcgacgctgctttggtgtaccacaagttgcaccagctccacactatggggaagcacactggcgggcacctgactgctacgaatctagcactctccgccctgaatctcgctgaatgtgcgggagatgctgtttccgtcgccactctggcggagatctatgtcgccgccgccctccgagtgaaaacttccctgcccagggcacttcactttctcacacgcttttttctctccagtgcgagacaggcttgtctagctcagtcaggaagtgtcccaccagcaatgcagtggctgtgtcatcccgtgggtcaccgattctttgtggatggggattggtctgtcctaagcacaccgtgggaatccctgtattccttggctggaaaccctgtggaccctttggcccaggtgacccagctcttcagggaacacctgcttgagagagcattgaactgcgtgacacagcctaatccctccccaggatctgccgatggagacaaagaattcagcgatgcactgggttatcttcagctgctgaattcttgcagcgacgcggctggggcaccagcatacagtttcagcatttccagctcaatggcaaccactaccggggtggatcctgtcgccaagtggtgggcttctttgacagcggttgtgattcattggctgcggagagatgaagaggcagcagaaagactctgtccccttgtggagcacctacccagagtcctgcaagagtcagagcggcccctccctcgggccgcgctgcacagcttcaaagccgcccgcgccttactgggatgtgccaaggcagagtcggggcctgcctcactgaccatatgcgagaaagctagtggatatctccaggattcactggccactactcccgcgtcatccagtatcgacaaagccgttcagctgtttctttgcgatctgctcctggttgtccgcactagcctgtggaggcagcagcagccccctgcgcctgcccccgcagctcagggcacctctagtcgaccacaggcctctgccctcgaactcagaggattccagcgggacttgagcagcctccggcgattagcacagtcatttaggcctgccatgcggcgggtcttcctccacgaagccaccgccaggcttatggctggcgcttctcccacaaggacacaccagttgttagaccgaagtcttcgtcggagagcaggtccaggcggtaaaggaggggccgttgcagagctagaaccacggcccacacgtcgcgagcacgctgaggctctactgttggcttcatgctatctgccccctgggttcctaagcgcccctggacagagagttgggatgctcgcagaggccgcgagaaccctggaaaagcttggtgatcggagactgcttcacgattgtcagcaaatgctcatgagactgggcggagggaccacagtaacttcatcctag

SEQ ID NO: 144023 - DNA, 3216 bp, Artificial Sequence
  derived and/or modified sequence
atggacgagccccccttttcagaagccgccttggaacaggccctgggagaaccgtgtgacctggacgccgccctgctgactgacattgaggacatgctccagctgataaacaatcaagattccgactttccgggtctctttgaccctccatatgcggggagcggagcaggcggcaccgatcctgcttcgccggatacgagctctcctggatccttgagtccacctcccgccacactgtcatcctccctcgaggcctttctaagtggaccccaggctgcccccagtcctctctcccccccccagcccgccccaacgccattaaaaatgtacccctctatgccagcttttagcccaggacccgggattaaagaggagtccgtaccactcagcatcctccagacacctacaccacagccattgcctggcgcactcctcccgcagtcgtttccggcccctgcccccccacaattttcttcaacaccagtcctgggctatccctcgccaccaggaggattctctacaggatccccacctggtaacacacagcagcccctaccagggctgcctcttgcttcgccgccgggggtgccacccgtatccttacacacccaggtccagagcgttgtccctcagcagctgctgactgtcacagccgctcctacagccgctcccgtgactacaacagtgactagtcagatccagcaggttcctgtactgctgcagcctcacttcattaaggctgactcgctgctgttgacagcgatgaagacagatggagcaaccgtgaaagctgctggcctgagcccacttgtttcagggacaactgtgcaaaccgggcccctccccacactggtcagtgggggcacaatactggccaccgtgcccttagtggtggacgccgagaaattgcccattaacagactggctgccgggagtaaggcccctgcatcagcgcaaagccggggcgagaagcggactgctcataacgccattgaaaaaagatatagaagctctatcaatgataaaattatcgagctgaaagacctggtggtcggaaccgaggccaagctgaataaaagcgccgtgctgaggaaggctattgattacattcgcttcttacagcattctaatcaaaaactaaaacaggagaacctttccttacgtacagccgtccacaagtcaaagtccctgaaagacctggtgtccgcctgcggcagtggaggaaatacagacgtacttatggagggagtgaaaacagaggtggaagataccctaactccgcccccctcggatgccggttcaccctttcagtcgagccccctaagccttggaagccggggtagtggttccggaggaagcggatccgatagtgaaccggattctcctgtgtttgaggattcgaaggcaaaacctgagcagcggccgtcgctgcattcacgaggcatgctcgacagatctagactggcactgtgtaccctggtcttcctatgcctaagctgtaacccattggctagcctgcttggtgctcgagggctgccaagtccctcagacaccaccagcgtgtatcattccccaggtcggaatgtactggggaccgagtccagagacggccctggctgggctcagtggctactgccacccgtcgtgtggctcctgaatggattgcttgtgctcgtttccctagtcctgctttttgtctatggtgaaccggtaacccgacctcactccggaccagccgtgtacttctggagacataggaagcaggccgacttagatctcgcccgcggtgattttgctcaagcggcccagcagttgtggctggctctacgggccctcgggcgaccccttcccactagccacctggatctggcgtgttccttactgtggaatctgattcgccacctccttcagaggttgtgggttggaagatggctcgctggcagagccggcggcctccaacaggattgtgctctgcgggtggatgctagcgcatctgccagggatgcagctctggtgtaccataagttacaccagctgcataccatgggcaaacacaccggtgggcacctcacagcaactaaccttgcgttgtccgctctcaatcttgctgaatgcgcgggagatgcggtctccgtagctactctggcagagatctacgttgcggctgcactcagggtgaagaccagtctgccccgggcactgcatttcctcacccggttcttcctctcctcagctaggcaggcatgtctggcccagtctggaagcgttccacccgctatgcagtggctctgtcatccagtaggccacaggttctttgtcgacggtgactggtcagtgctctcaacaccatgggagtcgctgtattctctcgcaggtaaccccgtggacccgctggcacaagtgacccagctattcagagagcatcttctcgagagagccttaaactgcgtgactcagcccaacccaagccccggctcagcagatggtgacaaggagttcagcgacgcacttggatatctgcagcttctcaacagttgttccgatgctgccggagcccctgcctactccttctctatttccagctccatggccaccaccaccggtgttgacccagtagctaaatggtgggcgagcctgacagccgttgtgattcattggcttcgcagagatgaagaggctgctgaaaggctgtgtcccctcgttgagcatttacctcgggttcttcaagagagtgagagaccactgccccgcgcagctctgcacagctttaaagcagctcgagccctcctgggctgtgcgaaggcagaaagcgggcccgcttcactgaccatatgcgaaaaggcaagtggttatctgcaggattcgctggctaccacacccgcttctagcagtattgacaaggccgttcaactgttcctatgtgacctcctcctggtcgtgcgtacgagtttatggagacaacagcagcctcccgccccagcgcccgcagctcagggaacaagtagcagaccacaggcgtctgctctagaactgaggggctttcaacgcgatctgagctccctgcgtcgcctcgcccagagcttcaggcccgccatgagacggctcatggacgttctgacaagtgagtcagcgtgggccctgccacaacacctcgggaaggggtttccatccccctctggccacaaggtgccgggctggcatggccgaatggattag

SEQ ID NO: 144024 - DNA, 1413 bp, Artificial Sequence
  derived and/or modified sequence
atggatgagccccctttctctgaggccgccctggagcaagccctgggagaaccatgtgacctagatgcagccctcctgactgatatcgaggacatgctccaattaatcaataatcaggacagcgactttccaggtcttttcgatccgccttacgccggctcaggcgcaggaggtaccgaccccgcctcgcccgacactagctcacccggatcactgagtccacctccagccactctgagctcctcgctggaagcttttttatccggcccccaagctgctccatccccattgagccccccacagccagccccaacccctttgaaaatgtatcctagcatgccagctttttcaccaggcccagggatcaaggaggagtctgtcccgttgtccatccttcaaaccccgacaccacagccactccctggtgctctgctgccgcagtctttccccgcaccggcccccccccagttctcttcaactccagtgttgggatacccatccccacctggagggttctctaccggtagccctccaggaaacacacagcagcctcttccggggctcccccttgcgtccccacccggcgtgccaccagtgtctctccatacccaggtacagtctgtggtgccgcagcaactgctaacggtcactgccgctcccaccgctgctccagtgaccacaaccgtcacaagccagatccagcaggtgccagtgctcctgcaacctcatttcattaaggcagactccttgcttctgacagcgatgaaaaccgacggcgcaactgttaaggcagctggactgagccctttagtttctgggacaactgtgcagactggccccctgcctactttggtctccggtggcacgattttggctacggtacccctcgtggtcgatgcagaaaagctgccaattaatcggttggccgccggatcaaaagcgcctgcctcagcacaaagcagaggcgaaaagagaaccgcccacaacgcaattgagaagcggtaccggagtagcattaacgataaaattattgaactgaaggacctcgtggtgggcaccgaggcaaagcttaataaaagcgcagtcctgcggaaggccattgactatatcaggttcctgcagcattcaaatcaaaagcttaaacaagagaaccttagcctccgaaccgctgtgcataagtcgaagagtctgaaagacctggtctccgcctgcggcagcgggggcaacacagatgtactaatggaaggtgtcaagaccgaggtcgaggacacgctaacaccccccccttccgacgctggtagcccattccagtcatcaccgctgtcgctgggaagtagggggtctggatccggaggcagtggatcagattctgaaccagacagccccgtgttcgaagacagtaaaacggagtag

SEQ ID NO: 144025 - DNA, 3444 bp, Artificial Sequence
  derived and/or modified sequence
atggatgagccccccttcagcgaggccgccctggagcaggccctgggggagccctgtgacctggatgctgccctgctgacagacatcgaggacatgctgcagctgatcaacaaccaggacagcgacttccctggcctgtttgatcctccctatgccggcagcggggccggcggcacagatcctgccagcccagacaccagcagccctggcagcctgagccccccaccagccaccctgagcagcagcctggaggccttcctgagcggcccccaggccgcccccagccccctgagccccccccagcctgcccccacccccctgaagatgtaccccagcatgcctgccttcagccctggccctggcatcaaggaggagagcgtgcccctgagcatcctgcagacccccaccccccagcccctgcccggggccctgctgccccagagcttccctgccccagccccaccccagttcagcagcacccctgtgctgggctaccccagccccccaggcggcttcagcacaggcagccccccaggcaacacccagcagcccctgcccggcctgcccctggccagccccccaggagtgccccctgtgtccctgcacacccaggtgcagagcgtggtgccccagcagctgctgactgtgacagctgcccccacagctgcccctgtgaccaccaccgtgaccagccagatccagcaggtgcctgtgctgctgcagccccacttcatcaaggctgacagcctgctgctgacagccatgaagacagatggagccaccgtgaaggctgctggcctgagccccctggtgtctggcaccaccgtgcagacaggccccctgcccaccctggtgtctgggggcaccatcctggccaccgtgcccctggtggtggatgctgagaagctgcccatcaaccggctggccgccggcagcaaggccccagccagcgcccagagcagaggagagaagaggacagcccacaatgccatcgagaagcgctaccgcagcagcatcaatgacaagatcatcgagctgaaggacctggtggtgggcacagaggccaagctgaacaagtctgctgtgctgaggaaggccatcgactacatccgcttcctgcagcacagcaaccagaagctgaagcaggagaacctgagcctgaggacagctgtgcacaagagcaagagcctgaaggacctggtgtctgcctgtggcagcggcggcaacacagatgtgctgatggagggcgtgaagacagaggtggaggacaccctgaccccaccacccagtgatgctggcagccccttccagagcagccccctgagcctgggcagccggggcagcggcagcggcggcagcggcagtgacagcgagccagacagccctgtgtttgaggacagcaaggccaagccagagcagaggcccagcctgcacagccggggcatgctggacaggagccggctggccctgtgcaccctggtgttcctgtgcctgagctgcaaccccctggccagcctgctgggcgcccggggcctgcccagccccagcgacaccacctctgtgtaccacagccctggaagaaatgtgctgggcacagagagcagagatggccctggctgggcccagtggctgctgccccctgtggtgtggctgctgaatggcctgctggtgctggtgtccctggtgctgctgtttgtgtatggagagcctgtgacccggccccacagcggccctgctgtgtacttctggaggcacaggaagcaggccgacctggacctggcccggggggactttgcccaggccgcccagcagctgtggctggccctgcgggccctgggccggcccctgcccaccagccacctggacctggcctgcagcctgctgtggaacctgatccgccacctgctgcagaggctgtgggtgggccgctggctggccggccgggccggcggcctgcagcaggactgtgccctgcgggtggatgccagcgccagcgccagagatgctgccctggtgtaccacaagctgcaccagctgcacaccatgggcaagcacactggaggccacctgacagccaccaacctggccctgagcgccctgaacctggccgagtgtgctggagatgctgtgtctgtggccaccctggccgagatctacgtggccgccgccctgcgggtgaagaccagcctgccccgggccctgcacttcctgacccgcttcttcctgagcagcgcccggcaggcctgcctggcccagagcggctctgtgcccccagccatgcagtggctgtgccaccctgtgggccaccgcttctttgtggatggagactggagcgtgctgagcaccccctgggagagcctgtacagcctggccggcaaccctgtggaccccctggcccaggtgacccagctgttccgggagcacctgctggagcgggccctgaactgtgtgacccagcccaaccccagccctggcagcgcagatggagacaaggagttcagtgatgccctgggctacctgcagctgctgaacagctgcagtgatgctgctggggccccagcctacagcttcagcatcagcagctccatggccaccaccactggagtggaccctgtggccaagtggtgggccagcctgacagctgtggtgatccactggctgcggagagatgaggaggccgctgagcggctgtgccccctggtggagcacctgccccgggtgctgcaggagagcgagcggcccctgccccgggccgccctgcacagcttcaaggccgcccgggccctgctgggctgtgccaaggccgagagcggccctgccagcctgaccatctgtgagaaggccagcggctacctgcaggacagcctggccaccaccccagccagcagcagcattgacaaggctgtgcagctgttcctgtgtgacctgctgctggtggtgaggaccagcctgtggaggcagcagcagcccccagccccagccccagctgcccagggcaccagcagccggccccaggccagcgccctggagctgcggggcttccagagggacctgagcagcctgcggcggctggcccagagcttccggcctgccatgagaagagtcttcctgcacgaggccacagcccggctgatggccggggccagccccaccaggacccaccagctgctggacaggagcctgcggaggagagctggccctgggggcaagggcggcgctgtggccgagctggagccccggcccacccggcgggagcacgccgaggccctgctgctggccagctgctacctgcccccaggcttcctgagcgcccctggccagagggtgggcatgctggccgaggccgcccggaccctggagaagctgggggaccggcggctgctgcatgactgccagcagatgctgatgaggctgggcggcggcaccaccgtgaccagcagctag

SEQ ID NO: 144026 - DNA, 3216 bp, Artificial Sequence
  derived and/or modified sequence
atggatgagccccccttcagcgaggccgccctggagcaggccctgggggagccctgtgacctggatgctgccctgctgacagacatcgaggacatgctgcagctgatcaacaaccaggacagcgacttccctggcctgtttgatcctccctatgccggcagcggggccggcggcacagatcctgccagcccagacaccagcagccctggcagcctgagccccccaccagccaccctgagcagcagcctggaggccttcctgagcggcccccaggccgcccccagccccctgagccccccccagcctgcccccacccccctgaagatgtaccccagcatgcctgccttcagccctggccctggcatcaaggaggagagcgtgcccctgagcatcctgcagacccccaccccccagcccctgcccggggccctgctgccccagagcttccctgccccagccccaccccagttcagcagcacccctgtgctgggctaccccagccccccaggcggcttcagcacaggcagccccccaggcaacacccagcagcccctgcccggcctgcccctggccagccccccaggagtgccccctgtgtccctgcacacccaggtgcagagcgtggtgccccagcagctgctgactgtgacagctgcccccacagctgcccctgtgaccaccaccgtgaccagccagatccagcaggtgcctgtgctgctgcagccccacttcatcaaggctgacagcctgctgctgacagccatgaagacagatggagccaccgtgaaggctgctggcctgagccccctggtgtctggcaccaccgtgcagacaggccccctgcccaccctggtgtctgggggcaccatcctggccaccgtgcccctggtggtggatgctgagaagctgcccatcaaccggctggccgccggcagcaaggccccagccagcgcccagagcagaggagagaagaggacagcccacaatgccatcgagaagcgctaccgcagcagcatcaatgacaagatcatcgagctgaaggacctggtggtgggcacagaggccaagctgaacaagtctgctgtgctgaggaaggccatcgactacatccgcttcctgcagcacagcaaccagaagctgaagcaggagaacctgagcctgaggacagctgtgcacaagagcaagagcctgaaggacctggtgtctgcctgtggcagcggcggcaacacagatgtgctgatggagggcgtgaagacagaggtggaggacaccctgaccccaccacccagtgatgctggcagccccttccagagcagccccctgagcctgggcagccggggcagcggcagcggcggcagcggcagtgacagcgagccagacagccctgtgtttgaggacagcaaggccaagccagagcagaggcccagcctgcacagccggggcatgctggacaggagccggctggccctgtgcaccctggtgttcctgtgcctgagctgcaaccccctggccagcctgctgggcgcccggggcctgcccagccccagcgacaccacctctgtgtaccacagccctggaagaaatgtgctgggcacagagagcagagatggccctggctgggcccagtggctgctgccccctgtggtgtggctgctgaatggcctgctggtgctggtgtccctggtgctgctgtttgtgtatggagagcctgtgacccggccccacagcggccctgctgtgtacttctggaggcacaggaagcaggccgacctggacctggcccggggggactttgcccaggccgcccagcagctgtggctggccctgcgggccctgggccggcccctgcccaccagccacctggacctggcctgcagcctgctgtggaacctgatccgccacctgctgcagaggctgtgggtgggccgctggctggccggccgggccggcggcctgcagcaggactgtgccctgcgggtggatgccagcgccagcgccagagatgctgccctggtgtaccacaagctgcaccagctgcacaccatgggcaagcacactggaggccacctgacagccaccaacctggccctgagcgccctgaacctggccgagtgtgctggagatgctgtgtctgtggccaccctggccgagatctacgtggccgccgccctgcgggtgaagaccagcctgccccgggccctgcacttcctgacccgcttcttcctgagcagcgcccggcaggcctgcctggcccagagcggctctgtgcccccagccatgcagtggctgtgccaccctgtgggccaccgcttctttgtggatggagactggagcgtgctgagcaccccctgggagagcctgtacagcctggccggcaaccctgtggaccccctggcccaggtgacccagctgttccgggagcacctgctggagcgggccctgaactgtgtgacccagcccaaccccagccctggcagcgcagatggagacaaggagttcagtgatgccctgggctacctgcagctgctgaacagctgcagtgatgctgctggggccccagcctacagcttcagcatcagcagctccatggccaccaccactggagtggaccctgtggccaagtggtgggccagcctgacagctgtggtgatccactggctgcggagagatgaggaggccgctgagcggctgtgccccctggtggagcacctgccccgggtgctgcaggagagcgagcggcccctgccccgggccgccctgcacagcttcaaggccgcccgggccctgctgggctgtgccaaggccgagagcggccctgccagcctgaccatctgtgagaaggccagcggctacctgcaggacagcctggccaccaccccagccagcagcagcattgacaaggctgtgcagctgttcctgtgtgacctgctgctggtggtgaggaccagcctgtggaggcagcagcagcccccagccccagccccagctgcccagggcaccagcagccggccccaggccagcgccctggagctgcggggcttccagagggacctgagcagcctgcggcggctggcccagagcttccggcctgccatgaggcggctgatggatgtgctgaccagcgagagcgcctgggccctgccccagcacctgggcaagggcttccccagccccagcggccacaaggtgcccggctggcacggccgcatggactag

SEQ ID NO: 144027 - DNA, 1413 bp, Artificial Sequence
  derived and/or modified sequence
atggatgagccccccttcagcgaggccgccctggagcaggccctgggggagccctgtgacctggatgctgccctgctgacagacatcgaggacatgctgcagctgatcaacaaccaggacagcgacttccctggcctgtttgatcctccctatgccggcagcggggccggcggcacagatcctgccagcccagacaccagcagccctggcagcctgagccccccaccagccaccctgagcagcagcctggaggccttcctgagcggcccccaggccgcccccagccccctgagccccccccagcctgcccccacccccctgaagatgtaccccagcatgcctgccttcagccctggccctggcatcaaggaggagagcgtgcccctgagcatcctgcagacccccaccccccagcccctgcccggggccctgctgccccagagcttccctgccccagccccaccccagttcagcagcacccctgtgctgggctaccccagccccccaggcggcttcagcacaggcagccccccaggcaacacccagcagcccctgcccggcctgcccctggccagccccccaggagtgccccctgtgtccctgcacacccaggtgcagagcgtggtgccccagcagctgctgactgtgacagctgcccccacagctgcccctgtgaccaccaccgtgaccagccagatccagcaggtgcctgtgctgctgcagccccacttcatcaaggctgacagcctgctgctgacagccatgaagacagatggagccaccgtgaaggctgctggcctgagccccctggtgtctggcaccaccgtgcagacaggccccctgcccaccctggtgtctgggggcaccatcctggccaccgtgcccctggtggtggatgctgagaagctgcccatcaaccggctggccgccggcagcaaggccccagccagcgcccagagcagaggagagaagaggacagcccacaatgccatcgagaagcgctaccgcagcagcatcaatgacaagatcatcgagctgaaggacctggtggtgggcacagaggccaagctgaacaagtctgctgtgctgaggaaggccatcgactacatccgcttcctgcagcacagcaaccagaagctgaagcaggagaacctgagcctgaggacagctgtgcacaagagcaagagcctgaaggacctggtgtctgcctgtggcagcggcggcaacacagatgtgctgatggagggcgtgaagacagaggtggaggacaccctgaccccaccacccagtgatgctggcagccccttccagagcagccccctgagcctgggcagccggggcagcggcagcggcggcagcggcagtgacagcgagccagacagccctgtgtttgaggacagcaagacagaatag

SEQ ID NO: 144028 - DNA, 3444 bp, Artificial Sequence
  derived and/or modified sequence
atggacgagccccccttcagcgaggccgccctggagcaggccctgggggagccatgcgacctggacgccgctcttctgaccgacattgaggacatgctgcagctcatcaacaatcaggactcagactttccaggactctttgatcctccatacgctggatcaggggctggagggacagaccccgcttctccagatacctcctcccccgggagtctgagccccccccctgcaaccttgtcctcaagtctcgaggcattcctctccggcccacaggccgcccctagtcctctctcgcccccccagcctgctcccactcccctcaaaatgtatccatctatgccagcgtttagcccgggccccggtattaaagaggagtccgtgcccctctctatactgcaaacccccactccacaaccactgcctggcgctctattgccccagtccttccccgcaccagctcccccgcagttttccagcacccctgttttaggttatccatcgcctccaggcggcttcagtaccggctctccacctggcaacactcagcagcccttaccgggtttgcctctggccagccccccgggggtaccccccgtgtctttacatacccaggtacagtccgtggtccctcaacaactcctgacagtcaccgctgcccccacagcggctccagtcactacaactgtgacttcacagattcagcaggtgccagtcttacttcagcctcacttcataaaagccgattcgctcctgctcactgcgatgaagacagacggcgccactgttaaggccgctggcctgagccctttggtttctggaactacagtgcaaacaggacccctgcctactctagtatctggaggcaccattctagctactgtgcccctggtggtcgacgccgaaaagctgccaatcaatcgcctggccgctggaagcaaagcccctgcatctgcgcagtctcgaggggagaaaaggaccgcacacaacgcgatagagaaacggtaccggtcctcaattaacgacaagattattgagctgaaggacctcgtggtggggactgaagccaaactgaacaagtcagccgtacttagaaaagctatagactacattagattcctgcagcattccaatcagaagttaaagcaggagaacctgagtctgcgaaccgccgtgcacaaaagcaaaagcctgaaagaccttgtatctgcatgtggcagcggcggtaataccgacgtgttaatggaaggggtaaaaactgaggtggaagacaccctcaccccccccccaagcgatgctggaagtccctttcagtcatctccactaagcctcggcagcagaggctccgggagtggtggaagcggctcagactctgagcccgattcaccagttttcgaagatagcaaggccaaacccgagcagaggccctcgttacactccagaggaatgttggatcggtctcggctggcactctgcaccttggtattcctttgcctcagctgtaacccattagccagcttgctcggcgctagaggtctgccatctccttctgacacgacctccgtgtaccattccccaggtagaaacgtgcttggcaccgagagtagggatgggcctggctgggcacagtggttgctgccgccagtagtctggttgttgaacggtctgcttgtgttggtctccctcgtactactgttcgtctacggcgaacccgtcacgcggcctcattctggcccggcagtttacttttggcgacatagaaagcaagcagatctggatctcgctcgtggggattttgctcaggcagcccaacagctgtggctggcactccgcgcactgggcaggccactacccacgtctcatctggacctcgcttgctcactgttgtggaacctcatccgacacctactgcagaggctgtgggtggggagatggctggccggccgtgcagggggcctccaacaggactgcgctctcagggtcgacgcctcagccagtgcaagagatgcagccctggtgtaccacaagctgcaccagctgcatacgatgggtaaacatactggcggacacctgaccgccaccaatcttgccctctccgcactgaacttggccgagtgcgctggggacgctgtaagcgtagcaactctagccgagatatacgtagcggctgccctacgggtaaagacctctctgccaagagctttgcacttcctcacccggttcttccttagttctgccaggcaggcttgtctggcccagagcggatcggtcccgccggctatgcaatggctctgccatccagtgggccataggtttttcgttgacggcgactggtccgtgttatctacaccatgggagagcctgtacagtcttgcgggaaatcctgtggatcccctggctcaggtgacacagctttttagagaacacctcctggagagggctctgaactgcgttacacagccaaatccctcccccggcagtgccgatggcgacaaggagtttagtgatgctttggggtacctgcagctgctcaattcatgcagcgatgccgccggggcccccgcgtactccttcagtatctcctccagcatggcaacaactacaggggtcgaccccgtagcgaagtggtgggcttccctcactgccgtggtgatccattggctgcgtagggacgaggaagccgcggaacgtctgtgtcccctggtggaacatttgccaagagtgctacaagagtctgagaggccactgccacgggctgccctacattccttcaaagccgccagggctctcctgggctgtgccaaagccgaaagtggtccagcatccctgaccatctgtgagaaagcatccgggtacctgcaggatagcctcgcaaccacccctgcctctagctcaatagataaggcagtgcaattgttcctgtgcgacctgctgctcgtcgtgcgaactagcctgtggcggcagcagcagcccccagctccagcccccgcagcacagggaacatcgtcaagaccacaggcttcagctcttgagctgcgggggttccagcgcgacctcagctccttgcgacgcctggcgcagagcttccgcccggcaatgcgaagggtgtttctgcatgaggcgacagcccgtctgatggctggggcaagccccactaggacacatcagcttctggatcgctcacttcgaagaagggcaggaccgggagggaagggaggggctgtcgctgagttggaacccagacccaccagacgcgagcatgctgaggccttgctgctggctagctgttatttacctccaggattccttagcgcaccagggcagagggttggcatgctggccgaagccgcccggaccttagagaagttgggtgataggcgattgctccacgactgccagcaaatgcttatgcgactcggcggtgggacaaccgtcacaagttcatag

SEQ ID NO: 144029 - DNA, 3216 bp, Artificial Sequence
  derived and/or modified sequence
atggacgagccccccttcagcgaggccgccctggagcaggccctgggagagccatgcgacctggacgccgcgctcctcacagacattgaagacatgctccagctgatcaataatcaggatagcgattttccaggtctcttcgatccaccctatgccggatcaggagccggtggcactgatcccgccagtcccgacacctccagcccaggctccctgagcccaccacccgccactctgagttcctcgcttgaggccttcctcagcggaccacaggcagccccctcgcccctgtcccccccacagcctgcccccactcccctcaagatgtatccgagtatgccagctttttcgccagggcccggcatcaaggaagaaagcgtgcctctgagcatcttgcagacacctacgccccagcctctgcctggtgcgctgcttccccagtctttccctgcgcctgccccccctcagttcagctctacaccagtcctgggctacccttctccaccaggcgggttttccaccggatctccccctggcaatacccagcagccccttccaggactgccactcgcctctcctcccggcgtgccccctgtctctctccacacccaggttcagtcagtcgttcctcagcagcttctgactgtcaccgccgctcccaccgccgctccggtgaccacaacagtgacttcccagattcagcaggtgcccgtgctgctacagccgcatttcataaaggcggatagccttctgctgaccgccatgaaaacggacggcgctacggtaaaggccgctggcctgtctccccttgtatccggcacaaccgtccagactggaccccttcctaccttagtgtccggtggaacgatactggccactgtaccgctggtggtggatgccgagaaactgcctattaatcgtctagctgctggatcgaaagcaccagcctcagctcagagccgtggggagaagcggaccgcccataacgcgatcgaaaagagatatcgctcgtctattaatgataaaatcattgaactgaaagatttggtggttggaacggaagctaaactcaataagtcggcagttctgcggaaggccatcgactacatcaggtttctgcagcatagtaatcaaaagctcaaacaggaaaatctctccttacggacggccgtgcataaatctaagtcgctcaaagatctggtgtctgcttgcggctctgggggcaatacagacgtcttgatggagggcgtaaagaccgaagtggaggacaccttaactccccccccttcagacgccggatcgcccttccagagcagcccactgtccttaggtagccgcggctcgggatccggtggctctggcagtgactccgaacccgacagtccggtttttgaggacagcaaagctaaaccagaacagcgaccttccctgcacagtcggggaatgctggataggagtagactcgccctatgtaccttagtgtttctctgtctgagctgcaatccacttgcttctctgctgggcgctcgcggcttgccatctccctccgataccactagcgtttatcacagccccggaaggaatgtattggggactgaatcccgagacgggcctggctgggcgcaatggttgctgcctccagtggtttggctgctgaacggcctgctagttttggttagccttgtactgcttttcgtctatggcgagcctgtgacccggcctcactccggacctgcggtctacttctggcggcatagaaaacaggctgaccttgatctggcccggggggactttgctcaggcagcacaacagctctggctggcactccgtgcactggggaggcccctgccaacttcgcaccttgatttagcctgcagcctgttatggaacctgatcaggcaccttctgcagaggttgtgggttggaagatggctggctggaagggccggcgggctccagcaagactgcgctctgagagtggatgcatcagcgtcagctcgcgacgccgccctggtataccacaagctgcaccagttacacacaatgggtaaacatactggaggccatcttacagccacaaaccttgccctgtccgccctcaatttggccgagtgcgccggcgacgctgtctccgttgcgacactggccgagatttatgtcgccgcggccctaagagtcaagaccagtttgccccgggccttgcattttctcactcgcttttttctctcttccgctcgacaagcttgtctcgcccagtctggtagcgtgcccccagccatgcaatggctgtgccatcccgtgggccaccgcttctttgtggacggagactggtcggttctgtctaccccctgggagtcgctttacagtctagctggcaaccccgttgacccattggcccaggtcacccagcttttccgcgaacacttacttgagagagcactgaattgcgttacccagcctaatcccagtcctggatcggcagatggggacaaagaattctccgacgcgttaggctacttacagttgctgaattcatgtagcgacgctgcgggtgcgcccgcttattccttttctatctcttcaagtatggccacgaccactggtgtggatccagtggccaagtggtgggcctcccttacagccgtggtgatacattggctcagacgggacgaagaagccgccgaacgcctttgccccctggtcgaacacctgccccgggtgctgcaagagtccgagcgaccactgccccgcgccgctctccattcttttaaagctgcgagggcactgttgggctgtgccaaagctgaatctggaccagcctctctgacgatctgtgagaaagcatccgggtacctgcaggactccctggccacaacccctgcaagtagcagcattgacaaagccgtacagctgttcttgtgtgacctgctgctggtggtcaggacaagtctgtggcggcagcagcagcctcctgccccggctcctgcggcgcaaggaacatctagcaggccacaggcttcagctctagaactgcgggggttccagcgagacctctcttctcttcggcgcctcgcccagagtttcaggccagcaatgcggagattgatggatgtcctgaccagcgagtcggcctgggcccttcctcagcacctgggcaaaggttttcccagccctagcggacacaaagtgcctggatggcatggtagaatggactag

SEQ ID NO: 144030 - DNA, 1413 bp, Artificial Sequence
  derived and/or modified sequence
atggacgagccccccttcagcgaggccgccctggagcaggccctgggggagccatgtgacttggacgccgcactcttgacagacattgaggatatgttgcagctcatcaacaaccaggattcagatttccccggattatttgatccaccatacgctggctcaggcgctggcggaacagatcctgcctctccggacacatcatctcctggtagtcttagcccgccacccgccaccctgtcgtcctccttggaggcttttcttagcggacctcaggcagccccttcccctttgagtcccccccaaccagcgcccactccattgaagatgtatccttccatgcccgccttttcaccaggtcctgggatcaaggaagagtctgtacccctctctatactccagactccaacgcctcagccgctgccaggtgccttgctgccccaaagcttccctgcgcccgctccaccacagttcagctccacgcccgtgctcggctatccatcccctcctggcggatttagtacaggttctccaccgggcaacacgcagcagccgctacccgggctgcccctggcatctcctcctggcgtcccacctgtgtcactccacactcaagtgcaatctgttgtgccccaacagttactgaccgtcacagctgcaccaacagccgctcccgtgacgaccactgtgacaagtcagatccaacaggtccctgtgctcctccagcctcatttcattaaggccgattccctgttattgacggctatgaaaactgacggagctaccgtcaaagcagctggcctgtctccgctggtgtccgggacgaccgttcagaccggccctctgcctacactcgtcagcggtggtacgattctggccactgtgcccttggttgtcgacgctgagaaattgcctattaacagactggccgcaggaagcaaggctccggccagtgcccagagtaggggtgaaaaacgaacagcccacaatgccatagaaaagagataccggtccagcattaatgacaagatcattgaactgaaagaccttgtggtaggcacagaggccaagctaaacaaaagcgccgtccttcgcaaggccatcgattacattagatttctccagcactctaaccaaaaactaaagcaagagaacctcagcctgcgaacagctgtccacaaatccaagagcctcaaggatctggtttcagcctgcggcagtggaggaaataccgacgttcttatggaaggcgtcaaaacagaagtcgaggacacattgactcctccacctagcgatgcaggaagcccgtttcagagctcaccactgagcttaggctccagggggtcaggcagcggcggatccggtagtgactctgagccagattctcctgtattcgaggacagcaaaaccgaatag

SEQ ID NO: 144031 - DNA, 3444 bp, Artificial Sequence
  derived and/or modified sequence
atggatgaacctccctttagcgaggccgcactcgagcaggccctcggagaaccctgcgatctagacgccgctttgctgactgacatcgaagacatgctgcaactgatcaacaaccaggactcggatttccccggtttgttcgaccctccatacgcgggaagcggagccggagggaccgatccagcttcccctgacacgagtagtcctggcagtctgagtcctcctccagccacactcagcagttcgcttgaggcgtttttgagcggacctcaggctgcccctagtcccctcagcccaccacagcctgccccaacacccctgaagatgtacccttcaatgccagccttctctccgggaccgggaatcaaagaggaatcagtgcccctttctattcttcagacgcccactccccaaccactgccgggtgctctgcttcctcagagctttccagctcctgcaccaccacagttttctagcacacctgtgctggggtaccccagtccccctggaggattcagtacaggatctccgccagggaatacgcaacagccactgcctggcttgccactggcgagtcccccaggagttccccctgtttcactacacacccaggtccaaagtgtggttccacagcaactgctgaccgtgactgccgctcctaccgccgcacctgtgacaacaaccgttaccagtcagattcagcaggtgcccgtgttgcttcaaccccattttattaaagctgatagtctgctgctgactgccatgaaaacggatggggctacagtgaaggcagcaggcttgtctcccctcgtttcagggaccaccgtccagacgggcccactgcctacactcgtgtctgggggtacaatcttggccacagttcccttagtcgttgacgccgaaaagcttcctatcaatcggttggctgccggatccaaggcccctgcttctgcccagagccgaggcgaaaaacggaccgctcataatgcaatagagaagcgatacaggtcgtctattaatgacaaaataatcgaacttaaagacctggtcgtgggtacagaagctaagttgaacaaatcagccgtgctacgcaaagccatcgattatatcaggttcctacaacactcaaaccaaaaactaaagcaggaaaacctgtctttgcgaacggcagtgcataaatcgaaatcgcttaaggacctggtgtcggcgtgcggctccggagggaacaccgatgttctgatggaaggcgttaaaaccgaagtcgaggacacactgacaccaccaccatccgatgcagggtcccctttccagtccagccccctgtcccttggcagccgagggtcaggcagcgggggttccgggagcgactctgaacccgacagtcctgtgtttgaggactcgaaagctaagcctgagcagagacctagcctgcattccagaggtatgctggataggagccgactagcactatgtactcttgttttcttatgtttatcctgtaatcctttggcctcacttttgggtgcgaggggcctgccttctcctagtgacaccaccagcgtctatcattctcctgggaggaatgttcttggaacggaaagtagagacggaccaggctgggcacagtggctcctgcctccagttgtgtggcttctgaacggtctcctggttctagtcagtctggttttgctgtttgtgtacggggaacctgtgacacgccctcactcgggtcctgctgtttatttttggcggcaccgcaagcaggcagacctggacctggccaggggagattttgcacaggcagcccagcagctgtggctagccctgcgtgcactgggaaggcccctgccaacctcacacctcgatttggcttgcagtctcctgtggaacctgatccgccacctccttcagcgtctctgggtgggtaggtggctggcagggagagccggtggcttacaacaggattgtgccctccgcgttgatgcgtccgcctcggcacgagatgccgctctggtctaccataagcttcatcagctgcacaccatgggtaagcatacggggggacaccttaccgctaccaacctggcactcagcgctctcaatttggcagagtgcgccggagatgcggtgagcgtggccacactggccgaaatatacgtcgcagccgctttgagggtcaagacgtcactgcctagagctctgcattttctgactcgtttcttcctttcatccgccagacaggcatgcctggcacaatcaggttcggttccccctgcaatgcaatggctgtgtcatcctgtgggacaccggttcttcgtagacggggattggagcgtgctcagcactccttgggagtccctgtattctctcgcgggtaaccccgtcgatccactggcccaagtgacgcagctgttcagggagcacctgttggagagagccctcaactgtgtaacgcaacccaacccaagccccggttctgcagacggggacaaagagttcagtgacgcacttggctacctgcagctcctgaattcctgctcagacgccgctggggctccagcatactccttcagtatcagtagctcgatggccacgacaacgggcgtcgatcctgtagctaaatggtgggcgagccttacagcggtcgtgatccattggctccgtcgcgatgaggaggcagccgagcggctgtgcccgctggtggaacacctgcccagagtgcttcaggagtccgaacgtcctctgccacgggctgctctacactccttcaaggccgctagagctctcctggggtgcgccaaggccgagagtggcccagcctccttgaccatttgtgagaaggcgagcggctacctccaggactcccttgcaacaacccctgcgagctcctctatcgataaagctgtgcagttgtttctgtgtgatctcctccttgtggtgcgtacatccctgtggcgacagcagcagcccccagcccctgcacctgccgcacagggtaccagtagtcggccacaggctagcgcccttgagctgcgaggctttcagagggatctcagcagtctgcgtaggctggcccagtcttttcggcctgccatgcggagggtgttcttgcatgaagcaactgcccgtctaatggccggtgcctcccccactcggacccatcagctgttggaccgctctctacggcgtcgggctgggcctggcggaaaaggtggggcagtggcagagctggagccacgcccaacacgcagagagcacgccgaggcactcctgctcgccagctgctacttaccgccaggcttcctgtctgcacccggacagcgggtcgggatgctggcagaggccgcacgcactctggaaaaactcggcgaccgtcggctactgcatgattgtcagcagatgttgatgaggctggggggaggtaccaccgtaaccagcagctag

SEQ ID NO: 144032 - DNA, 3216 bp, Artificial Sequence
  derived and/or modified sequence
atggacgagccccctttctccgaagctgcactggaacaagctctgggcgaaccatgtgacctagacgcagcactgctgaccgacattgaggacatgctgcagttgattaataatcaggactctgacttcccgggtttgtttgacccaccatacgccggtagtggagcgggagggaccgaccccgcatcaccagacacgtcctctccgggaagtctgtcccctccccctgcaacactcagcagttctctggaagccttcctctccggcccacaagctgctcccagccctttgtctccacctcagcctgcccctaccccactcaaaatgtatcctagtatgcccgctttcagcccgggtcccggaataaaggaagaatccgtgcccttatcaatcctccaaaccccaaccccacaacccctgcctggagctcttttgccccagtcattccccgctcctgcacccccacagttcagctctaccccagtactgggctaccccagcccacctgggggattcagcactgggtcccctcctggcaatacacagcagcctttacctggcctgccactagccagtccacctggcgttcctcctgtgtcactacatacacaggtgcaatcagtggtgcctcaacagctcctgaccgtcacagctgcacctaccgcggcacccgtcacaacaaccgttacaagccagatccagcaggtgcccgtactgctccaaccacatttcattaaagccgatagtctgctgcttactgctatgaaaacagacggtgctaccgtaaaagctgctggacttagccccttagtctctggcacgaccgtgcagaccggacccctcccaaccctggtttctggagggaccatcttagctaccgtgcctcttgtagtcgacgcagagaagctgcctattaacagattggccgctggaagcaaagcaccagcgtcagctcagagccggggagagaagagaaccgcgcataacgccattgaaaagcgctaccgctcttccattaacgacaagattatagagctcaaggacttagtcgtcggtacagaagcaaaactcaataaatccgcggtcctgcgtaaggcaatcgattatatccgattccttcagcacagcaaccagaaactgaaacaggagaacctgagtctccggacggccgtgcataaatccaaatcgctgaaggacctggtctcagcgtgcggttcagggggtaataccgatgtcttgatggagggggtcaagactgaagtggaggacaccttaacaccaccaccttcagacgcaggtagcccgttccagtcctcccctctgagtctgggcagtaggggttctgggtctgggggttctggtagcgattccgagccagactcaccggtcttcgaagatagcaaggccaagcctgagcagcgccctagtctgcatagtcggggtatgctggatcggagtagattggccctatgcacactggtgttcttatgcctctcctgtaatccattagcatcactgctgggcgctcgagggctgccttctccttctgatacaaccagtgtctaccattctccaggtaggaacgttttgggtactgagagccgcgatggccctggctgggcccagtggttgctgccgccagtggtttggctcttgaatggtctcctcgtgctcgtgtctcttgttctcctgttcgtgtatggtgaaccagtgaccagacctcatagcggtccagctgtctacttttggcgtcatcgcaaacaggccgacctcgacctggcgaggggagacttcgcccaggcagcccaacagctgtggctggctctgcgcgcattgggaagaccacttccaacttcccacctcgatttagcctgtagcctattgtggaacctgatccgacacctgctgcagagactgtgggtgggacgatggctcgcaggacgggcagggggtcttcagcaggattgcgctctgagagttgacgcctcagcaagcgcccgtgatgctgctctggtgtatcataagcttcaccaattgcacaccatgggtaagcacacaggcggacacctcaccgccactaacttagccttgagcgcattgaaccttgccgagtgcgccggagacgctgtgagtgtcgctacgttggctgagatttatgtggccgctgctctgcgggtgaaaacaagtttgcccagggcactgcattttctgacacgttttttcctgtctagcgctcggcaggcatgtttagcgcaatccggcagcgtacctccagcaatgcagtggctttgccatcctgtcgggcaccggttctttgtagacggcgactggtcagttctgagcacaccctgggagtctctgtattctctcgcagggaaccctgtggatcctctcgctcaagtgacacagctgtttagggagcacctgcttgagagggcactgaactgtgtgactcaaccaaaccctagccctggaagcgcagatggcgataaagagttctccgacgctctgggctatcttcaactattaaattcctgctctgacgccgctggtgcgcctgcctacagtttttcgatatcctcctccatggccactactaccggcgttgaccccgtggccaagtggtgggcaagcctcacagccgtcgtgattcactggcttaggcgtgatgaggaagctgctgagcgtctgtgtcctttggttgagcatttacctcgtgtgctgcaggagtcagagcgcccacttcctagggcggctctgcacagtttcaaagcagctcgagctcttttgggctgtgcaaaagccgagtccgggcctgcaagcctgacgatttgtgaaaaggcatccggatatcttcaggacagtctggctacgactcctgcctcctctagcatcgataaagccgtccagctgtttctttgcgatcttctcctggtagtgcggacctcactctggcggcaacagcaaccccctgccccagcccctgccgcacagggaacatcctcgcgccctcaggcctcggcgttagagctcagagggttccagcgagacttgtctagtctgcggagacttgctcagtctttcagacctgcaatgcgccgtctgatggatgtgcttactagcgaaagcgcctgggctcttccgcagcacctggggaaaggttttcccagtccctctggacataaggtcccgggatggcatggtaggatggactag

SEQ ID NO: 144033 - DNA, 1413 bp, Artificial Sequence
  derived and/or modified sequence
atggatgagccgccattctcggaggccgcactcgagcaggccctgggagagccctgtgatttggacgctgcgctgttgacagatatcgaagatatgctccagctgatcaacaatcaggattcggatttccccggtctgtttgatcctccgtacgcaggatctggcgcagggggaaccgacccggcttcccctgataccagcagtcctggctccctatctccaccgcctgccaccctgagctcatcactggaagcctttctctctggaccacaggcggctcccagcccattgtccccaccgcagcccgcacctaccccattaaagatgtatccctctatgccggcattcagcccaggacccggaataaaggaggaatcagtccccctttctatcttgcaaacgccaactccccaacctctaccaggagccctgttaccccagtctttccccgctcccgcacctccccagttctcttccacccccgtcctgggctatccttcccctcctggtggttttagcaccgggagcccacccggaaacacacagcagccactccccggacttccactggcttcccccccaggggtccccccagtgtcgttgcacacacaggtgcaatccgtggtccctcagcagctgctgaccgttaccgctgctccaacagctgctcctgtgactaccaccgtgacgagccagatccaacaggttcctgtgctgctccagccacacttcataaaggcggacagcttactactcaccgctatgaagacagacggtgctacagtgaaggccgctggcttgtctcctctagtcagtgggaccaccgttcaaaccggaccacttccaacgctcgtgtctgggggaactatcctggctacggttccactggtcgtagacgccgagaaactgcccatcaacagactagcggctggatctaaagcccctgcttcagcgcaaagccggggagaaaaaagaacagcacataacgctattgaaaaaagatatcgcagctcaataaacgacaaaatcattgaacttaaagacctggtcgtaggcactgaagccaaattaaacaagagtgccgtcctgcggaaggccatcgattacatacgattcttacaacacagcaaccaaaagttaaaacaagagaacctgagtcttcgcactgccgtgcacaagagcaaatcactaaaggacctggtttccgcctgcggatctgggggaaacaccgacgttttgatggagggggtgaagacggaggtcgaagatacgctcacaccaccgccttctgatgctggctccccatttcagtcatctcccctgtcactgggctctcggggtagtggttccggcggtagcgggtcagacagcgagcctgactctcccgtattcgaagactcaaagaccgaatag

SEQ ID NO: 144034 - DNA, 4178 bp, Artificial Sequence
  derived and/or modified sequence
gcggccgggggaacccagtttccgaggaacttttcgccggcgccgggccgcctctgaggccagggcaggacacgaacgcgcggagcggcggcggcgactgagagccggggccgcggcggcgctccctaggaagggccgtacgaggcggcgggcccggcgggcctcccggaggaggcggctgcgccatggacgagccacccttcagcgaggcggctttggagcaggcgctgggcgagccgtgcgatctggacgcggcgctgctgaccgacatcgaagacatgcttcagcttatcaacaaccaagacagtgacttccctggcctatttgacccaccctatgctgggagtggggcagggggcacagaccctgccagccccgataccagctccccaggcagcttgtctccacctcctgccacattgagctcctctcttgaagccttcctgagcgggccgcaggcagcgccctcacccctgtcccctccccagcctgcacccactccattgaagatgtacccgtccatgcccgctttctcccctgggcctggtatcaaggaagagtcagtgccactgagcatcctgcagacccccaccccacagcccctgccaggggccctcctgccacagagcttcccagccccagccccaccgcagttcagctccacccctgtgttaggctaccccagccctccgggaggcttctctacaggaagccctcccgggaacacccagcagccgctgcctggcctgccactggcttccccgccaggggtcccgcccgtctccttgcacacccaggtccagagtgtggtcccccagcagctactgacagtcacagctgcccccacggcagcccctgtaacgaccactgtgacctcgcagatccagcaggtcccggtcctgctgcagccccacttcatcaaggcagactcgctgcttctgacagccatgaagacagacggagccactgtgaaggcggcaggtctcagtcccctggtctctggcaccactgtgcagacagggcctttgccgaccctggtgagtggcggaaccatcttggcaacagtcccactggtcgtagatgcggagaagctgcctatcaaccggctcgcagctggcagcaaggccccggcctctgcccagagccgtggagagaagcgcacagcccacaacgccattgagaagcgctaccgctcctccatcaatgacaaaatcattgagctcaaggatctggtggtgggcactgaggcaaagctgaataaatctgctgtcttgcgcaaggccatcgactacattcgctttctgcaacacagcaaccagaaactcaagcaggagaacctaagtctgcgcactgctgtccacaaaagcaaatctctgaaggatctggtgtcggcctgtggcagtggagggaacacagacgtgctcatggagggcgtgaagactgaggtggaggacacactgaccccacccccctcggatgctggctcacctttccagagcagccccttgtcccttggcagcaggggcagtggcagcggtggcagtggcagtgactcggagcctgacagcccagtctttgaggacagcaaggcaaagccagagcagcggccgtctctgcacagccggggcatgctggaccgctcccgcctggccctgtgcacgctcgtcttcctctgcctgtcctgcaaccccttggcctccttgctgggggcccgggggcttcccagcccctcagataccaccagcgtctaccatagccctgggcgcaacgtgctgggcaccgagagcagagatggccctggctgggcccagtggctgctgcccccagtggtctggctgctcaatgggctgttggtgctcgtctccttggtgcttctctttgtctacggtgagccagtcacacggccccactcaggccccgccgtgtacttctggaggcatcgcaagcaggctgacctggacctggcccggggagactttgcccaggctgcccagcagctgtggctggccctgcgggcactgggccggcccctgcccacctcccacctggacctggcttgtagcctcctctggaacctcatccgtcacctgctgcagcgtctctgggtgggccgctggctggcaggccgggcagggggcctgcagcaggactgtgctctgcgagtggatgctagcgccagcgcccgagacgcagccctggtctaccataagctgcaccagctgcacaccatggggaagcacacaggcgggcacctcactgccaccaacctggcgctgagtgccctgaacctggcagagtgtgcaggggatgccgtgtctgtggcgacgctggccgagatctatgtggcggctgcattgagagtgaagaccagtctcccacgggccttgcattttctgacacgcttcttcctgagcagtgcccgccaggcctgcctggcacagagtggctcagtgcctcctgccatgcagtggctctgccaccccgtgggccaccgtttcttcgtggatggggactggtccgtgctcagtaccccatgggagagcctgtacagcttggccgggaacccagtggaccccctggcccaggtgactcagctattccgggaacatctcttagagcgagcactgaactgtgtgacccagcccaaccccagccctgggtcagctgatggggacaaggaattctcggatgccctcgggtacctgcagctgctgaacagctgttctgatgctgcgggggctcctgcctacagcttctccatcagttccagcatggccaccaccaccggcgtagacccggtggccaagtggtgggcctctctgacagctgtggtgatccactggctgcggcgggatgaggaggcggctgagcggctgtgcccgctggtggagcacctgccccgggtgctgcaggagtctgagagacccctgcccagggcagctctgcactccttcaaggctgcccgggccctgctgggctgtgccaaggcagagtctggtccagccagcctgaccatctgtgagaaggccagtgggtacctgcaggacagcctggctaccacaccagccagcagctccattgacaaggccgtgcagctgttcctgtgtgacctgcttcttgtggtgcgcaccagcctgtggcggcagcagcagcccccggccccggccccagcagcccagggcaccagcagcaggccccaggcttccgcccttgagctgcgtggcttccaacgggacctgagcagcctgaggcggctggcacagagcttccggcccgccatgcggagggtgttcctacatgaggccacggcccggctgatggcgggggccagccccacacggacacaccagctcctcgaccgcagtctgaggcggcgggcaggccccggtggcaaaggaggcgcggtggcggagctggagccgcggcccacgcggcgggagcacgcggaggccttgctgctggcctcctgctacctgccccccggcttcctgtcggcgcccgggcagcgcgtgggcatgctggctgaggcggcgcgcacactcgagaagcttggcgatcgccggctgctgcacgactgtcagcagatgctcatgcgcctgggcggtgggaccactgtcacttccagctagaccccgtgtccccggcctcagcacccctgtctctagccactttggtcccgtgcagcttctgtcctgcgtcgaagctttgaaggccgaaggcagtgcaagagactctggcctccacagttcgacctgcggctgctgtgtgccttcgcggtggaaggcccgaggggcgcgatcttgaccctaagaccggcggccatgatggtgctgacctctggtggccgatcggggcactgcaggggccgagccattttggggggcccccctccttgctctgcaggcaccttagtggcttttttcctcctgtgtacagggaagagaggggtacatttccctgtgctgacggaagccaacttggctttcccggactgcaagcagggctctgccccagaggcctctctctccgtcgtgggagagagacgtgtacatagtgtaggtcagcgtgcttagcctcctgacctgaggctcctgtgctactttgccttttgcaaactttattttcatagattgagaagttttgtacagagaattaaaaatgaaattatttataatctg

SEQ ID NO: 144035 - DNA, 3410 bp, Artificial Sequence
  derived and/or modified sequence
agcagagctgcggccgggggaacccagtttccgaggaacttttcgccggcgccgggccgcctctgaggccagggcaggacacgaacgcgcggagcggcggcggcgactgagagccggggccgcggcggcgctccctaggaagggccgtacgaggcggcgggcccggcgggcctcccggaggaggcggctgcgccatggacgagccacccttcagcgaggcggctttggagcaggcgctgggcgagccgtgcgatctggacgcggcgctgctgaccgacatcgaagacatgcttcagcttatcaacaaccaagacagtgacttccctggcctatttgacccaccctatgctgggagtggggcagggggcacagaccctgccagccccgataccagctccccaggcagcttgtctccacctcctgccacattgagctcctctcttgaagccttcctgagcgggccgcaggcagcgccctcacccctgtcccctccccagcctgcacccactccattgaagatgtacccgtccatgcccgctttctcccctgggcctggtatcaaggaagagtcagtgccactgagcatcctgcagacccccaccccacagcccctgccaggggccctcctgccacagagcttcccagccccagccccaccgcagttcagctccacccctgtgttaggctaccccagccctccgggaggcttctctacaggaagccctcccgggaacacccagcagccgctgcctggcctgccactggcttccccgccaggggtcccgcccgtctccttgcacacccaggtccagagtgtggtcccccagcagctactgacagtcacagctgcccccacggcagcccctgtaacgaccactgtgacctcgcagatccagcaggtcccggtcctgctgcagccccacttcatcaaggcagactcgctgcttctgacagccatgaagacagacggagccactgtgaaggcggcaggtctcagtcccctggtctctggcaccactgtgcagacagggcctttgccgaccctggtgagtggcggaaccatcttggcaacagtcccactggtcgtagatgcggagaagctgcctatcaaccggctcgcagctggcagcaaggccccggcctctgcccagagccgtggagagaagcgcacagcccacaacgccattgagaagcgctaccgctcctccatcaatgacaaaatcattgagctcaaggatctggtggtgggcactgaggcaaagctgaataaatctgctgtcttgcgcaaggccatcgactacattcgctttctgcaacacagcaaccagaaactcaagcaggagaacctaagtctgcgcactgctgtccacaaaagcaaatctctgaaggatctggtgtcggcctgtggcagtggagggaacacagacgtgctcatggagggcgtgaagactgaggtggaggacacactgaccccacccccctcggatgctggctcacctttccagagcagccccttgtcccttggcagcaggggcagtggcagcggtggcagtggcagtgactcggagcctgacagcccagtctttgaggacagcaaggcaaagccagagcagcggccgtctctgcacagccggggcatgctggaccgctcccgcctggccctgtgcacgctcgtcttcctctgcctgtcctgcaaccccttggcctccttgctgggggcccgggggcttcccagcccctcagataccaccagcgtctaccatagccctgggcgcaacgtgctgggcaccgagagcagagatggccctggctgggcccagtggctgctgcccccagtggtctggctgctcaatgggctgttggtgctcgtctccttggtgcttctctttgtctacggtgagccagtcacacggccccactcaggccccgccgtgtacttctggaggcatcgcaagcaggctgacctggacctggcccggggagactttgcccaggctgcccagcagctgtggctggccctgcgggcactgggccggcccctgcccacctcccacctggacctggcttgtagcctcctctggaacctcatccgtcacctgctgcagcgtctctgggtgggccgctggctggcaggccgggcagggggcctgcagcaggactgtgctctgcgagtggatgctagcgccagcgcccgagacgcagccctggtctaccataagctgcaccagctgcacaccatggggaagcacacaggcgggcacctcactgccaccaacctggcgctgagtgccctgaacctggcagagtgtgcaggggatgccgtgtctgtggcgacgctggccgagatctatgtggcggctgcattgagagtgaagaccagtctcccacgggccttgcattttctgacacgcttcttcctgagcagtgcccgccaggcctgcctggcacagagtggctcagtgcctcctgccatgcagtggctctgccaccccgtgggccaccgtttcttcgtggatggggactggtccgtgctcagtaccccatgggagagcctgtacagcttggccgggaacccagtggaccccctggcccaggtgactcagctattccgggaacatctcttagagcgagcactgaactgtgtgacccagcccaaccccagccctgggtcagctgatggggacaaggaattctcggatgccctcgggtacctgcagctgctgaacagctgttctgatgctgcgggggctcctgcctacagcttctccatcagttccagcatggccaccaccaccggcgtagacccggtggccaagtggtgggcctctctgacagctgtggtgatccactggctgcggcgggatgaggaggcggctgagcggctgtgcccgctggtggagcacctgccccgggtgctgcaggagtctgagagacccctgcccagggcagctctgcactccttcaaggctgcccgggccctgctgggctgtgccaaggcagagtctggtccagccagcctgaccatctgtgagaaggccagtgggtacctgcaggacagcctggctaccacaccagccagcagctccattgacaaggccgtgcagctgttcctgtgtgacctgcttcttgtggtgcgcaccagcctgtggcggcagcagcagcccccggccccggccccagcagcccagggcaccagcagcaggccccaggcttccgcccttgagctgcgtggcttccaacgggacctgagcagcctgaggcggctggcacagagcttccggcccgccatgcggaggctgatggatgtgctgactagtgagagtgcttgggccctcccccagcacctagggaaaggcttcccctccccctccggccacaaggtccctgggtggcacgggaggatggactga

SEQ ID NO: 144036 - DNA, 1430 bp, Artificial Sequence
  derived and/or modified sequence
atggacgagccacccttcagcgaggcggctttggagcaggcgctgggcgagccgtgcgatctggacgcggcgctgctgaccgacatcgaagacatgcttcagcttatcaacaaccaagacagtgacttccctggcctatttgacccaccctatgctgggagtggggcagggggcacagaccctgccagccccgataccagctccccaggcagcttgtctccacctcctgccacattgagctcctctcttgaagccttcctgagcgggccgcaggcagcgccctcacccctgtcccctccccagcctgcacccactccattgaagatgtacccgtccatgcccgctttctcccctgggcctggtatcaaggaagagtcagtgccactgagcatcctgcagacccccaccccacagcccctgccaggggccctcctgccacagagcttcccagccccagccccaccgcagttcagctccacccctgtgttaggctaccccagccctccgggaggcttctctacaggaagccctcccgggaacacccagcagccgctgcctggcctgccactggcttccccgccaggggtcccgcccgtctccttgcacacccaggtccagagtgtggtcccccagcagctactgacagtcacagctgcccccacggcagcccctgtaacgaccactgtgacctcgcagatccagcaggtcccggtcctgctgcagccccacttcatcaaggcagactcgctgcttctgacagccatgaagacagacggagccactgtgaaggcggcaggtctcagtcccctggtctctggcaccactgtgcagacagggcctttgccgaccctggtgagtggcggaaccatcttggcaacagtcccactggtcgtagatgcggagaagctgcctatcaaccggctcgcagctggcagcaaggccccggcctctgcccagagccgtggagagaagcgcacagcccacaacgccattgagaagcgctaccgctcctccatcaatgacaaaatcattgagctcaaggatctggtggtgggcactgaggcaaagctgaataaatctgctgtcttgcgcaaggccatcgactacattcgctttctgcaacacagcaaccagaaactcaagcaggagaacctaagtctgcgcactgctgtccacaaaagcaaatctctgaaggatctggtgtcggcctgtggcagtggagggaacacagacgtgctcatggagggcgtgaagactgaggtggaggacacactgaccccacccccctcggatgctggctcacctttccagagcagccccttgtcccttggcagcaggggcagtggcagcggtggcagtggcagtgactcggagcctgacagcccagtctttgaggacagcaagacagaataactgaggcctggagccac

SEQ ID NO: 144037 - protein, 444 aa, Artificial Sequence
  derived and/or modified sequence
MIEDNKENKDHSLERGRASLIFSLKNEVGGLIKALKIFQEKHVNLLHIESRKSKRRNSEFEIFVDCDINREQLNDIFHLLKSHTNVLSVNLPDNFTLKEDGMETVPWFPKKISDLDHCANRVLMYGSELDADHPGFKDNVYRKRRKYFADLAMNYKHGDPIPKVEFTEEEIKTWGTVFQELNKLYPTHACREYLKNLPLLSKYCGYREDNIPQLEDVSNFLKERTGFSIRPVAGYLSPRDFLSGLAFRVFHCTQYVRHSSDPFYTPEPDTCHELLGHVPLLAEPSFAQFSQEIGLASLGASEEAVQKLATCYFFTVEFGLCKQDGQLRVFGAGLLSSISELKHALSGHAKVKPFDPKITCKQECLITTFQDVYFVSESFEDAKEKMREFTKTIKRPFGVKYNPYTRSIQILKDTKSITSAMNELQHDLDVVSDALAKVSRKPSI

SEQ ID NO: 144038 - protein, 466 aa, Artificial Sequence
  derived and/or modified sequence
MIEDNKENKDHSLERGRASLIFSLKNEVGGLIKALKIFQEKHVNLLHIESRKSKRRNSEFEIFVDCDINREQLNDIFHLLKSHTNVLSVNLPDNFTLKEDGMETVPWFPKKISDLDHCANRVLMYGSELDADHPGFKDNVYRKRRKYFADLAMNYKHGDPIPKVEFTEEEIKTWGTVFQELNKLYPTHACREYLKNLPLLSKYCGYREDNIPQLEDVSNFLKERTGFSIRPVAGYLSPRDFLSGLAFRVFHCTQYVRHSSDPFYTPEPDTCHELLGHVPLLAEPSFAQFSQEIGLASLGASEEAVQKLATCYFFTVEFGLCKQDGQLRVFGAGLLSSISELKHALSGHAKVKPFDPKITCKQECLITTFQDVYFVSESFEDAKEKMREFTKTIKRPFGVKYNPYTRSIQILKDTKSITSAMNELQHDLDVVSDALAKSLNEDVLQVSVFALLLFLPSLHGECHPDT

SEQ ID NO: 144039 - DNA, 1335 bp, Artificial Sequence
  derived and/or modified sequence
atgatcgaggacaacaaggagaacaaggaccacagcctggagagaggcagagccagcctgatcttcagcctgaagaacgaggtgggcggcctgatcaaggccctgaagatcttccaggagaagcacgtgaacctgctgcacatcgagagcagaaagagcaagagaagaaacagcgagttcgagatcttcgtggactgcgacatcaacagagagcagctgaacgacatcttccacctgctgaagagccacaccaacgtgctgagcgtgaacctgcccgacaacttcaccctgaaggaggacggcatggagaccgtgccctggttccccaagaagatcagcgacctggaccactgcgccaacagagtgctgatgtacggcagcgagctggacgccgaccaccccggcttcaaggacaacgtgtacagaaagagaagaaagtacttcgccgacctggccatgaactacaagcacggcgaccccatccccaaggtggagttcaccgaggaggagatcaagacctggggcaccgtgttccaggagctgaacaagctgtaccccacccacgcctgcagagagtacctgaagaacctgcccctgctgagcaagtactgcggctacagagaggacaacatcccccagctggaggacgtgagcaacttcctgaaggagagaaccggcttcagcatcagacccgtggccggctacctgagccccagagacttcctgagcggcctggccttcagagtgttccactgcacccagtacgtgagacacagcagcgaccccttctacacccccgagcccgacacctgccacgagctgctgggccacgtgcccctgctggccgagcccagcttcgcccagttcagccaggagatcggcctggccagcctgggcgccagcgaggaggccgtgcagaagctggccacctgctacttcttcaccgtggagttcggcctgtgcaagcaggacggccagctgagagtgttcggcgccggcctgctgagcagcatcagcgagctgaagcacgccctgagcggccacgccaaggtgaagcccttcgaccccaagatcacctgcaagcaggagtgcctgatcaccaccttccaggacgtgtacttcgtgagcgagagcttcgaggacgccaaggagaagatgagagagttcaccaagaccatcaagagacccttcggcgtgaagtacaacccctacaccagaagcatccagatcctgaaggacaccaagagcatcaccagcgccatgaacgagctgcagcacgacctggacgtggtgagcgacgccctggccaaggtgagcagaaagcccagcatctag

SEQ ID NO: 144040 - DNA, 1401 bp, Artificial Sequence
  derived and/or modified sequence
atgatcgaggacaacaaggagaacaaggaccacagcctggagagaggcagagccagcctgatcttcagcctgaagaacgaggtgggcggcctgatcaaggccctgaagatcttccaggagaagcacgtgaacctgctgcacatcgagagcagaaagagcaagagaagaaacagcgagttcgagatcttcgtggactgcgacatcaacagagagcagctgaacgacatcttccacctgctgaagagccacaccaacgtgctgagcgtgaacctgcccgacaacttcaccctgaaggaggacggcatggagaccgtgccctggttccccaagaagatcagcgacctggaccactgcgccaacagagtgctgatgtacggcagcgagctggacgccgaccaccccggcttcaaggacaacgtgtacagaaagagaagaaagtacttcgccgacctggccatgaactacaagcacggcgaccccatccccaaggtggagttcaccgaggaggagatcaagacctggggcaccgtgttccaggagctgaacaagctgtaccccacccacgcctgcagagagtacctgaagaacctgcccctgctgagcaagtactgcggctacagagaggacaacatcccccagctggaggacgtgagcaacttcctgaaggagagaaccggcttcagcatcagacccgtggccggctacctgagccccagagacttcctgagcggcctggccttcagagtgttccactgcacccagtacgtgagacacagcagcgaccccttctacacccccgagcccgacacctgccacgagctgctgggccacgtgcccctgctggccgagcccagcttcgcccagttcagccaggagatcggcctggccagcctgggcgccagcgaggaggccgtgcagaagctggccacctgctacttcttcaccgtggagttcggcctgtgcaagcaggacggccagctgagagtgttcggcgccggcctgctgagcagcatcagcgagctgaagcacgccctgagcggccacgccaaggtgaagcccttcgaccccaagatcacctgcaagcaggagtgcctgatcaccaccttccaggacgtgtacttcgtgagcgagagcttcgaggacgccaaggagaagatgagagagttcaccaagaccatcaagagacccttcggcgtgaagtacaacccctacaccagaagcatccagatcctgaaggacaccaagagcatcaccagcgccatgaacgagctgcagcacgacctggacgtggtgagcgacgccctggccaagagcctgaacgaggacgtgctgcaggtgagcgtgttcgccctgctgctgttcctgcccagcctgcacggcgagtgccaccccgacacctag

SEQ ID NO: 144041 - DNA, 1335 bp, Artificial Sequence
  derived and/or modified sequence
atgatcgaagataacaaagagaataaagaccacagcctggagcgcgggagggcatctctcatcttcagcttgaaaaatgaggtcgggggtctcattaaagctctgaagatttttcaagaaaaacacgtcaatctcctccacatcgaatcacgcaaaagtaaacgccgcaactccgaattcgaaatctttgtcgactgcgatattaatcgcgaacagttgaacgacatcttccacttgcttaagtctcataccaacgttctgtctgttaacctgcctgataacttcaccctgaaggaagatgggatggagaccgttccctggtttcccaaaaagatcagcgatctggatcactgcgcaaatagagttctcatgtacggctccgaattggatgcagatcaccccggttttaaagacaacgtctatcgcaaacgccggaagtattttgctgatctagctatgaactacaagcacggcgacccgatcccgaaagtagaatttaccgaagaggagatcaagacttgggggactgtcttccaagaattgaataaactctaccctacccacgcctgcagggaatatctcaagaacctgcctctgctctctaaatactgcggatacagagaagataatatccctcagctggaggacgtgtccaattttctgaaggagcgcactggcttttccattaggcctgtagcgggttacctcagccccagagatttcctctcaggccttgccttccgggtgtttcattgtacacagtatgtgagacattcatccgaccccttctacacgcccgagcctgacacctgccatgaattactgggccatgtacctttgctcgctgagcccagctttgctcagttctcacaggaaatcggactggcttccctcggggcgtcagaggaagctgtgcagaaactggccacttgttatttttttacggtggaatttggactctgcaagcaagatggccaattgcgagtgtttggtgccggcttgctttcttctatatctgaacttaagcatgccctgtccgggcacgctaaagtcaaacctttcgatccaaaaattacttgtaaacaggagtgtttgattaccaccttccaggacgtctacttcgtctccgagtccttcgaggatgctaaagagaagatgcgggagtttacaaaaaccattaagagaccatttggggttaagtacaatccctacacccggtccatacagatcctgaaggacacgaaatccatcacgagcgccatgaacgaactccagcacgacctcgacgtggtctcagacgcccttgccaaagtgagtcgtaagccctccatctag

SEQ ID NO: 144042 - DNA, 1401 bp, Artificial Sequence
  derived and/or modified sequence
atgattgaggataacaaggagaacaaggatcactccctggaacggggcagggcatccctgatcttcagtctgaaaaacgaagtcgggggtctcatcaaggctctgaagatcttccaagaaaagcatgtgaacctcctgcatatcgagtccaggaagtcgaagcgtagaaattcagagttcgaaatcttcgttgactgcgatattaacagagagcaactcaatgacatcttccacttgctgaagtcccacacaaacgtgctttccgtgaatctacctgataatttcactctcaaggaggatggaatggaaaccgttccgtggttcccaaagaaaatatcagatctggaccactgtgccaatcgtgtgctgatgtatggttcggaactcgatgctgaccaccctggcttcaaggacaatgtctatcgcaaaaggcgcaagtactttgctgacctcgctatgaactataagcatggagatccaatcccaaaggtcgaatttacagaagaggagatcaagacatggggaaccgtcttccaggaactgaacaagctgtatcccacccatgcctgcagagagtacctaaaaaacctacccctcttgtccaaatattgcgggtaccgcgaagacaatatccctcagttggaggatgtctctaactttctgaaggaacgaaccggattctctatccgcccagtggctggctatctgtctccccgagattttttatcaggactggcattcagggtgtttcactgcacacagtatgtcagacatagttcggaccctttctatactcccgagccagacacctgtcatgaactgctggggcacgtcccattgctggccgagccatccttcgcacagttttcccaagagatcgggttagctagcctcggggctagcgaggaggccgtgcagaagctcgccacgtgttattttttcaccgtcgaattcggtttgtgcaagcaggacggccagttgcgagtgtttggcgctggactgctgtcaagtatctctgagctgaaacatgccctgtctggccatgcaaaggtcaaaccttttgaccccaaaataacatgtaaacaggagtgtctgattactactttccaggatgtctactttgttagtgagtcctttgaagacgctaaggagaagatgagggaattcaccaaaactatcaaacgcccattcggagtgaagtataatccttacactagatctatacaaatcctgaaggataccaagtctatcacctcggcaatgaacgaattgcaacacgacctcgacgtcgtgtcggatgctctggcaaaatctctcaacgaggatgtcttgcaagtcagcgtcttcgccctgctactcttcctgccaagtctgcacggcgaatgtcatcctgatacgtag

SEQ ID NO: 144043 - DNA, 1335 bp, Artificial Sequence
  derived and/or modified sequence
atgattgaggacaacaaggagaacaaggaccacagcctggagcggggccgggccagcctcatcttcagcctgaagaatgaggtgggcggcctcatcaaggccctgaagatcttccaggagaagcacgtgaacctgctgcacatcgagagcaggaagagcaagagaagaaacagcgagtttgagatctttgtggactgtgacatcaaccgggagcagctgaatgacatcttccacctgctgaagagccacaccaacgtgctgtctgtgaacctgcctgacaacttcaccctgaaggaggatggcatggagaccgtgccctggttccccaagaagatcagtgacctggaccactgtgccaacagagtgctgatgtatggcagcgagctggatgctgaccaccctggcttcaaggacaacgtgtacaggaagaggaggaagtactttgctgacctggccatgaactacaagcatggagaccccatccccaaggtggagttcacagaggaggagatcaagacctggggcaccgtcttccaggagctgaacaagctgtaccccacccacgcctgccgggagtacctgaagaacctgcccctgctgagcaagtactgcggctaccgggaggacaacatcccccagctggaggatgtgagcaacttcctgaaggagaggacaggcttcagcatccggcctgtggccggctacctgagcccccgggacttcctgagcggcctggccttccgggtcttccactgcacccagtatgtgcgccacagcagtgaccccttctacaccccagagccagacacctgccacgagctgctgggccacgtgcccctgctggccgagcccagctttgcccagttcagccaggagatcggcctggccagcctgggcgccagcgaggaggccgtgcagaagctggccacctgctacttcttcaccgtggagtttggcctgtgcaagcaggacggccagctgcgggtgtttggagctggcctgctgagcagcatcagcgagctgaagcacgccctgagcggccacgccaaggtgaagccctttgaccccaagatcacctgcaagcaggagtgcctgatcaccaccttccaggatgtgtactttgtgtctgagagctttgaagatgccaaggagaagatgagggagttcaccaagaccatcaagaggccctttggagtgaagtacaacccctacaccaggagcatccagatcctgaaggacaccaagagcatcaccagcgccatgaatgagctgcagcacgacctggatgtggtgtctgatgccctggccaaggtgtccaggaagcccagcatctag

SEQ ID NO: 144044 - DNA, 1401 bp, Artificial Sequence
  derived and/or modified sequence
atgattgaggacaacaaggagaacaaggaccacagcctggagcggggccgggccagcctcatcttcagcctgaagaatgaggtgggcggcctcatcaaggccctgaagatcttccaggagaagcacgtgaacctgctgcacatcgagagcaggaagagcaagagaagaaacagcgagtttgagatctttgtggactgtgacatcaaccgggagcagctgaatgacatcttccacctgctgaagagccacaccaacgtgctgtctgtgaacctgcctgacaacttcaccctgaaggaggatggcatggagaccgtgccctggttccccaagaagatcagtgacctggaccactgtgccaacagagtgctgatgtatggcagcgagctggatgctgaccaccctggcttcaaggacaacgtgtacaggaagaggaggaagtactttgctgacctggccatgaactacaagcatggagaccccatccccaaggtggagttcacagaggaggagatcaagacctggggcaccgtcttccaggagctgaacaagctgtaccccacccacgcctgccgggagtacctgaagaacctgcccctgctgagcaagtactgcggctaccgggaggacaacatcccccagctggaggatgtgagcaacttcctgaaggagaggacaggcttcagcatccggcctgtggccggctacctgagcccccgggacttcctgagcggcctggccttccgggtcttccactgcacccagtatgtgcgccacagcagtgaccccttctacaccccagagccagacacctgccacgagctgctgggccacgtgcccctgctggccgagcccagctttgcccagttcagccaggagatcggcctggccagcctgggcgccagcgaggaggccgtgcagaagctggccacctgctacttcttcaccgtggagtttggcctgtgcaagcaggacggccagctgcgggtgtttggagctggcctgctgagcagcatcagcgagctgaagcacgccctgagcggccacgccaaggtgaagccctttgaccccaagatcacctgcaagcaggagtgcctgatcaccaccttccaggatgtgtactttgtgtctgagagctttgaagatgccaaggagaagatgagggagttcaccaagaccatcaagaggccctttggagtgaagtacaacccctacaccaggagcatccagatcctgaaggacaccaagagcatcaccagcgccatgaatgagctgcagcacgacctggatgtggtgtctgatgccctggccaagagcctgaatgaagatgtgctgcaggtgtctgtgtttgccctgctgctcttcctgcccagcctgcatggagagtgccacccagacacctag

SEQ ID NO: 144045 - DNA, 1335 bp, Artificial Sequence
  derived and/or modified sequence
atgatcgaggacaacaaggagaacaaggaccacagcctggagcgggggcgggcctccttaatattttcgctgaagaacgaagtaggtgggctgatcaaggctctcaagatcttccaggagaagcacgtcaacctcttacacatcgaatcgcggaagtctaaaaggagaaatagcgagtttgaaatttttgtcgactgtgacattaatagggaacagctcaatgatatattccatcttctcaagagccatacaaatgtcctctcggtaaacttgcccgataactttactctgaaagaagacgggatggagaccgttccctggttccctaagaagatcagtgacttagaccattgcgccaaccgcgtgctcatgtatggtagcgagctggacgccgaccaccctgggtttaaagacaacgtgtatcgcaaacgtcgaaaatactttgcagacctagcaatgaactataaacatggtgacccaatcccaaaggtggagttcaccgaagaagaaattaagacttgggggacggtattccaagagctcaacaaactgtacccaacccacgcatgccgggagtacctcaaaaaccttccccttctttcgaagtactgtgggtatcgggaagacaacatcccccagctcgaggacgtaagtaacttcctcaaggagcggactgggttctctatccgtcctgtcgccggctacctgagtcccagggacttcctgtctgggctcgccttccgagtttttcactgcacccagtacgttcgacattcatctgatcccttctacaccccagagcccgacacttgccatgaactactggggcatgtgcccctcctcgcggaaccgtccttcgcacaattttcccaggaaatcggcctcgcaagtcttggagccagcgaggaagccgtccagaagttagccacatgttacttctttacagtggagttcggcttatgcaaacaagatggccaattgagggtgttcggggccggcttactgtcttccatatctgaactcaaacatgctctttccgggcatgccaaggttaaacctttcgaccctaagattacgtgtaagcaggaatgcctcattacaacattccaggacgtgtatttcgtctccgagagcttcgaagatgctaaggagaagatgagggagtttacaaagacgataaagagaccttttggtgtgaaatataatccttacactagaagcatccagatcctgaaagacactaagtcaattacttctgccatgaacgaactgcagcacgacttggatgtggtgtcagatgcacttgccaaggtgagtcgcaagccttccatttag

SEQ ID NO: 144046 - DNA, 1401 bp, Artificial Sequence
  derived and/or modified sequence
atgatcgaggacaacaaggagaacaaggaccacagcctggagcgggggcgggcctccctcatcttctccctgaaaaacgaggtgggtgggttgatcaaggcactcaaaatcttccaggagaaacatgtgaatcttctccatatcgaatcaagaaagtctaaaagaaggaatagcgaattcgaaatatttgtggattgcgatataaatcgagagcagctgaacgacatcttccacctccttaagtcccacacaaatgttttgagtgtcaatttgcccgacaacttcactctgaaggaggacggcatggaaacagtcccctggtttccgaagaagatatccgacctggaccactgtgccaatcgggtgctgatgtatgggagtgagctcgatgccgaccatcccgggtttaaggataacgtctaccgaaagagaagaaagtactttgccgatcttgctatgaattacaaacatggtgaccctattccgaaagttgagttcaccgaagaggagattaaaacatggggcactgtcttccaagaactgaataagctctaccccacccacgcatgtcgcgaatacctgaagaacctgcctctgcttagcaagtattgtggctacagggaagataatatcccacagctggaagacgtgagtaattttctcaaggagcgcaccggcttttctatccggcccgtagccggttatctgagcccacgggacttcctatccggactagcgtttagggtgttccactgcacccaatatgtccgacactcctcggaccctttctacaccccagagcctgacacttgccacgagctgctcgggcatgtaccccttttagcagaaccctccttcgcccagttctctcaggagatcggcctggccagccttggagcatctgaggaggccgttcagaaactggccacctgttacttcttcacagtcgaattcggtctgtgcaagcaagacggccagttgagggtgttcggagctggcttgctgtcttcaatctctgagctcaaacacgctttgagtggtcacgccaaggtcaagccctttgatcccaaaatcacgtgcaaacaggagtgtctcatcacaacatttcaggacgtgtacttcgtctccgaatcctttgaggacgccaaagagaaaatgcgtgagtttacaaagactataaaacgtccttttggagtgaagtacaacccttacactagaagtatacagatactcaaggataccaaaagcatcacaagtgccatgaacgagctccaacatgatctggacgttgtctctgacgcattggccaagtccttgaatgaggatgtactccaggtgtcagtatttgctctgctgttatttctgcctagcctccacggagagtgtcaccctgacacttag

SEQ ID NO: 144047 - DNA, 1335 bp, Artificial Sequence
  derived and/or modified sequence
atgatcgaagacaataaggagaacaaagatcattcactggaacgaggccgagcaagtttaatcttttccttaaagaatgaagtcgggggacttataaaggcgctcaagatattccaggaaaagcacgttaatcttctgcacattgagagtaggaagtctaaaagacgtaattcggagtttgaaatcttcgtcgattgcgacattaatcgcgagcaactgaatgatatattccatctgcttaagtcccatacgaacgtgttgagcgtgaatctgcccgataattttaccctgaaggaagacggaatggagaccgttccctggtttccaaagaagatctcagatcttgatcactgcgcaaaccgggtcctcatgtacgggagcgagcttgatgccgaccaccctgggttcaaggacaacgtatatcgcaagagaaggaagtatttcgcagatctcgcaatgaattacaagcacggggacccaattcctaaagttgaatttacggaagaagagattaagacttggggtacagtgttccaggagcttaacaagctctacccaacccacgcctgtcgcgagtacttgaaaaacctgcccctgttatccaagtactgcggatatcgcgaagataatattccgcagttagaagatgtgtccaactttctgaaagagcggacgggattttctatcaggcctgtagctggctatctctccccccgagatttcctgagtggtcttgcattccgggtctttcattgcacacagtacgttagacattcctccgaccccttttatacacccgagccagacacctgccacgagctgctcggacacgtgcctctgctggctgagccttcattcgcccagttttctcaggaaataggtctggcaagccttggtgccagcgaggaggcagtgcaaaaactggctacttgctatttctttactgtggaatttgggctctgtaagcaagacggccagctgagggtgttcggagccggtctcttatcatctatctccgaactaaaacacgctctcagcggtcacgcgaaggtgaagccatttgatcctaagattacttgtaagcaggagtgcctgatcactactttccaggatgtctactttgtctcagaaagcttcgaagatgccaaggagaagatgcgcgaatttacaaagactattaaaagaccttttggtgtgaagtacaatccatatactaggtcaattcaaatcttgaaagacaccaaatccatcacctccgccatgaatgagttacaacacgatctggatgtagtaagcgacgctcttgcgaaagtgagccgtaagcccagtatctag

SEQ ID NO: 144048 - DNA, 1401 bp, Artificial Sequence
  derived and/or modified sequence
atgatcgaagacaacaaggaaaataaggaccatagcctggaacgcggacgcgcatccttgatcttctcactgaagaacgaggtcggtggcctcattaaggccctgaagatttttcaagagaagcacgttaatcttctgcatattgaatctcgcaagtcaaagagacgcaactctgagtttgaaatcttcgttgattgcgacattaatagagaacagttgaacgatatctttcacttgctgaagtcgcacacaaacgtgctctcggtgaatttgccagacaacttcactcttaaggaggacggaatggaaacagtgccatggtttcccaaaaagatcagtgatctggatcattgtgccaaccgtgttcttatgtacggaagcgaactggatgcagaccacccgggattcaaggacaatgtttatcgcaaaaggcgaaaatatttcgccgacctcgcgatgaattataagcacggagaccctattcccaaggtggaatttactgaggaggagattaaaacatggggcaccgtgtttcaagagctgaataagttgtaccctacgcatgcatgccgggagtacttaaagaatctgccactcctctctaagtattgcggatacagagaagataatatccctcagctggaagatgtgtctaacttcttaaaggagagaactggtttttccattcgccctgtcgcaggctatctgagcccccgtgatttcctctccggactggcattcagggtgtttcattgtacacaatacgtgcggcactcttcggaccctttctacactccggagccagacacatgccatgagctgctgggacacgtgcccttgttagcagaaccctcattcgctcagttctctcaggaaattgggctggccagcttaggcgctagcgaggaggctgtgcaaaagctggccacatgttattttttcaccgtggagtttggtttgtgtaaacaggacgggcagctccgtgtgtttggcgcagggctgctcagcagtatatctgagctgaagcacgcgctctcaggacatgctaaagtgaagcctttcgaccccaagatcacctgcaaacaggagtgtctaatcaccaccttccaagacgtgtatttcgtgagcgagtcctttgaggacgccaaggagaagatgcgagagtttaccaagactattaagcggccatttggagtgaagtacaacccatatacccgatctatccagatcttgaaggatactaagtctatcacgagtgcgatgaatgaactacagcacgacctggacgtagtgagcgacgctcttgccaagtccctgaatgaggatgtcttgcaggtctccgttttcgctctgctcctgttcctgcctagtctgcacggggaatgccaccccgacacctag

SEQ ID NO: 144049 - DNA, 5325 bp, Artificial Sequence
  derived and/or modified sequence
aattctcctggctagcagttatccatctagtgcatatgtatctagagctggccaggcctttagtttacaaaataaatagaaagccttgtccccactctggaggagcttgctgccttgttagaaggtgagatatgttcgaatagaacatttggggaaaccatttgagacctggtataatgaagtgctaagattgtgggcaaggtggggaggaggtaggccttcctgactagtttaggctacaatagttgggaagactgcaagaagccagcaggcttcagtcatgccctaaaagagcgattggtttagaaaaaaaacaaaagggaactactaacatgtattctattctaggcaggtgtcaggcaaagttgtatcttattttggtctcactagattcttgcaaagcttatctgcatatccaggttttataaaaggttaagaaactgaagctcctagaagtaaatgagcccttagttatcaaatattgtctgcattgtgcaacttcttttttagcccgtagtctttgttttcatactttagttttagagaattactccaaattcatcatgattgaagacaataaggagaacaaagaccattccttagaaaggggaagagcaagtctcattttttccttaaagaatgaagttggaggacttataaaagccctgaaaatctttcaggagaagcatgtgaatctgttacatatcgagtcccgaaaatcaaaaagaagaaactcagaatttgagatttttgttgactgtgacatcaacagagaacaattgaatgatatttttcatctgctgaagtctcataccaatgttctctctgtgaatctaccagataattttactttgaaggaagatggtatggaaactgttccttggtttccaaagaagatttctgacctggaccattgtgccaacagagttctgatgtatggatctgaactagatgcagaccatcctggcttcaaagacaatgtctaccgtaaacgtcgaaagtattttgcggacttggctatgaactataaacatggagaccccattccaaaggttgaattcactgaagaggagattaagacctggggaaccgtattccaagagctcaacaaactctacccaacccatgcttgcagagagtatctcaaaaacttacctttgctttctaaatattgtggatatcgggaggataatatcccacaattggaagatgtctccaactttttaaaagagcgtacaggtttttccatccgtcctgtggctggttacttatcaccaagagatttcttatcaggtttagcctttcgagtttttcactgcactcaatatgtgagacacagttcagatcccttctataccccagagccagatacctgccatgaactcttaggtcatgtcccgcttttggctgaacctagttttgcccaattctcccaagaaattggcttggcttctcttggcgcttcagaggaggctgttcaaaaactggcaacgtgctactttttcactgtggagtttggtctatgtaaacaagatggacagctaagagtctttggtgctggcttactttcttctatcagtgaactcaaacatgcactttctggacatgccaaagtaaagccctttgatcccaagattacctgcaaacaggaatgtcttatcacaacttttcaagatgtctactttgtatctgaaagttttgaagatgcaaaggagaagatgagagaatttaccaaaacaattaagcgtccatttggagtgaagtataatccatatacacggagtattcagatcctgaaagacaccaagagcataaccagtgccatgaatgagctgcagcatgatctcgatgttgtcagtgatgcccttgctaaggtcagcaggaagccgagtatctaacagtagccagtcatccaggaacatttgagcatcaattcggaggtctgggccatctcttgctttccttgaacacctgatcctggagggacagcatcttctggccaaacaatattatcgaattccactacttaaggaatcactagtctttgaaaatttgtacctggatattctatttaccacttatttttttgtttagttttatttctttttttttttggtagcagctttaatgagacaatttatataccatacaagccactgaccacccatttttaatagagaagttgtttgacccaatagatagatctaatctcagcctaactctattttccccaatcctccttgagtaaaatgaccctttaggatcgcttagaataacttgaggagtattatggcgctgactcatattgttacctaagatccccttatttctaaagtatctgttacttattgctgaatttgtgccaagctcaatcacattcacactaaaatttaacaggagaccctgctgtctttgttgctagcatgagcaaaagtatagaggcctttgcacatggaggatacctagtaaagagcaagtagtctagtttcaagtgtagtatcttgtagggaaatgggagtagctaagcctggaaaggttgaatggggcataatcattaagactaggctaaaaattcgagactttattttttaggcattagggagccccttcccaagtgactatcttccttgaaactttgttttctttcaatgacatcacacgatactggttttattctggactatctatcctactcatgggtccaagggaaacttagtagagatgcgacttgcatggggctgtactcagacatgtggtcctaggtattataatgggattgtccccagattaacaggaagcattgttatcaaaggaagagttcaaactgagatagataagagaagcacaaagtaaaagatagaaaaaacagtgctgagtactttatttctaaggtataaggtgaggccataaacagaaaggtatgcaatgagagtagaggctgcagaaaaggggaggaaatagaatgtcagaaaggtcaagaagagtggtttaggactgagactgtaagtaatgtaaggattgccaaggaatggtttttatgcagagtcagctgtgtagcacagggagtaagcagtcctgttataaatgggtgaagctgaactccaaaatacaaacttatgtctctttaatttgcccctttcctccctctagtcactaaatgaagatgttcttcaagtttctgtctttgcacttctactctttttgccatctcttcatggggaatgtcacccagatacatgacttcagttcttattttgaatgactcctctatttgcagttataaccctgacatctttcttgaatttttttgccccttaattccaacgaactcctggatgtctatgtagatgtctcataatttaggccaatgctgtacaacttcatgtggcatcatccacatagaatgaataggggttgttcaatatgacagccctgccaagcatctcaaattgaacaggtctataaaggaactcagaatcacttgaatatcacagtccatcagcttcctttcccagtaatttaatttccattaatggtatattaaacatcgtattttcaatcatttttaggtttagtcagctacttaaaaataggctttttcttcacataaataaattgtataccatttaatgtgttttatttcaacagactaatagatcttttaacacttcttagtcctcaaaataaattattaaaaactttgtatttcatgtcatattatataaggaaatagaattttgaagaataattcatgctgttttaaatttttacattgtacattttaatagctaatcaactcttaagtatacatttgatggtaaatagatgctagctaatctagaatcatttgaaatattgattatctgatttatagtttggttgcaaggaaatctactgtaagcaaatcataatagatagcaaatcttagaacatgtagaaaaaaagaaattaaaaaaagcaaatcttagaacatgtagaaaaaggaaattaaaaaatagatagcaaataacacaaattatgcatactatatgtggttattttcatacaactttgataacggtgaagaatcatacttattgaattttaaaatgatgatgtttaaaatcactctatgactaaagcacatgagaataaatgttaaaggcacagccttataatccacaacttcagaacaatggaatttttttttttttttttttttttttttttttttttttttttttgagacggagtcttgctctgtcgcccaggctggagtgcagtggtgcgatcttggctcactgcaagctccacctcccaggttcacggcattctcctgcctctgtctcctgagtagctgggactacaggcgcccgccaccacgtccggctcattttttgtatttttagtagagacaaggtttcaccgtgttagccaggatggtttcaatctcctgacattgtgatctgcccacctcggcctcccaaagtgctgggattacaggcgtgagccactgcacccggccaaacattggaaatttttaatgatggatttcagttcttctcacctctgggtatttgtaatatttggtaaatcaggagtcctgagagtcttagaattttcatgcattttaaatatatgtcttcaaagcacctaggaatatgtaaatagttacccaaatgtgagaacagaattgaactaaaagcttcgtttataatttttttttttttttgagacagagtctcactctgttgcccaggctggagcgcagttgcgtgatttcagctcgctgcaacctgggactgcaggcgtgcttcaccatgccccgctaatttttgtttttttagtagagatggggtttcgccatgttggccaggctggtctcgaacttctgaccgcaggtgatccatccgcctcggcctcccaaagtgctgggattacaagcatgagccaccatgcccagccggttaataattcttaatcagtaaatcattattcaaagacatagttaatatcttcatgacttcttaaggatgctcaaaagctggtcttcagaatacctacatttctttatctacatattctgtcatttggagttatacaagtagtaatgacacaccaaaatgtaaataattattgttagcttttaagttggcttccaaattcaaaaaagaaaaaaatcctgaattctctaaaggaacatatgatagagtccatatgttaattcataggaagtgtttaaggtactatggtctattttggtctaatctttgttttactatgtaatatatatttatgatttacaagtttgttattcagtgggataataaatgaacacaaaattta

SEQ ID NO: 144050 - DNA, 1427 bp, Artificial Sequence
  derived and/or modified sequence
ttttagagaattactccaaattcatcatgattgaagacaataaggagaacaaagaccattccttagaaaggggaagagcaagtctcattttttccttaaagaatgaagttggaggacttataaaagccctgaaaatctttcaggagaagcatgtgaatctgttacatatcgagtcccgaaaatcaaaaagaagaaactcagaatttgagatttttgttgactgtgacatcaacagagaacaattgaatgatatttttcatctgctgaagtctcataccaatgttctctctgtgaatctaccagataattttactttgaaggaagatggtatggaaactgttccttggtttccaaagaagatttctgacctggaccattgtgccaacagagttctgatgtatggatctgaactagatgcagaccatcctggcttcaaagacaatgtctaccgtaaacgtcgaaagtattttgcggacttggctatgaactataaacatggagaccccattccaaaggttgaattcactgaagaggagattaagacctggggaaccgtattccaagagctcaacaaactctacccaacccatgcttgcagagagtatctcaaaaacttacctttgctttctaaatattgtggatatcgggaggataatatcccacaattggaagatgtctccaactttttaaaagagcgtacaggtttttccatccgtcctgtggctggttacttatcaccaagagatttcttatcaggtttagcctttcgagtttttcactgcactcaatatgtgagacacagttcagatcccttctataccccagagccagatacctgccatgaactcttaggtcatgtcccgcttttggctgaacctagttttgcccaattctcccaagaaattggcttggcttctcttggcgcttcagaggaggctgttcaaaaactggcaacgtgctactttttcactgtggagtttggtctatgtaaacaagatggacagctaagagtctttggtgctggcttactttcttctatcagtgaactcaaacatgcactttctggacatgccaaagtaaagccctttgatcccaagattacctgcaaacaggaatgtcttatcacaacttttcaagatgtctactttgtatctgaaagttttgaagatgcaaaggagaagatgagagaatttaccaaaacaattaagcgtccatttggagtgaagtataatccatatacacggagtattcagatcctgaaagacaccaagagcataaccagtgccatgaatgagctgcagcatgatctcgatgttgtcagtgatgcccttgctaagtcactaaatgaagatgttcttcaagtttctgtctttgcacttctactctttttgccatctcttcatggggaatgtcacccagatacatga

SEQ ID NO: 144051 - DNA, 1278 bp, Artificial Sequence
  derived and/or modified sequence
atggacaagaacataggcgaacaattgaacaaagcttacgaagcttttagacaggcctgtatggaccgggattccgcagtgaaggagctgcagcaaaaaacggaaaattatgaacagcggattcgagagcaacaggagcagttatccttgcagcagactataatcgataagctcaagtcccagctcctgttggtgaacagcacccaggacaataactacgggtgtgttcccctgctcgaggacagcgagacccgcaagaataatcttaccttagatcaacctcaggacaaggtgatcagcgggattgcacgcgagaaattacctaaggtacggcggcaggaggtcagtagtccccggaaagaaacaagcgccagaagcttaggcagccctcttctgcacgagcgtgggaacattgagaagacattttgggacctcaaggaagagttccacaagatatgcatgctggccaaagcacagaaagatcacctttccaagttaaacatcccagatacagctaccgagactcagtgcagtgtccccatccagtgcactgataagacagataagcaggaggctctgttcaaaccgcaggctaaagacgatattaacagaggcgctccgtccattacttccgttacacccagaggactgtgtcgcgatgaggaggatacatcattcgaatccttgtccaagttcaacgttaagtttcctccaatggacaatgacagtacctttctccacagtactcccgagaggcctggcatcttgagtccagccacctcagaagccgtttgccaggagaagtttaatatggagttcagagataacccagggaactttgtgaaaactgaagaaaccctttttgaaatacagggcatcgacccaatagcctcggcgatacagaatttgaaaaccaccgataaaacaaaaccttcaaacttggttaatacatgcattcgcacaacattggacagagctgcctgcctccccccaggcgatcacaatgccctgtatgtaaactcgttccccctgcttgatccctctgatgctccgttcccctccctggactcaccgggtaaagccatccgaggtccccagcagccaatttggaagcctttccctaatcaggacagcgattccgtggtgctgtctggcactgatagtgagctccatatcccccgggtgtgcgaattttgccaggcggtgttccctccaagtatcacctctcgcggcgatttccttaggcaccttaacagtcactttaacggggagacctag

SEQ ID NO: 144052 - DNA, 1278 bp, Artificial Sequence
  derived and/or modified sequence
atggacaagaacattggggagcaactgaataaggcttatgaggctttcaggcaggcctgtatggaccgagactcagctgtgaaagaactacagcaaaaaactgagaattatgagcaaaggattcgcgagcaacaggagcagctctccctacagcagaccatcatagacaaactgaagtcacagctattgctcgttaactcgacccaagacaataattacggatgtgtgcctttgctcgaggactctgaaacacgtaaaaataatctcacgctggaccaaccacaggacaaggttatctcaggtattgctagagagaaattgcccaaagtaaggagacaggaggtgagcagccctcgcaaagaaacttccgcccgatcactcgggagccccctgctgcacgaacggggcaacatcgaaaagaccttttgggatttgaaagaagagttccacaaaatatgtatgctggccaaggcacagaaagatcacctcagtaagctgaatattccagatactgccaccgagacacagtgctctgtgccaattcagtgtacagataagactgacaaacaggaagcactgtttaagccccaggcaaaggatgatatcaatcgaggcgcccccagtatcacctcggttacccctcgaggcctgtgccgtgatgaagaggataccagcttcgagtccctgtccaagttcaatgttaagttccctccaatggataacgatagcactttcctgcactcgaccccagaacgtcccgggattctgtccccagccactagtgaagcagtctgccaggagaaattcaatatggaatttcgcgataaccccggtaacttcgtgaagactgaagagaccctgttcgagatccaaggcatcgatccgatcgctagtgcaattcaaaacctgaagaccactgacaaaacgaaaccatccaacttagtgaatacatgcattcggacgacgttggacagggcagcctgcctgcccccaggcgatcataacgccctgtatgtgaacagttttccactgctggacccaagcgacgcacccttcccttcgttggacagccctggaaaagccataagagggccacagcagcccatatggaagcccttccccaaccaggactctgactccgttgtacttagcggcaccgacagcgagcttcacattccacgggtgtgcgaattctgtcaggcagtgttcccacccagtatcacctcgcgcggtgatttcctgaggcaccttaacagccattttaatggagagacttag

SEQ ID NO: 144053 - DNA, 1278 bp, Artificial Sequence
  derived and/or modified sequence
atggacaagaacattggagagcagctgaacaaggcctatgaggccttccggcaggcctgcatggaccgggacagcgctgtgaaggagctgcagcagaagacagaaaattatgagcagaggatccgggagcagcaggagcagctgagcctgcagcagaccatcatcgacaagctgaagagccagctgctgctggtgaacagcacccaggacaacaactacggctgtgtgcccctgctggaggacagcgagaccaggaagaacaacctgaccctggaccagccccaggacaaggtgatcagcggcatcgcccgggagaagctgcccaaggtgcggcggcaggaggtgagcagccccaggaaggagaccagcgcccggagcctgggcagccccctgctgcacgagcggggcaacatcgagaagaccttctgggacctgaaggaggagttccacaagatctgcatgctggccaaggcccagaaggaccacctgagcaagctgaacatcccagacacagccacagagacccagtgcagcgtgcccatccagtgcacagacaagacagacaagcaggaggccctcttcaagccccaggccaaggatgacatcaacagaggagcccccagcatcacctctgtgaccccccggggcctgtgcagagatgaggaggacaccagctttgagagcctgagcaagttcaacgtgaagtttcctcccatggacaatgacagcaccttcctgcacagcaccccagagaggcctggcatcctgagccctgccaccagcgaggccgtgtgccaggagaagttcaacatggagttccgggacaaccctggcaactttgtgaagacagaggagaccctgtttgagatccagggcatcgaccccatcgccagcgccatccagaacctgaagaccacagacaagaccaagcccagcaacctggtgaacacctgcatccgcaccaccctggaccgggccgcctgcctgcccccaggggaccacaatgccctgtatgtgaacagcttccccctgctggaccccagtgatgcccccttccccagcctggacagccctgggaaggccatccggggcccccagcagcccatctggaagcccttccccaaccaggacagcgacagcgtggtgctgagcggcacagacagcgagctgcacatcccccgggtgtgtgagttctgccaggccgtgttcccccccagcatcaccagcagaggagacttcctgcggcacctgaacagccacttcaacggggagacctag

SEQ ID NO: 144054 - DNA, 1278 bp, Artificial Sequence
  derived and/or modified sequence
atggacaagaacatcggcgagcagctgaacaaggcctacgaggccttccggcaggcctgtatggatagggactctgctgtcaaagaattacagcagaagacagaaaattatgagcagcggatcagggaacagcaggaacagctgtccctgcagcaaaccatcattgataaacttaaatctcagctcttgctggtcaacagcacgcaagacaacaattatgggtgcgtccccctgttagaggacagcgaaactcgcaagaacaatcttaccctggatcagccacaggacaaggtgattagcggaattgctagagaaaagctgcctaaggtgcgaaggcaagaggtgagttcacctagaaaagaaacaagtgctaggtcactggggtccccgttgctccacgaacgaggcaatatcgagaagactttttgggacctgaaggaggagtttcataagatttgcatgctggccaaagctcaaaaggatcacttatctaaacttaacataccggataccgctactgaaactcaatgctccgtccccatacagtgtacggataagacagataaacaagaagccctttttaagccccaggctaaagatgatatcaacagaggtgccccaagtatcactagtgtgacacccaggggactgtgtagggatgaggaagacacctccttcgagtccctcagcaaatttaacgtcaagtttccacccatggacaatgatagtacttttctccactctactccggaaagaccaggaattctaagtcccgccacttcagaggccgtctgtcaggagaaattcaatatggagttcagggacaatcctgggaactttgtgaaaacggaggagacgcttttcgaaatacaaggaatagacccaatagcctccgcaattcagaacctgaagacaaccgacaagactaaaccaagcaacctcgttaatacatgtatccgcactactctcgaccgtgcagcttgcctgccaccaggagaccataacgcactgtacgtaaatagttttccactattggatccttccgacgcgcccttcccgagcctagacagcccaggcaaggctattagaggaccgcagcagccgatttggaagcctttccccaaccaggactccgatagcgtagtcctgagtggcacggactccgagctgcacatccctagagtgtgtgaattctgccaggctgtcttccctccttcgataacgagcaggggagactttttgagacacctcaacagtcattttaacggggaaacttag

SEQ ID NO: 144055 - DNA, 1278 bp, Artificial Sequence
  derived and/or modified sequence
atggacaagaacatcggcgagcagctgaacaaggcctacgaggccttccgccaggcctgtatggatcgtgattccgcagttaaagagttacagcagaaaactgagaactacgagcaaagaatccgcgagcagcaggagcagctttcccttcagcagacaatcattgacaagctcaagtcccaactgctgctggtcaactccactcaggacaacaattacgggtgtgtcccactgctcgaagactctgaaacacgaaagaacaacctgaccctggaccagcctcaagacaaggtaatatctggcatcgcaagagagaaattgccgaaggtccgtagacaggaggtgtcgtccccccgaaaagaaacctctgcgcgatctcttgggtctccccttctgcatgagcgcggcaacattgaaaagaccttctgggatctgaaggaggagtttcataaaatctgtatgctcgccaaagcccagaaggatcacctcagcaaattaaacataccggacacggccacagagactcagtgctctgtgccaatccagtgcacagataaaaccgacaagcaggaagctctgttcaagccccaggctaaggatgacattaatagaggggcacccagcatcacttctgtgacacctcgcggcttgtgccgggacgaggaggacacatcattcgagtctttatcgaagtttaacgtaaaatttccaccaatggataacgacagtaccttcctccacagcacacctgagcggccaggcattcttagtcctgccacatccgaggccgtgtgtcaggagaagtttaatatggagttcagggacaaccccgggaacttcgtgaaaaccgaagagacacttttcgagattcagggtattgatccaattgcttctgccatccagaaccttaagaccaccgacaaaaccaaaccttcaaatctggtcaatacttgcatacgcactaccttggatagggccgcctgcctgccaccaggtgaccacaacgccctctacgtaaatagtttccccttgctcgaccctagtgacgccccatttccctcgctcgactcccctgggaaggctatcaggggaccacagcaaccaatctggaagcctttccccaatcaagattcggactctgtggtgctaagtggaactgactccgaactgcacattccccgcgtgtgcgaattttgccaagcagttttccccccaagcatcacctctcgcggtgattttctgagacatctgaattctcacttcaacggcgaaacctag

SEQ ID NO: 144056 - DNA, 1278 bp, Artificial Sequence
  derived and/or modified sequence
atggacaaaaatatcggggaacagctaaacaaagcttacgaggcattcaggcaggcatgcatggaccgcgactccgctgttaaagagttacagcagaagacagagaattatgagcagcgtataagggagcagcaggaacagctctcactccagcaaaccatcattgacaagctgaaatctcaactcctgctcgtgaacagtactcaagataataattatgggtgtgtccctctgttggaagactccgagactagaaaaaacaatctcaccctcgaccagccacaggataaagtgatctctgggatcgccagagaaaagctgccaaaagtgcggagacaggaagttagcagcccccgtaaggaaacctcagctagatctctaggaagcccattgcttcacgagcgcggaaacatcgaaaaaactttctgggacttaaaggaggaatttcataagatctgtatgttggcgaaagctcagaaggatcatctgtcaaagctaaatatccccgataccgcaactgaaacccagtgtagcgtgcccattcagtgtacagacaaaaccgataagcaggaggctctgttcaaacctcaagcgaaagatgatatcaaccgcggagcgccatccatcacaagcgtgactccccgtggcctgtgcagggacgaagaggatacctcattcgagagcctgtctaagttcaatgttaaattcccgccaatggacaatgattccacattcctgcacagcactcccgaacgccctggcatcttatctcctgctactagtgaggctgtatgccaggaaaagttcaatatggagttcagagacaaccctggtaacttcgtcaaaacagaggaaacactgttcgagatccaaggcatcgaccccatcgcttccgcgatccagaacttaaagacaaccgacaaaaccaaaccaagcaacttggtcaatacctgtatcaggaccacactggatagagccgcttgcttgcccccaggcgaccataatgcgctatacgtaaatagcttccctctcctcgatcctagtgatgcaccgtttccatctttagactccccaggaaaagctattagggggccacaacaacctatatggaagcccttccccaaccaggatagcgatagcgtcgtcctgagtggaacagatagcgaattgcacattcctcgggtgtgtgagttctgtcaggccgtctttccgccttccatcacatcaaggggagatttcctgcggcacctgaattcccactttaacggcgagacctag

SEQ ID NO: 144057 - DNA, 1278 bp, Artificial Sequence
  derived and/or modified sequence
atggataagaatatcggggaacagctgaacaaagcttacgaagctttcagacaggcctgcatggatcgggactccgctgtgaaagaactccagcagaagaccgagaactacgagcaacgaattcgcgagcaacaagagcagctgtctctgcagcagacaataatagacaagctgaaatctcagctgctgttggtgaatagtacccaggacaacaactacgggtgcgtgccactcttggaggatagcgaaacacgcaagaataacttaacgctggaccagcctcaggacaaggtcatttctggaatcgccagggaaaagctccctaaagtgcgtcggcaggaagtgtcgtccccaagaaaggagacatcagcacgatctttggggagtcctcttctccacgagcgtgggaacatcgaaaagaccttctgggatctgaaagaagagtttcataagatatgtatgttagcaaaagcccagaaagatcatttatccaagctgaacatcccggacaccgcaacggagacacagtgctcagtcccgattcagtgcaccgacaagacagataagcaggaagcattgtttaaaccacaagcaaaggacgatatcaatcggggtgctccctccataacaagcgtgaccccccgaggactgtgtagggacgaagaggatacatctttcgaatccctgtcaaaattcaatgtgaagttcccacctatggacaacgatagcacattcctgcactcaactcccgagagacccggaatattgagccccgcaactagtgaagcggtgtgccaggagaagttcaacatggaatttcgcgacaatcctggtaatttcgttaaaactgaggaaactttatttgaaatacagggaatcgaccctatcgcttctgcaatccagaatttaaagaccactgataagacaaagccttcgaacctggtaaacacttgcattcggacgaccctggaccgggctgcatgcctccctccaggagaccataatgccctgtatgtgaattctttccctttgcttgatccctcagatgcaccttttccgagcctggattctcccggaaaggccattcggggtccgcagcagccaatttggaagcccttccccaatcaggattcagatagcgtggtgctgtcaggcactgacagcgagctgcatattccacgtgtttgcgagttttgccaagccgttttccctccatccattacatctagaggagattttctacggcacttgaattctcatttcaacggtgaaacttag

SEQ ID NO: 144058 - DNA, 1278 bp, Artificial Sequence
  derived and/or modified sequence
atggacaagaacatcggcgagcagctgaacaaggcctacgaggccttcagacaggcctgcatggacagagacagcgccgtgaaggagctgcagcagaagaccgagaactacgagcagagaatcagagagcagcaggagcagctgagcctgcagcagaccatcatcgacaagctgaagagccagctgctgctggtgaacagcacccaggacaacaactacggctgcgtgcccctgctggaggacagcgagaccagaaagaacaacctgaccctggaccagccccaggacaaggtgatcagcggcatcgccagagagaagctgcccaaggtgagaagacaggaggtgagcagccccagaaaggagaccagcgccagaagcctgggcagccccctgctgcacgagagaggcaacatcgagaagaccttctgggacctgaaggaggagttccacaagatctgcatgctggccaaggcccagaaggaccacctgagcaagctgaacatccccgacaccgccaccgagacccagtgcagcgtgcccatccagtgcaccgacaagaccgacaagcaggaggccctgttcaagccccaggccaaggacgacatcaacagaggcgcccccagcatcaccagcgtgacccccagaggcctgtgcagagacgaggaggacaccagcttcgagagcctgagcaagttcaacgtgaagttcccccccatggacaacgacagcaccttcctgcacagcacccccgagagacccggcatcctgagccccgccaccagcgaggccgtgtgccaggagaagttcaacatggagttcagagacaaccccggcaacttcgtgaagaccgaggagaccctgttcgagatccagggcatcgaccccatcgccagcgccatccagaacctgaagaccaccgacaagaccaagcccagcaacctggtgaacacctgcatcagaaccaccctggacagagccgcctgcctgccccccggcgaccacaacgccctgtacgtgaacagcttccccctgctggaccccagcgacgcccccttccccagcctggacagccccggcaaggccatcagaggcccccagcagcccatctggaagcccttccccaaccaggacagcgacagcgtggtgctgagcggcaccgacagcgagctgcacatccccagagtgtgcgagttctgccaggccgtgttcccccccagcatcaccagcagaggcgacttcctgagacacctgaacagccacttcaacggcgagacctag

SEQ ID NO: 144059 - protein, 223 aa, Artificial Sequence [sequence omitted]

SEQ ID NO: 144060 - protein, 213 aa, Artificial Sequence
  derived and/or modified sequence
MQLKPMEINPEMLNKVLSRLGVAGQWRFVDVLGLEEESLGSVPAPACALLLLFPLTAQHENFRKKQIEELKGQEVSPKVYFMKQTIGNSCGTIGLIHAVANNQDKLGFEDGSVLKQFLSETEKMSPEDRAKCFEKNEAIQAAHDAVAQEGQCRVDDKVNFHFILFNNVDGHLYELDGRMPFPVNHGASSEDTLLKDAAKVCREFTEREQGEVR

SEQ ID NO: 144061 - protein, 58 aa, Artificial Sequence
  derived and/or modified sequence
MQLKPMEINPEMLNKVLSRLGVAGQWRFVDVLGLEEESLGSVPAPACALLLLFPLTAQ

SEQ ID NO: 144062 - DNA, 672 bp, Artificial Sequence
  derived and/or modified sequence
atgcagctgaagcccatggagatcaaccccgagatgctgaacaaggtgctgagcagactgggcgtggccggccagtggagattcgtggacgtgctgggcctggaggaggagagcctgggcagcgtgcccgcccccgcctgcgccctgctgctgctgttccccctgaccgcccagcacgagaacttcagaaagaagcagatcgaggagctgaagggccaggaggtgagccccaaggtgtacttcatgaagcagaccatcggcaacagctgcggcaccatcggcctgatccacgccgtggccaacaaccaggacaagctgggcttcgaggacggcagcgtgctgaagcagttcctgagcgagaccgagaagatgagccccgaggacagagccaagtgcttcgagaagaacgaggccatccaggccgcccacgacgccgtggcccaggagggccagtgcagagtggacgacaaggtgaacttccacttcatcctgttcaacaacgtggacggccacctgtacgagctggacggcagaatgcccttccccgtgaaccacggcgccagcagcgaggacaccctgctgaaggacgccgccaaggtgtgcagagagttcaccgagagagagcagggcgaggtgagattcagcgccgtggccctgtgcaaggccgcctag

SEQ ID NO: 144063 - DNA, 642 bp, Artificial Sequence
  derived and/or modified sequence
atgcagctgaagcccatggagatcaaccccgagatgctgaacaaggtgctgagcagactgggcgtggccggccagtggagattcgtggacgtgctgggcctggaggaggagagcctgggcagcgtgcccgcccccgcctgcgccctgctgctgctgttccccctgaccgcccagcacgagaacttcagaaagaagcagatcgaggagctgaagggccaggaggtgagccccaaggtgtacttcatgaagcagaccatcggcaacagctgcggcaccatcggcctgatccacgccgtggccaacaaccaggacaagctgggcttcgaggacggcagcgtgctgaagcagttcctgagcgagaccgagaagatgagccccgaggacagagccaagtgcttcgagaagaacgaggccatccaggccgcccacgacgccgtggcccaggagggccagtgcagagtggacgacaaggtgaacttccacttcatcctgttcaacaacgtggacggccacctgtacgagctggacggcagaatgcccttccccgtgaaccacggcgccagcagcgaggacaccctgctgaaggacgccgccaaggtgtgcagagagttcaccgagagagagcagggcgaggtgagatag

SEQ ID NO: 144064 - DNA, 177 bp, Artificial Sequence
  derived and/or modified sequence
atgcagctgaagcccatggagatcaaccccgagatgctgaacaaggtgctgagcagactgggcgtggccggccagtggagattcgtggacgtgctgggcctggaggaggagagcctgggcagcgtgcccgcccccgcctgcgccctgctgctgctgttccccctgaccgcccagtag

SEQ ID NO: 144065 - DNA, 672 bp, Artificial Sequence
  derived and/or modified sequence
atgcagttaaaacccatggagatcaacccggagatgctgaataaggttctgagccgcttaggcgtcgccgggcagtggaggtttgttgatgtgctgggtctggaggaggagtcgctgggctcagtcccagcccctgcttgtgccttgcttcttttgtttcccctgactgcccagcatgaaaactttagaaagaagcagatagaagaactgaagggacaagaggtgtcccctaaggtatattttatgaagcaaaccatcgggaacagctgtgggactattggtctgattcacgctgttgcaaataaccaggacaagctggggttcgaggacggctcggttctgaagcagtttctctccgaaacagagaagatgtctccggaagatcgcgccaagtgctttgagaaaaacgaagcgattcaggctgcacacgatgctgtagctcaagaaggacagtgccgcgtcgatgataaagtcaattttcactttatcctttttaataacgtggatggccacctgtatgaacttgatggtagaatgccattcccagttaatcacggggcttcttccgaagacacgctcttgaaggatgccgccaaggtctgtagagagttcaccgagagagagcagggggaggtgcgcttcagcgccgtcgccctatgtaaggcagcctag

SEQ ID NO: 144066 - DNA, 642 bp, Artificial Sequence
  derived and/or modified sequence
atgcagctgaagcctatggaaatcaacccagaaatgctcaataaggtattgtctcgtttaggtgtggctggtcagtggagatttgtggacgtgctggggctagaagaggaaagtctgggctcggttcctgctccagcttgcgcactactcctgttgttcccactgacggctcaacatgagaacttccgcaagaagcagatcgaggagttaaagggccaggaggtgagccccaaggtatattttatgaagcaaacaatagggaactcttgtggaactattggactaatacatgccgtggccaacaatcaggacaagcttgggtttgaggacgggagcgtcctgaaacagtttctcagtgagactgaaaagatgagccccgaagacagagcaaagtgtttcgaaaagaatgaggctattcaggccgctcacgatgccgtagcccaggaggggcagtgtagagtcgacgataaggtcaattttcacttcatcctgtttaataacgtggatgggcatttgtatgaactggacgggcgcatgccattccccgtcaaccacggggcctctagcgaggacactctcctgaaagacgccgctaaagtatgtcgcgagttcacagaacgggagcagggcgaggttcggtag

SEQ ID NO: 144067 - DNA, 177 bp, Artificial Sequence
  derived and/or modified sequence
atgcagctgaagccgatggaaataaacccagaaatgcttaataaggtgctctcaagactaggggtagcaggtcagtggcgttttgtggacgtgctcggtctcgaggaagaatctctgggcagcgttcctgccccagcttgcgcccttctgctgctcttcccgctcactgctcaatag

SEQ ID NO: 144068 - DNA, 672 bp, Artificial Sequence
  derived and/or modified sequence
atgcagctgaagcccatggagatcaaccctgagatgctgaacaaggtgctgagccggctgggcgtggccggccagtggaggtttgtggatgtgctgggcctggaggaggagagcctgggctctgtgcctgccccagcctgtgccctgctgctgctcttccccctgacagcccagcacgagaacttcaggaagaagcagatcgaggagctgaagggccaggaggtgagccccaaggtgtacttcatgaagcagaccatcggcaacagctgtggcaccatcggcctcatccatgctgtggccaacaaccaggacaagctgggctttgaagatggctctgtgctgaagcagttcctgtctgaaacagagaagatgagcccagaagatcgggccaagtgctttgagaagaatgaggccatccaggccgcccatgatgctgtggcccaggagggccagtgccgggtggatgacaaggtgaacttccacttcatcctcttcaacaacgtggatggccacctgtatgagctggatggccgcatgcccttccctgtgaaccacggggccagcagcgaggacaccctgctgaaggatgctgccaaggtgtgccgggagttcacagagcgggagcagggcgaggtgcgcttctctgctgtggccctgtgcaaggccgcctag

SEQ ID NO: 144069 - DNA, 642 bp, Artificial Sequence
  derived and/or modified sequence
atgcagctgaagcccatggagatcaaccctgagatgctgaacaaggtgctgagccggctgggcgtggccggccagtggaggtttgtggatgtgctgggcctggaggaggagagcctgggctctgtgcctgccccagcctgtgccctgctgctgctcttccccctgacagcccagcacgagaacttcaggaagaagcagatcgaggagctgaagggccaggaggtgagccccaaggtgtacttcatgaagcagaccatcggcaacagctgtggcaccatcggcctcatccatgctgtggccaacaaccaggacaagctgggctttgaagatggctctgtgctgaagcagttcctgtctgaaacagagaagatgagcccagaagatcgggccaagtgctttgagaagaatgaggccatccaggccgcccatgatgctgtggcccaggagggccagtgccgggtggatgacaaggtgaacttccacttcatcctcttcaacaacgtggatggccacctgtatgagctggatggccgcatgcccttccctgtgaaccacggggccagcagcgaggacaccctgctgaaggatgctgccaaggtgtgccgggagttcacagagcgggagcagggcgaggtgaggtag

SEQ ID NO: 144070 - DNA, 177 bp, Artificial Sequence
  derived and/or modified sequence
atgcagctgaagcccatggagatcaaccctgagatgctgaacaaggtgctgagccggctgggcgtggccggccagtggaggtttgtggatgtgctgggcctggaggaggagagcctgggctctgtgcctgccccagcctgtgccctgctgctgctcttccccctgacagcccagtag

SEQ ID NO: 144071 - DNA, 672 bp, Artificial Sequence
  derived and/or modified sequence
atgcagctgaagcccatggagatcaaccccgagatgctgaacaaggtgctctcccggttaggtgttgcaggccagtggcggttcgtggacgtgctcggcttggaagaagagtccctaggaagtgtccccgcccctgcttgcgcactgctcctgctgtttccactgaccgctcagcatgaaaatttccgtaagaagcaaatcgaggagctcaaggggcaggaagtaagcccgaaggtatacttcatgaagcagaccatcggaaattcctgtggcaccattggactcatccacgcagtagcaaataaccaggacaagctgggctttgaggatggctccgtgctcaaacagttcctgagtgagaccgagaagatgagtcccgaagacagagccaagtgtttcgagaagaatgaggccatccaggccgcacatgacgcagtagcacaggaaggccagtgtcgggtcgacgacaaagtgaattttcattttattctgtttaataatgtggatggacacctgtatgagctggatggtcgcatgccttttcccgtcaatcatggtgcctcctcggaggataccctgctgaaggacgccgcaaaggtgtgtagggagtttaccgagagagagcagggagaagtaagattctctgccgtggcactatgtaaagccgcatag

SEQ ID NO: 144072 - DNA, 642 bp, Artificial Sequence
  derived and/or modified sequence
atgcagctgaagcccatggagatcaaccccgagatgctgaacaaggtgctgtcacggctgggcgtggcaggccaatggagattcgtcgacgtgttggggctggaagaagagtccctcggatctgtacctgcccctgcatgtgcactgctgttgttgtttccattaacagcccagcacgaaaactttaggaagaaacaaatagaggaactgaaaggccaggaagtgtcccccaaggtgtattttatgaagcagacaatcggcaacagctgcggtactattgggctcatccacgccgtggctaacaatcaagacaagctgggtttcgaggatggctccgtcctcaaacagttcctctccgagaccgagaagatgtctccagaggaccgggccaaatgctttgagaagaacgaggctatacaggccgcacacgacgctgtggcccaagaggggcagtgtcgcgtggatgataaggtgaattttcactttatactgttcaacaacgtggatggtcacctctatgagctcgacgggcggatgccgtttcctgtgaaccatggggcgagttcagaggacacgctgctcaaggacgcagcaaaggtgtgcagagagttcactgagagggagcaaggcgaagttcgctag

SEQ ID NO: 144073 - DNA, 177 bp, Artificial Sequence
  derived and/or modified sequence
atgcagctgaagcccatggagatcaaccccgagatgctgaacaaggtgttatcccgccttggagtagccggtcagtggaggtttgtggacgtgctgggccttgaagaagagagcctgggatctgtgcccgctcctgcatgcgctcttttgctgctcttccctcttaccgcccagtag

SEQ ID NO: 144074 - DNA, 672 bp, Artificial Sequence
  derived and/or modified sequence
atgcagctgaagcctatggaaataaacccagagatgttgaacaaggtgcttagccggttgggggttgccggacaatggaggttcgtggatgtgctaggattggaggaggagtcactggggtctgtgcccgctcccgcatgtgctcttcttctgctatttcccctgacggcccagcacgaaaacttcagaaaaaagcagattgaggagctcaaagggcaggaagtgtcgcccaaggtgtacttcatgaagcagacaattgggaactcatgtggcacgatcgggctgatccatgcagttgccaacaaccaggacaaattgggctttgaggacggaagcgtcctgaaacagtttctgagcgagactgagaaaatgtcccccgaagatcgagcgaagtgctttgagaagaatgaagccattcaggccgctcatgatgccgttgcccaggagggccagtgccgggtggatgacaaggtcaattttcactttattctcttcaacaatgtggatgggcacctgtatgaactcgacggtaggatgcctttccctgttaatcatggggcaagtagcgaagacaccctcctgaaggatgccgcaaaggtgtgtcgggagttcacggaaagggagcagggcgaggtccgattttccgctgtcgccctctgcaaggctgcatag

SEQ ID NO: 144075 - DNA, 642 bp, Artificial Sequence
  derived and/or modified sequence
atgcagctgaagcccatggagatcaatcctgagatgctgaataaagtgctttcccgcctcggcgtggccggtcagtggagattcgttgacgttctcggactggaggaggaaagtttgggcagtgtgcccgctccagcctgcgcattgctattactgttccctctgactgcacagcatgagaatttccgaaaaaagcagattgaggagctaaaggggcaggaggttagcccaaaggtgtatttcatgaaacagaccattggcaacagctgcggtactataggcctgattcatgccgtggcaaataatcaggacaagttgggtttcgaagatggatctgtgctgaaacagtttttgtcggaaacggagaagatgtcacccgaagaccgggctaaatgcttcgagaaaaatgaagctatacaggctgcccacgatgccgtggcccaggaaggccaatgtagagtggacgacaaggttaatttccattttattctcttcaataatgtagatggacatctctacgagctagatgggaggatgcctttcccagttaatcacggggctagcagtgaggatactctgttgaaggacgcagcaaaggtatgcagggagtttacggagcgagaacaaggtgaagtgagatag

SEQ ID NO: 144076 - DNA, 177 bp, Artificial Sequence
  derived and/or modified sequence
atgcagctgaaaccaatggagatcaatccagaaatgctgaataaggtcctcagcagactgggagttgccggacagtggagatttgtggatgtcctcggcctagaggaggagtctcttggtagcgtgcctgccccagcctgcgcactactgctcttatttcctctcacagcgcaatag

SEQ ID NO: 144077 - DNA, 1172 bp, Artificial Sequence
  derived and/or modified sequence
tttccccctcgcttggttctgcccctgctccccctgcacaggcctcacagtgcgtctggccggcgctttatagctgcagcctgggcggctccgctagctgtttttcgtcttccctaggctatttctgccgggcgctccgcgaagatgcagctcaagccgatggagatcaaccccgagatgctgaacaaagtgctgtcccggctgggggtcgccggccagtggcgcttcgtggacgtgctggggctggaagaggagtctctgggctcggtgccagcgcctgcctgcgcgctgctgctgctgtttcccctcacggcccagcatgagaacttcaggaaaaagcagattgaagagctgaagggacaagaagttagtcctaaagtgtacttcatgaagcagaccattgggaattcctgtggcacaatcggacttattcacgcagtggccaataatcaagacaaactgggatttgaggatggatcagttctgaaacagtttctttctgaaacagagaaaatgtcccctgaagacagagcaaaatgctttgaaaagaatgaggccatacaggcagcccatgatgccgtggcacaggaaggccaatgtcgggtagatgacaaggtgaatttccattttattctgtttaacaacgtggatggccacctctatgaacttgatggacgaatgccttttccggtgaaccatggcgccagttcagaggacaccctgctgaaggacgctgccaaggtctgcagagaattcaccgagcgtgagcaaggagaagtccgcttctctgccgtggctctctgcaaggcagcctaatgctctgtgggagggactttgctgatttcccctcttcccttcaacatgaaaatatatacccccccatgcagtctaaaatgcttcagtacttgtgaaacacagctgttcttctgttctgcagacacgccttcccctcagccacacccaggcacttaagcacaagcagagtgcacagctgtccactgggccattgtggtgtgagcttcagatggtgaagcattctccccagtgtatgtcttgtatccgatatctaacgctttaaatggctactttggtttctgtctgtaagttaagaccttggatgtggtttaattgtttgtcctcaaaaggaataaaacttttctgctgataagata

SEQ ID NO: 144078 - DNA, 917 bp, Artificial Sequence
  derived and/or modified sequence
ggcccggccgtaccactccgcgctgcgcacggggggctatttctgccgggcgctccgcgaagatgcagctcaagccgatggagatcaaccccgagatgctgaacaaagtgctgtcccggctgggggtcgccggccagtggcgcttcgtggacgtgctggggctggaagaggagtctctgggctcggtgccagcgcctgcctgcgcgctgctgctgctgtttcccctcacggcccagcatgagaacttcaggaaaaagcagattgaagagctgaagggacaagaagttagtcctaaagtgtacttcatgaagcagaccattgggaattcctgtggcacaatcggacttattcacgcagtggccaataatcaagacaaactgggatttgaggatggatcagttctgaaacagtttctttctgaaacagagaaaatgtcccctgaagacagagcaaaatgctttgaaaagaatgaggccatacaggcagcccatgatgccgtggcacaggaaggccaatgtcgggtagatgacaaggtgaatttccattttattctgtttaacaacgtggatggccacctctatgaacttgatggacgaatgccttttccggtgaaccatggcgccagttcagaggacaccctgctgaaggacgctgccaaggtctgcagagaattcaccgagcgtgagcaaggagaagtccgcttctctgccgtggctctctgcaaggcagcctaatgctctgtgggagggactttgctgatttcccctcttcccttcaacatgaaaatatatacccccccatgcagtctaaaatgcttcagtacttgtgaaacacagctgttcttctgttctgcagacacgccttcccctcagccacacccaggcacttaagcacaagcagagtgcacagctgtccac

SEQ ID NO: 144079 - DNA, 445 bp, Artificial Sequence
  derived and/or modified sequence
gttttattctaggtagtcacttaaaaacgaacctcggtactggtctgacttaacatggaggaggaattgtctaagagactcgagctttagagtaattgggatggtgaaaggatgggtttccagaaacttcgcccaaaattaaagactccatcaaaaggactgctccatacactcaaggaacacccaccaacaaatcccgtctccacaaccaccagattatctcaccggcgagtgagactgcaaggctatttctgccgggcgctccgcgaagatgcagctcaagccgatggagatcaaccccgagatgctgaacaaagtgctgtcccggctgggggtcgccggccagtggcgcttcgtggacgtgctggggctggaagaggagtctctgggctcggtgccagcgcctgcctgcgcgctgctgctgctgtttcccctcacggcccag

SEQ ID NO: 144080 - protein, 157 aa, Artificial Sequence
  derived and/or modified sequence
MATPPKRRAVEATGEKVLRYETFISDVLQRDLRKVLDHRDKVYEQLAKYLQLRNVIERLQEAKHSELYMQVDLGCNFFVDTVVPDTSRIYVALGYGFFLELTLAEALKFIDRKSSLLTELSNSLTKDSMNIKAHIHMLLEGLRELQGLQNFPEKPHH

SEQ ID NO: 144081 - protein, 92 aa, Artificial Sequence [sequence omitted]

SEQ ID NO: 144082 - DNA, 474 bp, Artificial Sequence
  derived and/or modified sequence
atggccaccccccccaagagaagagccgtggaggccaccggcgagaaggtgctgagatacgagaccttcatcagcgacgtgctgcagagagacctgagaaaggtgctggaccacagagacaaggtgtacgagcagctggccaagtacctgcagctgagaaacgtgatcgagagactgcaggaggccaagcacagcgagctgtacatgcaggtggacctgggctgcaacttcttcgtggacaccgtggtgcccgacaccagcagaatctacgtggccctgggctacggcttcttcctggagctgaccctggccgaggccctgaagttcatcgacagaaagagcagcctgctgaccgagctgagcaacagcctgaccaaggacagcatgaacatcaaggcccacatccacatgctgctggagggcctgagagagctgcagggcctgcagaacttccccgagaagccccaccactag

SEQ ID NO: 144083 - DNA, 279 bp, Artificial Sequence
  derived and/or modified sequence
atggccaccccccccaagagaagagccgtggaggccaccggcgagaaggtgctgagatacgagaccttcatcagcgacgtgctgcagagagacctgagaaaggtgctggaccacagagacaaggtgtacgagcagctggccaagtacctgcagctgagaaacgtgatcgagagactgcaggtgaagaccatgggcctgggcaccatcttcctggtgtgcgtgggcaagggcggcaagtgggaggagagactgcagacccagccctgccacctgacctag

SEQ ID NO: 144084 - DNA, 474 bp, Artificial Sequence
  derived and/or modified sequence
atggccaccccacccaaacggcgcgcggtggaggcgacgggcgagaaggtccttaggtacgaaaccttcattagcgacgtcctccaaagagatctccggaaagtgctcgaccatcgtgacaaagtctacgagcagttggcaaagtacttgcagttgagaaatgtcatcgagaggctgcaggaagccaagcatagtgagctctacatgcaggtggatctcggatgcaacttttttgtggacaccgtagtaccagatacgtctagaatttacgtggctctaggctacggattcttcttggagctcaccctcgccgaggcactgaagtttattgaccggaaaagcagcctgctgacagagctcagtaactcactcacaaaagactcaatgaacattaaggcccacatccacatgcttctggagggcctgagagagctgcagggactccagaacttccccgagaagccgcaccattag

SEQ ID NO: 144085 - DNA, 279 bp, Artificial Sequence
  derived and/or modified sequence
atggccacgcctccaaaacggcgcgctgtcgaagccaccggggagaaggttcttcgctacgaaacctttatctctgacgtcctgcagcgagacctacgaaaggtgttagaccaccgggacaaggtttacgagcagctggctaagtacctccagctgcggaacgtaatcgagcggctacaggtcaaaactatgggtctgggcacaatcttcctggtctgcgtagggaaaggaggcaaatgggaagagaggctccagactcagccttgccacttgacttag

SEQ ID NO: 144086 - DNA, 474 bp, Artificial Sequence
  derived and/or modified sequence
atggccaccccacccaagagaagagctgtggaggccactggagagaaggtgctgcgctatgagaccttcatcagtgatgtgctgcagagggacctgaggaaggtgctggaccaccgggacaaggtgtatgagcagctggccaagtacctgcagctgagaaatgtcatcgagcggctgcaggaggccaagcacagcgagctgtacatgcaggtggacctgggctgcaacttctttgtggacacagtggtgcctgacaccagccgcatctacgtggccctgggctacggcttcttcctggagctgaccctggccgaggccctgaagttcatcgacaggaagagcagcctgctgacagagctgagcaacagcctgaccaaggacagcatgaacatcaaggcccacatccacatgctgctggagggcctgcgggagctgcagggcctgcagaacttccctgagaagccccaccactag

SEQ ID NO: 144087 - DNA, 279 bp, Artificial Sequence
  derived and/or modified sequence
atggccaccccacccaagagaagagctgtggaggccactggagagaaggtgctgcgctatgagaccttcatcagtgatgtgctgcagagggacctgaggaaggtgctggaccaccgggacaaggtgtatgagcagctggccaagtacctgcagctgagaaatgtcatcgagcggctgcaggtgaagaccatgggcctgggcaccatcttcctggtgtgtgtgggcaagggcggcaagtgggaggagcggctgcagacccagccctgccacctgacctag

SEQ ID NO: 144088 - DNA, 474 bp, Artificial Sequence
  derived and/or modified sequence
atggccaccccccccaagcggcgggccgtggaggccaccggcgagaaagtcttgagatacgagaccttcatctccgatgtgctgcagcgcgatcttcgaaaagtgcttgaccatagagataaagtttacgagcagctggccaaatacctacaattgcgcaatgttatagaacgcctccaggaggcaaaacattccgagttatatatgcaggtggaccttggatgcaatttctttgtggataccgtcgttccagacaccagcagaatctacgttgccctgggatacgggttcttcctggagctgaccttggccgaagcactgaaatttatagataggaagtcctctttgctgaccgaactgtccaactcccttactaaagatagtatgaacattaaagcacacatccacatgctcctggagggcttacgggaactccaagggctccagaatttcccagaaaagccccatcattag

SEQ ID NO: 144089 - DNA, 279 bp, Artificial Sequence
  derived and/or modified sequence
atggccaccccccccaagcggcgggccgtggaggccaccggcgagaaggtgctacgctacgaaaccttcatctccgacgtgttgcagcgggacctgcggaaggtgctggatcaccgggataaagtctatgagcagctcgctaaatatctgcaacttcgaaatgtgatcgagcggttgcaggttaaaacaatgggtctaggaaccatttttttggtatgtgtgggcaaggggggtaaatgggaagagcgtcttcagacgcagccttgccaccttacatag

SEQ ID NO: 144090 - DNA, 474 bp, Artificial Sequence
  derived and/or modified sequence
atggcaaccccgcctaaacggagggctgtcgaggcaacgggggaaaaggtactgaggtacgaaacctttatatcagacgtacttcagagggatcttcgcaaggtgctggaccatcgagacaaggtgtacgagcagctcgccaaatacctacagctgaggaatgtgatagagaggctccaggaagctaaacattctgaactgtatatgcaggttgatctgggttgcaacttttttgttgataccgtcgtcccggacaccagccgcatttacgtggccctgggatacggcttttttctcgagctcacccttgccgaagcccttaagtttattgatcggaagtcctcactgctgaccgagctgtctaactcacttactaaagattcaatgaatattaaggcccatattcacatgctgctggaaggtctaagagaacttcagggtctccagaatttccctgaaaaacctcatcactag

SEQ ID NO: 144091 - DNA, 279 bp, Artificial Sequence
  derived and/or modified sequence
atggcaacccccccaaaacgcagagcagtcgaggccactggagagaaagtgcttcgttacgagacttttatctctgatgtgcttcagcgggatttgagaaaggtcctcgaccatagggacaaggtgtacgagcagcttgctaagtatctccagctgcggaacgtcatcgagcggctgcaagttaaaacaatggggctcgggaccatcttcctagtgtgcgtgggcaaagggggaaaatgggaggaacgattgcagactcaaccatgtcacctgacatag

SEQ ID NO: 144092 - protein, 585 aa, Artificial Sequence
  derived and/or modified sequence
MTITYTSQVANARLGSFSRLLLCWRGSIYKLLYGEFLIFLLCYYIIRFIYRLALTEEQQLMFEKLTLYCDSYIQLIPISFVLGFYVTLVVTRWWNQYENLPWPDRLMSLVSGFVEGKDEQGRLLRRTLIRYANLGNVLILRSVSTAVYKRFPSAQHLVQAGFMTPAEHKQLEKLSLPHNMFWVPWVWFANLSMKAWLGGRIRDPILLQSLLNEMNTLRTQCGHLYAYDWISIPLVYTQVVTVAVYSFFLTCLVGRQFLNPAKAYPGHELDLVVPVFTFLQFFFYVGWLKVAEQLINPFGEDDDDFETNWIVDRNLQVSLLAVDEMHQDLPRMEPDMYWNKPEPQPPYTAASAQFRRASFMGSTFNISLNKEEMEFQPNQEDEEDAHAGIIGRFLGLQSHDHHPPRANSRTKLLWPKRESLLHEGLPKNHKAAKQNVRGQEDNKAWKLKAVDAFKSAPLYQRPGYYSAPQTPLSPTPMFFPLEPSAPSKLHSVTGIDTKDKSLKTVSSGAKKSFELLSESDGALMEHPEVSQVRRKTVEFNLTDMPEIPENHLKEPLEQSPTNIHTTLKDHMDPYWALENRDEAHS

SEQ ID NO: 144093 - DNA, 1758 bp, Artificial Sequence
  derived and/or modified sequence
atgaccattacatacactagccaggtcgccaacgcaaggctggggtccttctcccggctgttactctgttggcgcgggtctatctacaagctcctgtacggcgagtttctcatctttctgctttgctactacattatcaggtttatatacaggctggctctcacagaagagcagcagctcatgtttgaaaaattaactttatactgcgacagctacatccaacttatcccaatttcgttcgtcctgggtttctacgtgacacttgtggtcacacgatggtggaaccaatacgaaaatctgccatggccggaccggctcatgagccttgttagcgggtttgttgaaggcaaggatgagcagggccgcctcctccgacggactctaataaggtacgccaatttaggaaatgtcctgattttaagatccgtttccacagctgtttacaaacgcttccccagcgcacagcaccttgtgcaggcagggttcatgactcccgccgaacacaagcagctggaaaaattgtcattaccgcataacatgttctgggttccgtgggtatggtttgctaatctgagcatgaaggcctggctcggcggtcgcattagagacccaatcttgttgcaaagcttgcttaatgagatgaatacactgcgcacccaatgtggtcatctctacgcctacgactggatcagcattccgttagtgtatacacaggtggtcaccgtcgccgtctattcattttttctaacttgcctcgtaggtcgacagtttcttaaccccgccaaagcctatcccggtcatgagttagatctagtcgtcccagttttcactttccttcagttttttttctatgtcggctggctgaaggtggccgaacagttgatcaatcctttcggagaagatgacgatgatttcgagactaactggattgtggacaggaatctgcaggtatcgctgctggcagtcgatgaaatgcaccaggaccttccgagaatggagcccgacatgtattggaataaaccagaacctcagcctccttataccgctgcctccgctcagttccgacgagctagctttatggggtcaacatttaatatatccttaaataaggaagaaatggagttccagcccaatcaggaggacgaggaagacgcacatgcggggattatcggtcgctttttaggccttcagtcccatgaccatcacccacccagagccaactctcgcacaaaactgctttggcccaaaagggagagcctacttcacgagggcttgcccaaaaaccacaaagccgctaaacagaatgttcgcggacaggaagacaacaaggcgtggaagctgaaggccgtagacgcctttaaatccgcccctctataccagcgacctggatactacagcgctccccagacgccactgtcacccacccctatgtttttccctcttgaaccaagcgccccgtccaaacttcattccgtaactggtatagatactaaggacaagagtttaaaaaccgtgtcttctggagccaaaaagtcattcgagctgctgtcggagagtgacggggctctgatggaacatcctgaagtctcccaggttcgtcgcaagacggtggagtttaatctgaccgacatgccagagatcccggagaatcacttgaaggagcctctggaacagtcacccaccaacatccacacgaccttaaaggatcacatggatccttactgggctctagagaaccgagacgaagcacacagttag

SEQ ID NO: 144094 - DNA, 1758 bp, Artificial Sequence
  derived and/or modified sequence
atgaccatcacctacaccagccaggtggccaatgcccggctgggcagcttcagccggctgctgctgtgctggaggggcagcatctacaagctgctgtatggagagttcctgatcttcctgctgtgctactacatcatccgcttcatctaccgcctggccctgacagaggagcagcagctgatgtttgagaagctgaccctgtactgtgacagctacatccagctgatccccatcagctttgtgctgggcttctacgtgaccctggtggtgacccgctggtggaaccagtatgagaacctgccctggccagaccggctgatgagcctggtgtctggctttgtggagggcaaggatgagcagggccgcctgctgcggaggaccctcatccgctatgccaacctgggcaatgtgctgatcctgcggtctgtgtccacagctgtgtacaagcgcttccccagcgcccagcacctggtgcaggccggcttcatgaccccagctgagcacaagcagctggagaagctgagcctgccccacaacatgttctgggtgccctgggtgtggtttgccaacctgtccatgaaggcctggctgggcggccgcatccgggaccccatcctgctgcagagcctgctgaatgagatgaacaccctgcggacccagtgtggccacctgtatgcctatgactggatcagcatccccctggtgtacacccaggtggtgacagtggccgtgtacagcttcttcctgacctgcctggtgggccggcagttcctgaacccagccaaggcctacccaggccacgagctggacctggtggtgcctgtgttcaccttcctgcagttcttcttctacgtgggctggctgaaggtggccgagcagctgatcaacccctttggagaagatgatgatgactttgagaccaactggatcgtggacaggaacctgcaggtgtccctgctggccgtggatgagatgcaccaggacctgcccaggatggagccagacatgtactggaacaagccagagccccagcccccctacacagctgccagcgcccagttcagaagagccagcttcatgggcagcaccttcaacatcagcctgaacaaggaggagatggagttccagcccaaccaggaggatgaagaagatgcccatgctggcatcatcggccgcttcctgggcctgcagagccatgaccaccaccccccccgggccaacagcaggaccaagctgctgtggcccaagcgggagagcctgctgcacgagggcctgcccaagaaccacaaggccgccaagcagaatgtgcggggccaggaggacaacaaggcctggaagctgaaggctgtggatgccttcaagagcgcccccctgtaccagaggcctggctactacagcgccccccagacccccctgagccccacccccatgttcttccccctggagcccagcgcccccagcaagctgcacagcgtgactggaattgacaccaaggacaagagcctgaagacagtgtcctctggggccaagaagagctttgagctgctgtctgagagtgatggagccctgatggagcaccctgaggtgtcccaggtgcggaggaagacagtggagttcaacctgacagacatgcctgagatccctgagaaccacctgaaggagcccctggagcagagccccaccaacatccacaccaccctgaaggaccacatggacccctactgggccctggagaacagagatgaggcccacagctag

SEQ ID NO: 144095 - DNA, 1758 bp, Artificial Sequence
  derived and/or modified sequence
atgaccatcacctacaccagccaggtggccaacgcccggctgggcagtttttcgagactgctgctctgctggaggggatctatttataagttgctctatggcgagttcctgatcttcctgctttgctattatatcataagatttatctataggctggctctgaccgaggaacagcagctaatgtttgagaagttgaccctttactgcgatagttatattcaattaatccctatatcttttgttttgggtttctacgtgacacttgtcgtgacccggtggtggaaccagtacgaaaatctcccatggcccgacagactgatgtctctggtcagtggattcgtggagggcaaagacgagcaaggcagactactgagaaggaccctcatccggtacgcgaaccttggcaatgtgcttatcctgagaagcgtcagcactgctgtttacaaacgcttcccctctgcccagcacctggttcaagccggctttatgacgcctgcggaacataagcagctagagaaactaagcctaccccataatatgttctgggtgccttgggtatggtttgccaacctgagcatgaaggcctggctcggtggccgcatcagagaccccatcctgttgcagtccctgctgaatgaaatgaatactttgaggacacagtgcggtcatttgtacgcatatgattggattagcatcccactcgtatacacacaggtggttacagtggcagtttacagcttcttccttacctgtctcgtgggccgccagttcctgaatcccgccaaggcgtacccaggccatgagctagatcttgtggtccccgtgttcaccttcctgcagttctttttctacgttgggtggcttaaagtcgcagaacaactgattaacccctttggagaggacgacgacgattttgagactaattggattgttgatcgtaatctccaggtttccctcctcgcggtggacgagatgcatcaggacctccccaggatggagcctgatatgtactggaataaaccagaacctcaacccccttatactgcggcctccgcccagtttcgcagggcttcttttatggggtcgactttcaatatctccctaaacaaagaggagatggagtttcaacccaaccaagaggacgaggaggatgcccatgccggaatcatcggacgctttctgggactgcagagccacgatcatcatccaccccgcgcaaattcccggactaagcttctgtggccgaaaagagaatccttgctccatgaaggccttcctaaaaatcataaagccgcgaaacagaacgtgagagggcaagaggacaacaaagcctggaaactaaaagccgtggacgcattcaaaagcgccccattgtaccagaggcctggctactacagtgccccccagactcccctctcccccacgccgatgttctttcccctagaacccagcgccccgtcaaagctccattccgtcactgggattgacacgaaagacaagtccctcaagactgtctcctccggtgccaagaaatcttttgaactcttgtctgaaagtgatggcgctctcatggagcatcctgaagtaagtcaggtccgacgcaagacagttgagtttaacctgacagatatgcctgaaattccagaaaaccatcttaaggagcccctcgagcagagcccgaccaatatccatactacccttaaggatcacatggatccgtattgggccttggaaaatcgagacgaggctcactcgtag

SEQ ID NO: 144096 - DNA, 1758 bp, Artificial Sequence
  derived and/or modified sequence
atgacgatcacatatacttctcaggtggcaaacgctagactggggagtttcagtcgcctgttgctgtgctggcgtggatccatatataaactcttgtacggggagttccttatctttctcttatgctactatattatccgcttcatctacaggttggccctcactgaagaacagcagctgatgtttgaaaagctgactctctattgtgatagctatattcagctcattccgatctcatttgtcctagggttttacgtaacacttgtggtgacacgatggtggaaccagtacgaaaacctcccgtggcctgatagactcatgagtttggtgagcggattcgttgagggcaaagacgagcagggaaggctgctccgtagaacccttatccggtatgcaaatctgggaaacgtgctcatattaaggtccgtcagtaccgcagtatacaagagatttccctcggcccaacatctggttcaggccggattcatgacacctgccgagcataaacagttggaaaaactgagtttaccacataatatgttttgggtgccctgggtctggttcgcaaacctctctatgaaagcatggctgggcggaaggattcgcgaccctatccttttacaatcactccttaacgagatgaacactctcagaactcagtgtggacatctgtatgcctatgattggatcagtatacccttggtctacacccaggtggtcacagtcgccgtgtattcctttttcctgacttgtctggtgggccgacaatttttgaaccccgctaaagcctacccgggtcatgaactggacctggtcgtgcctgtctttaccttcttgcagttttttttttacgtcgggtggttgaaggtcgcagagcaactgattaacccgttcggagaggacgatgatgattttgagactaattggattgtggatcggaatttgcaagtgagcctgctggccgtcgacgaaatgcatcaggacctgccaaggatggaacctgacatgtactggaacaagcccgagccgcagccgccttacacagccgcatctgctcaatttaggcgagctagctttatgggcagtacattcaacatttctctcaataaggaggagatggaatttcagccaaaccaggaggacgaggaggatgcgcatgccggaattatcgggagattcctcggtctccagtcccacgaccaccacccccctagagctaatagtagaactaagctgctttggcccaaaagggaatctctgctccacgagggactgccaaaaaatcacaaggctgccaagcagaacgtgcgcggacaggaagataacaaagcatggaaactgaaggcagtggacgccttcaagtctgctcccctgtaccaacggcctggctactactcagccccacaaaccccactgagtccaacacctatgttctttccactcgaacctagcgccccttccaaattgcactctgtaacaggcatagataccaaagacaagtctctgaaaaccgtgtccagtggggctaagaagagttttgaactcctgagtgagagtgacggtgcactgatggaacaccctgaggtaagtcaggtacgcagaaagacggtcgagttcaacttgaccgatatgcccgagatccctgaaaaccacctgaaggaacccctggagcagagccccacaaacatccatactacactgaaggaccacatggatccttactgggcgcttgaaaatcgcgatgaggcacatagctag

SEQ ID NO: 144097 - DNA, 2598 bp, Artificial Sequence
  derived and/or modified sequence
caaggctgggaccagaaaccaggactgttgactgcagcccggtattcattctttccatagcccacagggctgtcaaagaccccagggcctagtcagaggctcctccttcctggagagttcctggcacagaagttgaagctcagcacagccccctaacccccaactctctctgcaaggcctcaggggtcagaacactggtggagcagatcctttagcctctggattttagggccatggtagagggggtgttgccctaaattccagccctggtctcagcccaacaccctccaagaagaaattagaggggccatggccaggctgtgctagccgttgcttctgagcagattacaagaagggactaagacaaggactcctttgtggaggtcctggcttagggagtcaagtgacggcggctcagcactcacgtgggcagtgccagcctctaagagtgggcaggggcactggccacagagtcccagggagtcccaccagcctagtcgccagaccttctgtgggatcatcggacccacctggaaccccacctgacccaagcccacctgctgcagcccactgcctggccatgaccatcacttacacaagccaagtggctaatgcccgcttaggctccttctcccgcctgctgctgtgctggcggggcagcatctacaagctgctatatggcgagttcttaatcttcctgctctgctactacatcatccgctttatttataggctggccctcacggaagaacaacagctgatgtttgagaaactgactctgtattgcgacagctacatccagctcatccccatttccttcgtgctgggcttctacgtgacgctggtcgtgacccgctggtggaaccagtacgagaacctgccgtggcccgaccgcctcatgagcctggtgtcgggcttcgtcgaaggcaaggacgagcaaggccggctgctgcggcgcacgctcatccgctacgccaacctgggcaacgtgctcatcctgcgcagcgtcagcaccgcagtctacaagcgcttccccagcgcccagcacctggtgcaagcaggctttatgactccggcagaacacaagcagttggagaaactgagcctaccacacaacatgttctgggtgccctgggtgtggtttgccaacctgtcaatgaaggcgtggcttggaggtcgaatccgggaccctatcctgctccagagcctgctgaacgagatgaacaccttgcgtactcagtgtggacacctgtatgcctacgactggattagtatcccactggtgtatacacaggtggtgactgtggcggtgtacagcttcttcctgacttgtctagttgggcggcagtttctgaacccagccaaggcctaccctggccatgagctggacctcgttgtgcccgtcttcacgttcctgcagttcttcttctatgttggctggctgaaggtgtccctgttggctgtggatgagatgcaccaggacctgcctcggatggagccggacatgtactggaataagcccgagccacagcccccctacacagctgcttccgcccagttccgtcgagcctcctttatgggctccaccttcaacatcagcctgaacaaagaggagatggagttccagcccaatcaggaggacgaggaggatgctcacgctggcatcattggccgcttcctaggcctgcagtcccatgatcaccatcctcccagggcaaactcaaggaccaaactactgtggcccaagagggaatcccttctccacgagggcctgcccaaaaaccacaaggcagccaaacagaacgttaggggccaggaagacaacaaggcctggaagcttaaggctgtggacgccttcaagtctgccccactgtatcagaggccaggctactacagtgccccacagacgcccctcagccccactcccatgttcttccccctagaaccatcagcgccgtcaaagcttcacagtgtcacaggcatagacaccaaagacaaaagcttaaagactgtgagttctggggccaagaaaagttttgaattgctctcagagagcgatggggccttgatggagcacccagaagtatctcaagtgaggaggaaaactgtggagtttaacctgacggatatgccagagatccccgaaaatcacctcaaagaacctttggaacaatcaccaaccaacatacacactacactcaaagatcacatggatccttattgggccttggaaaacagggatgaagcacattcctaacctgcttcctaatggggatgcttcgccagccaggtcctcacctgtgtgtacaccagcaggacactgatccagtcacagccatacagctgtccacactgaagaacatgtcctacaacagcctgaatcaaatggttagcttaatagataaaaatcccagactacttcagcctttaatgccttttattcataaaaactgtgaaagctagactgaaccattggaaacatttaactcagactctggattcagagtcgggaacccttagttctatctgaatccaagacagccacaccttagtatactgcccaaactaatgagtttaataaatacaaatactcgtttc

SEQ ID NO: 144098 - DNA, 2740 bp, Artificial Sequence
  derived and/or modified sequence
agataagggcactgaggctgagagaggagctgaaacctacccggggtcaccacacacaggtggcaaggctgggaccagaaaccaggactgttgactgcagcccggtattcattctttccatagcccacagggctgtcaaagaccccagggcctagtcagaggctcctccttcctggagagttcctggcacagaagttgaagctcagcacagccccctaacccccaactctctctgcaaggcctcaggggtcagaacactggtggagcagatcctttagcctctggattttagggccatggtagagggggtgttgccctaaattccagccctggtctcagcccaacaccctccaagaagaaattagaggggccatggccaggctgtgctagccgttgcttctgagcagattacaagaagggactaagacaaggactcctttgtggaggtcctggcttagggagtcaagtgacggcggctcagcactcacgtgggcagtgccagcctctaagagtgggcaggggcactggccacagagtcccagggagtcccaccagcctagtcgccagaccttctgtgggatcatcggacccacctggaaccccacctgacccaagcccacctgctgcagcccactgcctggccatgaccatcacttacacaagccaagtggctaatgcccgcttaggctccttctcccgcctgctgctgtgctggcggggcagcatctacaagctgctatatggcgagttcttaatcttcctgctctgctactacatcatccgctttatttataggctggccctcacggaagaacaacagctgatgtttgagaaactgactctgtattgcgacagctacatccagctcatccccatttccttcgtgctgggcttctacgtgacgctggtcgtgacccgctggtggaaccagtacgagaacctgccgtggcccgaccgcctcatgagcctggtgtcgggcttcgtcgaaggcaaggacgagcaaggccggctgctgcggcgcacgctcatccgctacgccaacctgggcaacgtgctcatcctgcgcagcgtcagcaccgcagtctacaagcgcttccccagcgcccagcacctggtgcaagcaggctttatgactccggcagaacacaagcagttggagaaactgagcctaccacacaacatgttctgggtgccctgggtgtggtttgccaacctgtcaatgaaggcgtggcttggaggtcgaatccgggaccctatcctgctccagagcctgctgaacgagatgaacaccttgcgtactcagtgtggacacctgtatgcctacgactggattagtatcccactggtgtatacacaggtggtgactgtggcggtgtacagcttcttcctgacttgtctagttgggcggcagtttctgaacccagccaaggcctaccctggccatgagctggacctcgttgtgcccgtcttcacgttcctgcagttcttcttctatgttggctggctgaaggtggcagagcagctcatcaacccctttggagaggatgatgatgattttgagaccaactggattgtcgacaggaatttgcaggtgtccctgttggctgtggatgagatgcaccaggacctgcctcggatggagccggacatgtactggaataagcccgagccacagcccccctacacagctgcttccgcccagttccgtcgagcctcctttatgggctccaccttcaacatcagcctgaacaaagaggagatggagttccagcccaatcaggaggacgaggaggatgctcacgctggcatcattggccgcttcctaggcctgcagtcccatgatcaccatcctcccagggcaaactcaaggaccaaactactgtggcccaagagggaatcccttctccacgagggcctgcccaaaaaccacaaggcagccaaacagaacgttaggggccaggaagacaacaaggcctggaagcttaaggctgtggacgccttcaagtctgccccactgtatcagaggccaggctactacagtgccccacagacgcccctcagccccactcccatgttcttccccctagaaccatcagcgccgtcaaagcttcacagtgtcacaggcatagacaccaaagacaaaagcttaaagactgtgagttctggggccaagaaaagttttgaattgctctcagagagcgatggggccttgatggagcacccagaagtatctcaagtgaggaggaaaactgtggagtttaacctgacggatatgccagagatccccgaaaatcacctcaaagaacctttggaacaatcaccaaccaacatacacactacactcaaagatcacatggatccttattgggccttggaaaacagggatgaagcacattcctaacctgcttcctaatggggatgcttcgccagccaggtcctcacctgtgtgtacaccagcaggacactgatccagtcacagccatacagctgtccacactgaagaacatgtcctacaacagcctgaatcaaatggttagcttaatagataaaaatcccagactacttcagcctttaatgccttttattcataaaaactgtgaaagctagactgaaccattggaaacatttaactcagactctggattcagagtcgggaacccttagttctatctgaatccaagacagccacaccttagtatactgcccaaactaatgagtttaataaatacaaatactcgtt

SEQ ID NO: 144099 - DNA, 1758 bp, Artificial Sequence
  derived and/or modified sequence
atgaccatcacctacaccagccaggtggccaacgccagactgggcagcttcagcagactgctgctgtgctggagaggcagcatctacaagctgctgtacggcgagttcctgatcttcctgctgtgctactacatcatcagattcatctacagactggccctgaccgaggagcagcagctgatgttcgagaagctgaccctgtactgcgacagctacatccagctgatccccatcagcttcgtgctgggcttctacgtgaccctggtggtgaccagatggtggaaccagtacgagaacctgccctggcccgacagactgatgagcctggtgagcggcttcgtggagggcaaggacgagcagggcagactgctgagaagaaccctgatcagatacgccaacctgggcaacgtgctgatcctgagaagcgtgagcaccgccgtgtacaagagattccccagcgcccagcacctggtgcaggccggcttcatgacccccgccgagcacaagcagctggagaagctgagcctgccccacaacatgttctgggtgccctgggtgtggttcgccaacctgagcatgaaggcctggctgggcggcagaatcagagaccccatcctgctgcagagcctgctgaacgagatgaacaccctgagaacccagtgcggccacctgtacgcctacgactggatcagcatccccctggtgtacacccaggtggtgaccgtggccgtgtacagcttcttcctgacctgcctggtgggcagacagttcctgaaccccgccaaggcctaccccggccacgagctggacctggtggtgcccgtgttcaccttcctgcagttcttcttctacgtgggctggctgaaggtggccgagcagctgatcaaccccttcggcgaggacgacgacgacttcgagaccaactggatcgtggacagaaacctgcaggtgagcctgctggccgtggacgagatgcaccaggacctgcccagaatggagcccgacatgtactggaacaagcccgagccccagcccccctacaccgccgccagcgcccagttcagaagagccagcttcatgggcagcaccttcaacatcagcctgaacaaggaggagatggagttccagcccaaccaggaggacgaggaggacgcccacgccggcatcatcggcagattcctgggcctgcagagccacgaccaccacccccccagagccaacagcagaaccaagctgctgtggcccaagagagagagcctgctgcacgagggcctgcccaagaaccacaaggccgccaagcagaacgtgagaggccaggaggacaacaaggcctggaagctgaaggccgtggacgccttcaagagcgcccccctgtaccagagacccggctactacagcgccccccagacccccctgagccccacccccatgttcttccccctggagcccagcgcccccagcaagctgcacagcgtgaccggcatcgacaccaaggacaagagcctgaagaccgtgagcagcggcgccaagaagagcttcgagctgctgagcgagagcgacggcgccctgatggagcaccccgaggtgagccaggtgagaagaaagaccgtggagttcaacctgaccgacatgcccgagatccccgagaaccacctgaaggagcccctggagcagagccccaccaacatccacaccaccctgaaggaccacatggacccctactgggccctggagaacagagacgaggcccacagctag

SEQ ID NO: 144100 - protein, 785 aa, Artificial Sequence
  derived and/or modified sequence
MLVAGLLLWASLLTGAWPSFPTQDHLPATPRVRLSFKELKATGTAHFFNFLLNTTDYRILLKDEDHDRMYVGSKDYVLSLDLHDINREPLIIHWAASPQRIEECVLSGKDVNGECGNFVRLIQPWNRTHLYVCGTGAYNPMCTYVNRGRRAQATPWTQTQAVRGRGSRATDGALRPMPTAPRQDYIFYLEPERLESGKGKCPYDPKLDTASALINEELYAGVYIDFMGTDAAIFRTLGKQTAMRTDQYNSRWLNDPSFIHAELIPDSAERNDDKLYFFFRERSAEAPQSPAVYARIGRICLNDDGGHCCLVNKWSTFLKARLVCSVPGEDGIETHFDELQDVFVQQTQDVRNPVIYAVFTSSGSVFRGSAVCVYSMADIRMVFNGPFAHKEGPNYQWMPFSGKMPYPRPGTCPGGTFTPSMKSTKDYPDEVINFMRSHPLMYQAVYPLQRRPLVVRTGAPYRLTTIAVDQVDAADGRYEVLFLGTDRGTVQKVIVLPKDDQELEELMLEEVEVFKDPAPVKTMTISSKRQQLYVASAVGVTHLSLHRCQAYGAACADCCLARDPYCAWDGQACSRYTASSKRRSRRQDVRHGNPIRQCRGFNSNANKNAVESVQYGVAGSAAFLECQPRSPQATVKWLFQRDPGDRRREIRAEDRFLRTEQGLLLRALQLSDRGLYSCTATENNFKHVVTRVQLHVLGRDAVHAALFPPLSMSAPPPPGAGPPTPPYQELAQLLAQPEVGLIHQYCQGYWRHVPPSPREAPGAPRSPEPQDQKKPRNRRHHPPDT

SEQ ID NO: 144101 - DNA, 2358 bp, Artificial Sequence
  derived and/or modified sequence
atgctggtggccggcctgctgctgtgggccagcctgctgaccggcgcctggcccagcttccccacccaggaccacctgcccgccacccccagagtgagactgagcttcaaggagctgaaggccaccggcaccgcccacttcttcaacttcctgctgaacaccaccgactacagaatcctgctgaaggacgaggaccacgacagaatgtacgtgggcagcaaggactacgtgctgagcctggacctgcacgacatcaacagagagcccctgatcatccactgggccgccagcccccagagaatcgaggagtgcgtgctgagcggcaaggacgtgaacggcgagtgcggcaacttcgtgagactgatccagccctggaacagaacccacctgtacgtgtgcggcaccggcgcctacaaccccatgtgcacctacgtgaacagaggcagaagagcccaggccaccccctggacccagacccaggccgtgagaggcagaggcagcagagccaccgacggcgccctgagacccatgcccaccgcccccagacaggactacatcttctacctggagcccgagagactggagagcggcaagggcaagtgcccctacgaccccaagctggacaccgccagcgccctgatcaacgaggagctgtacgccggcgtgtacatcgacttcatgggcaccgacgccgccatcttcagaaccctgggcaagcagaccgccatgagaaccgaccagtacaacagcagatggctgaacgaccccagcttcatccacgccgagctgatccccgacagcgccgagagaaacgacgacaagctgtacttcttcttcagagagagaagcgccgaggccccccagagccccgccgtgtacgccagaatcggcagaatctgcctgaacgacgacggcggccactgctgcctggtgaacaagtggagcaccttcctgaaggccagactggtgtgcagcgtgcccggcgaggacggcatcgagacccacttcgacgagctgcaggacgtgttcgtgcagcagacccaggacgtgagaaaccccgtgatctacgccgtgttcaccagcagcggcagcgtgttcagaggcagcgccgtgtgcgtgtacagcatggccgacatcagaatggtgttcaacggccccttcgcccacaaggagggccccaactaccagtggatgcccttcagcggcaagatgccctaccccagacccggcacctgccccggcggcaccttcacccccagcatgaagagcaccaaggactaccccgacgaggtgatcaacttcatgagaagccaccccctgatgtaccaggccgtgtaccccctgcagagaagacccctggtggtgagaaccggcgccccctacagactgaccaccatcgccgtggaccaggtggacgccgccgacggcagatacgaggtgctgttcctgggcaccgacagaggcaccgtgcagaaggtgatcgtgctgcccaaggacgaccaggagctggaggagctgatgctggaggaggtggaggtgttcaaggaccccgcccccgtgaagaccatgaccatcagcagcaagagacagcagctgtacgtggccagcgccgtgggcgtgacccacctgagcctgcacagatgccaggcctacggcgccgcctgcgccgactgctgcctggccagagacccctactgcgcctgggacggccaggcctgcagcagatacaccgccagcagcaagagaagaagcagaagacaggacgtgagacacggcaaccccatcagacagtgcagaggcttcaacagcaacgccaacaagaacgccgtggagagcgtgcagtacggcgtggccggcagcgccgccttcctggagtgccagcccagaagcccccaggccaccgtgaagtggctgttccagagagaccccggcgacagaagaagagagatcagagccgaggacagattcctgagaaccgagcagggcctgctgctgagagccctgcagctgagcgacagaggcctgtacagctgcaccgccaccgagaacaacttcaagcacgtggtgaccagagtgcagctgcacgtgctgggcagagacgccgtgcacgccgccctgttcccccccctgagcatgagcgccccccccccccccggcgccggcccccccacccccccctaccaggagctggcccagctgctggcccagcccgaggtgggcctgatccaccagtactgccagggctactggagacacgtgccccccagccccagagaggcccccggcgcccccagaagccccgagccccaggaccagaagaagcccagaaacagaagacaccacccccccgacacctag

SEQ ID NO: 144102 - DNA, 2358 bp, Artificial Sequence
  derived and/or modified sequence
atgctcgtggccggcttgctgctttgggcctcgctcttgaccggtgcatggccctcattccctacacaagatcaccttcccgcgaccccccgggtacggctctcgttcaaagagcttaaggcaacaggtacagcccattttttcaactttctgctgaataccactgattatcgcatcctgctcaaagacgaagaccacgaccggatgtacgttggatcaaaggattacgtcttgagtctggatttgcatgatattaaccgcgagcctctgattatccactgggctgcctcaccccagaggattgaggagtgcgttctcagtgggaaggatgtaaacggcgagtgcggcaacttcgttcgcttaatccagccatggaatcgcactcacttatatgtgtgcggcaccggcgcctacaacccaatgtgcacgtatgtgaatagaggcaggcgagcccaggccactccctggacccagacacaggccgtgaggggacgaggctctcgtgctaccgatggcgcactccgtcctatgcctaccgccccgaggcaggattacatcttctatttagaacctgaaaggctggagtcaggcaaaggaaagtgtccttacgatcccaagctcgacacagcctccgcacttatcaatgaggagctttatgcaggcgtctacattgattttatggggactgacgctgcaatttttcgtacccttggaaagcagaccgctatgcgcactgaccagtacaattctcgctggctcaatgaccctagctttatacatgcggagctgatccctgatagtgccgaaaggaatgacgataaactctatttcttctttcgcgagaggagcgctgaggccccccagtcacccgctgtgtacgcccgcattggcagaatctgcctgaatgacgatggcgggcactgctgcctggtgaataaatggtccacgttcctcaaagcacggttagtgtgcagcgtgccaggggaagacggaatcgagacgcatttcgacgaactccaagacgtctttgttcagcagactcaggacgtgcggaaccccgtgatctatgctgtcttcaccagcagcggctctgtcttccggggttcagcagtgtgtgtgtacagcatggctgatatacggatggtctttaacggtccattcgcccacaaggaaggtccaaattatcagtggatgcccttcagcggcaagatgccttacccccggcccggtacttgtcctggcgggacctttactccctcgatgaaatctacaaaggactatccagacgaagtgatcaattttatgcgcagccaccctctgatgtatcaggccgtgtatcctcttcagcggcgtcccctcgttgtccgaacgggtgctccctaccggctcacgactattgctgtcgatcaagttgacgcagcggacggcagatacgaagttctattccttggcaccgacagaggaactgtccagaaagtcatcgtgcttcccaaagacgatcaggaacttgaagaacttatgcttgaggaggtggaagtgtttaaagaccctgcccccgtcaagacaatgacgatctcatctaagaggcagcagttgtacgtagcctcagcagtgggggtcacccacctctccctccacagatgccaagcctacggcgccgcctgcgcagactgctgtctggcccgcgacccatactgtgcctgggacgggcaggcttgctctagatataccgctagtagtaagcgccgatcccgccgccaggatgttcggcatggaaaccctataaggcagtgtcgcgggtttaactctaatgcaaataagaacgccgttgagagcgttcagtatggagttgctggttccgcagctttccttgaatgtcagccaaggtcgccccaagccaccgttaaatggctgtttcagcgggaccctggagataggcgccgggaaatccgggcagaggaccgtttccttcgcaccgagcagggactgttgttgcgagcattgcagcttagcgacaggggcttgtactcgtgcaccgcaactgagaataatttcaagcacgtggtgacgagggtacaactgcatgtgctgggtcgcgatgccgttcatgccgctttgttcccccccttatctatgtccgcccctccgccaccgggtgctggacctcctaccccaccgtaccaggaacttgctcaactcctggcacagcccgaggttgggctgatccaccagtactgccagggatactggaggcatgtgccaccctccccgagggaggcacctggcgcccccagatctccggaaccacaggaccagaagaaaccacgcaatcgacgacatcacccaccagatacatag

SEQ ID NO: 144103 - DNA, 2358 bp, Artificial Sequence
  derived and/or modified sequence
atgctggtggccggcctgctgctgtgggccagcctgctgaccggggcctggcccagcttccccacccaggaccacctgcctgccaccccccgggtgcggctgtccttcaaggagctgaaggccaccggcacagcccacttcttcaacttcctgctgaacaccacagactaccgcatcctgctgaaggatgaggaccatgacaggatgtatgtgggcagcaaggactatgtgctgagcctggacctgcatgacatcaaccgggagcccctcatcatccactgggccgccagcccccagagaattgaagaatgtgtgctgagcggcaaggatgtgaatggagaatgtggcaactttgtgcggctcatccagccctggaacagaacccacctgtatgtgtgtggcactggagcctacaaccccatgtgcacctacgtgaacagaggaagaagagcccaggccaccccctggacccagacccaggccgtgcggggccggggcagccgggccacagatggagccctgcggcccatgcccacagccccccggcaggactacatcttctacctggagcctgagcggctggagagcggcaagggcaagtgcccctatgaccccaagctggacacagccagcgccctgatcaatgaggagctgtatgctggggtgtacatcgacttcatgggcacagatgctgccatcttccgcaccctgggcaagcagacagccatgaggacagaccagtacaacagccgctggctgaatgaccccagcttcatccatgctgagctgatcccagattctgctgagagaaatgatgacaagctgtacttcttcttccgggagaggtctgctgaggccccccagagccctgctgtgtatgcccgcatcggccgcatctgcctgaatgatgatggcggccactgctgcctggtgaacaagtggagcaccttcctgaaggcccggctggtgtgcagcgtgcctggagaagatggcatcgagacccactttgatgagctgcaggatgtgtttgtgcagcagacccaggatgtgagaaatcctgtgatctatgctgtgttcaccagcagcggcagcgtcttccggggcagcgctgtgtgtgtgtacagcatggctgacatccgcatggtgttcaacggcccctttgcccacaaggagggccccaactaccagtggatgcccttcagcggcaagatgccctaccccaggcctggcacctgccctgggggcaccttcacccccagcatgaagagcaccaaggactacccagatgaagtcatcaacttcatgaggagccaccccctgatgtaccaggccgtgtaccccctgcagaggcggcccctggtggtgaggactggagccccctaccgcctgaccaccatcgctgtggaccaggtggatgctgctgatggccgctatgaggtgctcttcctgggcacagaccggggcaccgtgcagaaggtgattgtgctgcccaaggatgaccaggagctggaggagctgatgctggaggaggtggaggtgttcaaggaccctgcccctgtgaagaccatgaccatcagcagcaagaggcagcagctgtatgtggccagcgctgtgggcgtgacccacctgagcctgcaccgctgccaggcctatggagctgcctgtgccgactgctgcctggcccgggacccctactgtgcctgggatggccaggcctgcagccgctacacagccagcagcaagaggaggagccggcggcaggatgtgagacatggcaaccccatccggcagtgccggggcttcaacagcaatgccaacaagaatgctgtggagagcgtgcagtatggagtggccggcagcgctgccttcctggagtgccagcccaggagcccccaggccaccgtgaagtggctgttccagagggaccccggggacagaagaagagagatccgggcagaagatcgcttcctgaggacagagcagggcctgctgctgcgggccctgcagctgagtgaccggggcctgtacagctgcacagccacagagaacaacttcaagcacgtggtgaccagggtgcagctgcacgtgctgggcagagatgctgtgcacgccgccctcttcccccccctgtccatgtctgcccctcctcctcctggggccggcccccccaccccaccctaccaggagctggcccagctgctggcccagcctgaggtgggcctcatccaccagtactgccagggctactggaggcatgtgccccccagcccccgggaggcccctggggcccccaggagccctgagccccaggaccagaagaagcccaggaacagaagacaccaccccccagacacctag

SEQ ID NO: 144104 - DNA, 2358 bp, Artificial Sequence
  derived and/or modified sequence
atgctggtggccggcctgctgctgtgggccagcctgctgaccggcgcctggccttccttcccaacacaggatcatttgccagcaactcccagggtaaggttgagctttaaggaattgaaggctaccggcactgcccatttcttcaattttttgctgaacaccaccgattatagaattttactgaaggacgaagaccacgatcgtatgtacgtcgggagcaaagattacgtgcttagcctggacctccacgacatcaacagggaacctctaattattcactgggcggcgtcccctcagcgcatcgaggagtgtgtgctttctggaaaagacgtcaacggcgaatgcgggaacttcgtgagattaatccagccttggaaccgtacccacctctacgtttgcggcacaggcgcgtacaaccctatgtgcacttatgtcaatcgggggagaagggctcaggccactccgtggacccagactcaggccgttagagggcggggcagccgtgcaacagatggcgcattgcgccccatgcctacggccccaagacaggactacattttttacctggagcccgaaagacttgagtcaggcaagggaaagtgtccttatgacccgaagctggacactgcatcagccctgatcaacgaggaattgtacgcgggggtttacatcgacttcatgggaaccgatgcagccatttttcgcacccttgggaagcagacagccatgaggacagatcagtacaactccaggtggctcaatgatccctccttcatacacgctgaacttatcccagactctgctgaaaggaacgacgacaaattatacttcttcttcagggaaaggtctgccgaagcccctcagtctcctgccgtgtacgctcgaatcggcaggatctgcctcaacgacgacggcgggcactgctgtttagtgaacaagtggagtacctttttgaaggcacgcttagtctgctcagtgccgggggaagatggtatcgagactcattttgacgagctgcaagacgtcttcgtgcagcaaacacaagacgtgcgcaatcctgtgatctacgcagttttcaccagctccggttcagtctttagagggagtgcggtgtgcgtctactctatggctgatatacggatggtctttaacggccccttcgctcataaagaaggtccgaactatcagtggatgcctttcagtggcaagatgccctacccacgcccgggcacctgtcccggcggaacttttaccccttccatgaaatcaaccaaagactacccagacgaggtcataaattttatgcggagtcacccattgatgtatcaggcggtgtaccctctgcagaggagaccccttgtagtgaggacaggcgctccataccgtttaaccaccatcgctgtcgatcaggtggatgcagcggatggacggtacgaggtgctgtttctgggtaccgacaggggtaccgttcagaaggtgatcgtcttgccaaaagatgaccaggagctagaagaactgatgctggaagaagtagaggtcttcaaagaccctgcacccgttaaaaccatgacaatttcaagtaaaaggcagcagctgtacgtggccagcgccgtcggtgttacccacttatcactgcatagatgccaggcatacggagccgcatgcgctgattgttgcctggcccgcgacccgtattgtgcatgggacggacaagcctgcagtagatacactgcctcatccaagcggcgctcacgccgccaggacgtgaggcacggtaatcccatacggcagtgtcgaggtttcaattcaaatgctaacaaaaacgctgttgagtcagtgcaatatggcgtcgcaggcagtgctgcattcctcgaatgtcaaccacgatccccacaggccacagtaaaatggctctttcagcgtgatcccggcgataggcggcgtgagatcagagccgaagataggtttctgcgaaccgagcaaggcctactgctcagagctctccagcttagtgacagaggcctctattcctgcaccgcgacagagaacaacttcaaacacgtcgttactagggtccagctacacgtgctgggtcgggacgctgtccacgcagctctttttccccctttatccatgtccgcccctcccccaccaggcgcaggccctcccacacctccctatcaggagctggcacagttactggctcaacctgaagtcggtctgatccaccagtactgccaagggtactggcgacacgtgcctccttcaccccgtgaagctccgggggcgcctagatccccagagccccaggatcagaaaaagccgcgcaaccgccgtcaccatccgccggacacctag

SEQ ID NO: 144105 - DNA, 2358 bp, Artificial Sequence
  derived and/or modified sequence
atgctggtcgctgggctgctcctctgggcgtctctgctcaccggtgcttggccatcattcccaacgcaggatcatcttcccgctaccccgcgagttagactcagcttcaaggaactaaaagccaccgggacagcacacttctttaactttctgctgaatactacggactacagaatactgcttaaggatgaagaccatgacagaatgtatgtgggctcaaaggactacgtgttgtccctcgatctgcatgacattaaccgggaaccactgataatacattgggccgcttcaccacagaggattgaggagtgcgttctgtccggaaaggatgttaatggagagtgcggcaacttcgtgaggctgatccagccatggaataggacccacttatacgtttgcggtaccggggcatataaccctatgtgcacttatgtcaatagaggcagacgagctcaggctactccatggactcagacacaggccgttcgagggagaggctctagggcaaccgatggcgctctcagaccgatgccgactgctcccaggcaggattatatcttctaccttgaacccgaaagattggagtcaggcaaagggaagtgcccttatgaccctaaactggacactgccagcgcactaattaacgaagagctttacgctggggtctacattgattttatgggtacagatgctgctatttttcgaactctggggaaacagactgctatgaggaccgaccaatataattccaggtggctgaacgatccatcgttcattcatgcagagttgattcctgactcagccgaaaggaacgacgataagctctacttcttttttagggaacggtcagctgaggcaccacaatcaccagccgtgtacgctcgtatcgggaggatctgtctcaatgatgacggtggccactgttgtctggtgaataagtggtccactttcttgaaagcgaggctggtgtgttctgtccccggagaggatggcatcgaaacccattttgacgaattgcaggatgtgttcgtgcaacaaactcaggacgttaggaatcctgtgatttatgccgttttcacatcctcaggcagcgtctttcggggatcggctgtctgcgtgtactctatggcagacattcgaatggtgtttaacggcccattcgctcacaaagaaggaccaaactatcaatggatgcccttttccggcaagatgccttaccctagacctggcacatgtcctggcggaactttcaccccatccatgaagtcaacgaaggattacccagacgaggtcatcaatttcatgaggagccatcctctcatgtaccaggctgtttacccacttcagcggaggccattggtggtgaggactggcgctccatatcggctaaccaccattgctgttgatcaggtggacgccgctgatgggagatatgaagtgctatttctaggaacagacagaggaactgtgcagaaggtgattgtgctacccaaggatgatcaggagctcgaggagctgatgcttgaagaggtagaagtgtttaaagatccggcacctgtcaagactatgactatcagtagtaagcggcaacagctgtacgtcgcatctgctgtcggcgtgacgcacctgagtctccaccgctgtcaggcttatggagcagcctgcgccgactgctgcctcgcccgagacccgtattgtgcctgggacggtcaagcttgctctaggtataccgcatcgagcaagaggcgctcgcgcaggcaagacgtgcgccacgggaaccctatccgccagtgtcgaggatttaactccaatgcaaataaaaacgctgttgagagtgtacagtacggagttgcgggatcagccgcttttctggagtgtcagcctcggagccctcaggctaccgttaagtggttgtttcaaagggaccctggtgatagacggagggaaataagagccgaagatcgctttctcaggactgagcagggcctgctgctccgagctcttcagctttcagatcgcggactctactcttgtactgctaccgagaacaatttcaaacacgtggtcacacgtgtgcagcttcacgtattaggaagagatgcagtgcacgccgcactctttcctccactctccatgtccgcgcctccacctccaggtgctggcccaccgacacctccttatcaggagctggctcagctattggctcagccagaagtgggattgatccatcaatactgtcaggggtactggagacacgtgccgccatcccctcgggaggcccctggggcacccaggagccccgaaccccaggatcagaagaagccccgaaatcgtcgtcatcacccaccagatacttag

SEQ ID NO: 144106 - DNA, 2358 bp, Artificial Sequence
  derived and/or modified sequence
atgttggtcgccggactgttgctctgggcatcactgctgacgggcgcctggccatcatttccaacacaggaccacctgcccgctactccaagagtcaggctgtcattcaaagagttgaaggccactggcaccgctcactttttcaactttctcctgaatacgactgactatcggattctcttaaaggacgaggatcatgacagaatgtatgtgggaagcaaagactatgttctctccttggatttgcatgacatcaaccgagaaccccttatcatccactgggccgcctctccacaacggatcgaggaatgtgtattgtctggtaaggatgttaacggcgaatgcgggaacttcgttcggttgattcagccttggaaccgtacgcacctttatgtctgtgggacgggcgcgtataaccccatgtgcacttacgtaaaccgcggtaggagagcgcaggccactccctggacacagacacaagccgttcgcggtcgaggctctagagcaaccgacggggccctcagacccatgccgaccgctccacgccaggattatatcttctacctagagcccgagcgactcgaatccggtaaagggaagtgtccatacgaccctaagctcgacaccgctagcgccctcatcaacgaagaattatacgcaggggtgtacatcgactttatgggtaccgatgccgccattttccgtaccctaggaaagcagactgccatgagaactgaccagtataactctcgctggctcaacgaccccagtttcatccacgccgagttaatccccgatagtgccgagaggaatgacgacaaattatatttcttttttcgcgagcggtccgccgaggcaccccagtcaccagctgtctacgctcgaattggacgtatctgtctaaatgatgatggtggacattgttgtctcgtgaacaagtggagcacatttctaaaggctagactggtgtgcagcgtgccaggtgaagatgggatagagacacatttcgatgagctgcaggacgtatttgtgcaacagacccaggacgtccgtaatccggtgatctatgccgtgtttacttcttctggttctgtgttcagaggctccgctgtctgcgtctacagcatggccgacatcagaatggtgttcaatggacctttcgcgcataaggagggaccaaactaccagtggatgcccttctccgggaaaatgccctacccacggccaggcacatgtcctggcggtactttcactcctagcatgaagtcgactaaggattaccccgatgaagtgattaacttcatgcggagtcaccctctgatgtaccaagctgtctacccactccaacgcagacccttagtcgttaggactggcgcgccctataggctcacaaccatcgccgtggaccaggtcgatgccgcagatggaaggtatgaggtcctctttctcgggaccgacagggggacggttcagaaggtgattgttctgccaaaagatgaccaggagctggaagaacttatgcttgaagaagttgaagttttcaaggaccccgcccccgtgaaaacgatgaccatcagcagtaaacgccaacagctgtacgtcgcaagtgctgttggggttacccacctgagtctgcatcgatgtcaggcctatggagccgcttgcgcagactgttgcctggccagggatccgtattgtgcctgggatgggcaggcgtgtagccgttacaccgcatcttccaaacgacgatctcgacggcaagacgtgcgacatggtaacccaatacgccagtgtcggggattcaacagtaatgctaataaaaatgcagttgagtctgtacaatatggagtggccgggtccgctgccttcttagaatgccagccacggagtccgcaggcgacagtgaaatggctgttccaacgcgacccaggcgaccgtcggcgagaaatcagagccgaggaccggttccttagaacagaacaaggacttcttctgagggccctccagctatccgatcgtggcctgtattcctgtaccgccacagaaaataatttcaaacacgtggtgacacgggttcagctgcacgtgctaggtagagatgctgtgcatgctgctctgtttcctccgctatccatgagcgctcctcccccacccggagccggacctcctacacctccttaccaggaactcgcccagcttctagcacagccagaggtgggcttgatccaccagtattgtcagggatactggcgacacgtacctccatcacctagggaagcccccggggccccacgctccccagagccacaggatcaaaagaaaccacgcaacagacggcatcatccacctgatacctag

SEQ ID NO: 144107 - DNA, 2358 bp, Artificial Sequence
  derived and/or modified sequence
atgcttgtcgctgggttgctgctgtgggcgtctttacttacaggtgcttggccttctttccccacacaggaccatctccctgccaccccacgagtgagactttcgttcaaggagcttaaagcaacaggaactgctcacttcttcaactttttgctgaacaccactgattatcgcatccttcttaaggacgaagaccacgaccggatgtacgttggcagtaaagactacgtgttgtcgctagatctacacgacattaacagggagcccctcattattcattgggccgctagtccacaaaggattgaggagtgcgtgctgtccggaaaggacgtcaacggcgagtgtggaaatttcgtcagactgattcaaccatggaaccggactcacctgtatgtctgcggtactggagcttacaacccgatgtgcacctatgtgaatagaggcagacgcgctcaggccaccccttggacacaaacccaggccgtgagagggcgcgggtcacgagccacggatggagccctaagaccaatgcctactgctccaagacaggattacattttctatctcgaacccgagcgattggaatccgggaaagggaagtgcccttacgaccccaaactggacaccgcctcagccctgataaatgaggaactgtacgctggagtgtatatcgatttcatgggaactgatgcagccatatttcgaacattggggaagcagacggcaatgagaactgaccagtataacagccgctggctgaacgatccatcttttatacatgctgaattaatccccgacagtgctgagcgtaacgatgacaaactctactttttctttcgagagcgatcagccgaggcaccacaatcccccgctgtatacgcccgcataggaaggatctgtcttaacgatgacggtggacattgttgtctggtcaataagtggagtacttttttaaaagcccggctggtgtgctccgtccccggcgaggatggaatagagacgcactttgacgagttgcaggatgtgttcgtacagcagacgcaagatgtcagaaaccccgttatatacgctgtattcaccagttccggaagtgttttcagaggttccgccgtatgcgtttatagcatggccgatattaggatggttttcaacggaccattcgcacacaaggagggtcctaactaccagtggatgcccttttccggcaagatgccataccccagacctggcacctgcccgggagggacatttacacccagcatgaaaagtactaaagactatccagatgaggttattaattttatgagaagtcaccctcttatgtatcaagcagtttatcccctgcaacggagacccctggttgtgcggacaggcgccccctacaggctgaccacgatcgccgtggatcaggttgacgcagcagatgggagatacgaggtgttattcctgggaaccgacagaggaacagtacagaaagtgattgtgctccctaaagatgatcaggagctcgaagaactgatgttggaggaggttgaagtgttcaaagaccccgctccagtgaaaactatgacaataagttcgaaacgacagcaattgtacgtcgcctctgctgtaggtgttacgcacctgtctctgcataggtgtcaggcctatggcgccgcctgcgctgattgttgtttagcccgagacccatattgcgcctgggacggccaggcctgctccagatatacagcatctagcaaaagacggtccaggcgacaagacgtccgacatggaaacccaattcgccagtgtagaggctttaatagcaacgccaacaaaaatgctgtcgaatcagtgcagtacggagttgccggctcagcagctttcctggagtgtcagccccggagtccacaagcgaccgtgaagtggctgttccagcgtgatcccggagaccgcagacgcgagattcgcgccgaggatcgatttctgcgtacagaacaggggcttttgctacgtgctcttcaactttctgacagaggcctatattcatgcactgcaacggagaacaactttaagcatgtcgtgacccgcgttcaattacacgtcctcggcagggatgcagttcacgccgctctctttccacccctcagcatgagtgctccacctccacctggcgccggcccccccactcctccttaccaggagcttgcccaactccttgcccaacctgaagtagggcttattcaccagtactgccaggggtattggcgccatgtaccccccagccccagagaggcccctggagcccctcgatcccccgagcctcaagaccagaagaaaccacggaacagacgacaccatccgcccgatacttag

SEQ ID NO: 144108 - DNA, 3802 bp, Artificial Sequence
  derived and/or modified sequence
agcgcagcgcaggacctgggtacgccgcgaggaaccgtgcagcccagcgcggccgcccggcccgggtccagcagccaggagagcgcagcgcttcgaagccgagtgcgcgccaccgcccgcgccccgcgctggggaatgcgccctcggcgcgccggccagggggcgcccgcagcccaccccaggggaggcggccccgagcgcccctgagccttcccatggcccgggctggggcccgggccctcggctgctgacgcgcccgaagcccgcggaaccggttaagccgcggccgcggcgccgatcccggctgaggcgcagcggcgagaggtcgcgggcagggccatggccccggggggccgctagcgcggaccggcccaacgggagccgctccgtgccgccgccgccgcccgggcgcccaggccccgccgctgcggaagaggtttctagagagtggagcctgcttcctgggccctaggcccctcccacaatgcttgtcgccggtcttcttctctgggcttccctactgaccggggcctggccatccttccccacccaggaccacctcccggccacgccccgggtccggctctcattcaaagagctgaaggccacaggcaccgcccacttcttcaacttcctgctcaacacaaccgactaccgaatcttgctcaaggacgaggaccacgaccgcatgtacgtgggcagcaaggactacgtgctgtccctggacctgcacgacatcaaccgcgagcccctcattatacactgggcagcctccccacagcgcatcgaggaatgcgtgctctcaggcaaggatgtcaacggcgagtgtgggaacttcgtcaggctcatccagccctggaaccgaacacacctgtatgtgtgcgggacaggtgcctacaaccccatgtgcacctatgtgaaccgcggacgccgcgcccaggccacaccatggacccagactcaggcggtcagaggccgcggcagcagagccacggatggtgccctccgcccgatgcccacagccccacgccaggattacatcttctacctggagcctgagcgactcgagtcagggaagggcaagtgtccgtacgatcccaagctggacacagcatcggccctcatcaatgaggagctctatgctggtgtgtacatcgattttatgggcactgatgcagccatcttccgcacacttggaaagcagacagccatgcgcacggatcagtacaactcccggtggctgaacgacccgtcgttcatccatgctgagctcattcctgacagtgcggagcgcaatgatgataagctttacttcttcttccgtgagcggtcggcagaggcgccgcagagccccgcggtgtacgcccgcatcgggcgcatttgcctgaacgatgacggtggtcactgttgcctggtcaacaagtggagcacattcctgaaggcgcggctcgtctgctctgtcccgggcgaggatggcattgagactcactttgatgagctccaggacgtgtttgtccagcagacccaggacgtgaggaaccctgtcatttacgctgtctttacctcctctggctccgtgttccgaggctctgccgtgtgtgtctactccatggctgatattcgcatggtcttcaacgggccctttgcccacaaagaggggcccaactaccagtggatgcccttctcagggaagatgccctacccacggccgggcacgtgccctggtggaaccttcacgccatctatgaagtccaccaaggattatcctgatgaggtgatcaacttcatgcgcagccacccactcatgtaccaggccgtgtaccctctgcagcggcggcccctggtagtccgcacaggtgctccctaccgccttaccactattgccgtggaccaggtggatgcagccgacgggcgctatgaggtgcttttcctgggcacagaccgcgggacagtgcagaaggtcattgtgctgcccaaggatgaccaggagttggaggagctcatgctggaggaggtggaggtcttcaaggatccagcacccgtcaagaccatgaccatctcttctaagaggcaacaactctacgtggcgtcagccgtgggtgtcacacacctgagcctgcaccgctgccaggcgtatggggctgcctgtgctgactgctgccttgcccgggacccttactgtgcctgggatggccaggcctgctcccgctatacagcatcctccaagaggcggagccgccggcaggacgtccggcacggaaaccccatcaggcagtgccgtgggttcaactccaatgccaacaagaatgccgtggagtctgtgcagtatggcgtggccggcagcgcagccttccttgagtgccagccccgctcgccccaagccactgttaagtggctgttccagcgagatcctggtgaccggcgccgagagattcgtgcagaggaccgcttcctgcgcacagagcagggcttgttgctccgtgcactgcagctcagcgatcgtggcctctactcctgcacagccactgagaacaactttaagcacgtcgtcacacgagtgcagctgcatgtactgggccgggacgccgtccatgctgccctcttcccaccactgtccatgagcgccccgccacccccaggcgcaggccccccaacgcctccttaccaggagttagcccagctgctggcccagccagaagtgggcctcatccaccagtactgccagggttactggcgccatgtgccccccagccccagggaggctccaggggcaccccggtctcctgagccccaggaccagaaaaagccccggaaccgccggcaccaccctccggacacatgaggccagctgcctgtgcctgccatgggccagcctagcccttgtcccttttaatataaaagatatatatatatatatatatatataaaatatctatattctatacacaccctgcccctgcaaagacagtatttattggtgggttgaatatagcctgcctcagtggcagcatcctccaaaacttagacccatgctggtcagagacggcagaaaacagagcctgcctaaccaggcccagccagttggtggggccaggccaggaccacacagtccccagactcagctggaagtctacctgctggacagcctccgccaagatctacaggacaaagggagggagcaagccctactcggatggggcacggactgtccaccttttctgatgtgtgttgtcagcctgtgctgtggcatagacatggatgcgaggaccactttggagactggggtggcctcaagagcacacagagaagggaagaaggggccatcacaggatgccagcccctgcctgggttgggggcactcagccacgaccagccccttcctgggtatttattctctatttattggggataggagaagaggcatcctgcctgggtgggacagcctcttcagccccttctcccctccccgcctggccagggcagggccaccccactctacctccttagctttccctgtgccactttgactcagaggctgggagcatagcagaggggccaggcccaggcagagctgacgggaggccccagctctgaggggagggggtccgtggtagaggcctggggccggtagaggctccccagggctcccttatgtccaccacttcaggggatgggtgtggatgtaattagctctggggggcagttgggtagatgggtgggggctcctggtggccttctgctgcccaggccacagccgcctttgggttccatcttgctaataaacactggctctgggactaga

SEQ ID NO: 144109 - RNA, 2358 nt, Artificial Sequence
  derived and/or modified sequence
auguuggucgccggacuguugcucugggcaucacugcugacgggcgccuggccaucauuuccaacacaggaccaccugcccgcuacuccaagagucaggcugucauucaaagaguugaaggccacuggcaccgcucacuuuuucaacuuucuccugaauacgacugacuaucggauucucuuaaaggacgaggaucaugacagaauguaugugggaagcaaagacuauguucucuccuuggauuugcaugacaucaaccgagaaccccuuaucauccacugggccgccucuccacaacggaucgaggaauguguauugucugguaaggauguuaacggcgaaugcgggaacuucguucgguugauucagccuuggaaccguacgcaccuuuaugucugugggacgggcgcguauaaccccaugugcacuuacguaaaccgcgguaggagagcgcaggccacucccuggacacagacacaagccguucgcggucgaggcucuagagcaaccgacggggcccucagacccaugccgaccgcuccacgccaggauuauaucuucuaccuagagcccgagcgacucgaauccgguaaagggaaguguccauacgacccuaagcucgacaccgcuagcgcccucaucaacgaagaauuauacgcagggguguacaucgacuuuauggguaccgaugccgccauuuuccguacccuaggaaagcagacugccaugagaacugaccaguauaacucucgcuggcucaacgaccccaguuucauccacgccgaguuaauccccgauagugccgagaggaaugacgacaaauuauauuucuuuuuucgcgagcgguccgccgaggcaccccagucaccagcugucuacgcucgaauuggacguaucugucuaaaugaugaugguggacauuguugucucgugaacaaguggagcacauuucuaaaggcuagacuggugugcagcgugccaggugaagaugggauagagacacauuucgaugagcugcaggacguauuugugcaacagacccaggacguccguaauccggugaucuaugccguguuuacuucuucugguucuguguucagaggcuccgcugucugcgucuacagcauggccgacaucagaaugguguucaauggaccuuucgcgcauaaggagggaccaaacuaccaguggaugcccuucuccgggaaaaugcccuacccacggccaggcacauguccuggcgguacuuucacuccuagcaugaagucgacuaaggauuaccccgaugaagugauuaacuucaugcggagucacccucugauguaccaagcugucuacccacuccaacgcagacccuuagucguuaggacuggcgcgcccuauaggcucacaaccaucgccguggaccaggucgaugccgcagauggaagguaugagguccucuuucucgggaccgacagggggacgguucagaaggugauuguucugccaaaagaugaccaggagcuggaagaacuuaugcuugaagaaguugaaguuuucaaggaccccgcccccgugaaaacgaugaccaucagcaguaaacgccaacagcuguacgucgcaagugcuguugggguuacccaccugagucugcaucgaugucaggccuauggagccgcuugcgcagacuguugccuggccagggauccguauugugccugggaugggcaggcguguagccguuacaccgcaucuuccaaacgacgaucucgacggcaagacgugcgacaugguaacccaauacgccagugucggggauucaacaguaaugcuaauaaaaaugcaguugagucuguacaauauggaguggccggguccgcugccuucuuagaaugccagccacggaguccgcaggcgacagugaaauggcuguuccaacgcgacccaggcgaccgucggcgagaaaucagagccgaggaccgguuccuuagaacagaacaaggacuucuucugagggcccuccagcuauccgaucguggccuguauuccuguaccgccacagaaaauaauuucaaacacguggugacacggguucagcugcacgugcuagguagagaugcugugcaugcugcucuguuuccuccgcuauccaugagcgcuccucccccacccggagccggaccuccuacaccuccuuaccaggaacucgcccagcuucuagcacagccagaggugggcuugauccaccaguauugucagggauacuggcgacacguaccuccaucaccuagggaagcccccggggccccacgcuccccagagccacaggaucaaaagaaaccacgcaacagacggcaucauccaccugauaccuag

SEQ ID NO: 144110 - RNA, 2358 nt, Artificial Sequence
  derived and/or modified sequence
augcuugucgcuggguugcugcugugggcgucuuuacuuacaggugcuuggccuucuuuccccacacaggaccaucucccugccaccccacgagugagacuuucguucaaggagcuuaaagcaacaggaacugcucacuucuucaacuuuuugcugaacaccacugauuaucgcauccuucuuaaggacgaagaccacgaccggauguacguuggcaguaaagacuacguguugucgcuagaucuacacgacauuaacagggagccccucauuauucauugggccgcuaguccacaaaggauugaggagugcgugcuguccggaaaggacgucaacggcgaguguggaaauuucgucagacugauucaaccauggaaccggacucaccuguaugucugcgguacuggagcuuacaacccgaugugcaccuaugugaauagaggcagacgcgcucaggccaccccuuggacacaaacccaggccgugagagggcgcgggucacgagccacggauggagcccuaagaccaaugccuacugcuccaagacaggauuacauuuucuaucucgaacccgagcgauuggaauccgggaaagggaagugcccuuacgaccccaaacuggacaccgccucagcccugauaaaugaggaacuguacgcuggaguguauaucgauuucaugggaacugaugcagccauauuucgaacauuggggaagcagacggcaaugagaacugaccaguauaacagccgcuggcugaacgauccaucuuuuauacaugcugaauuaauccccgacagugcugagcguaacgaugacaaacucuacuuuuucuuucgagagcgaucagccgaggcaccacaaucccccgcuguauacgcccgcauaggaaggaucugucuuaacgaugacgguggacauuguugucuggucaauaaguggaguacuuuuuuaaaagcccggcuggugugcuccguccccggcgaggauggaauagagacgcacuuugacgaguugcaggauguguucguacagcagacgcaagaugucagaaaccccguuauauacgcuguauucaccaguuccggaaguguuuucagagguuccgccguaugcguuuauagcauggccgauauuaggaugguuuucaacggaccauucgcacacaaggaggguccuaacuaccaguggaugcccuuuuccggcaagaugccauaccccagaccuggcaccugcccgggagggacauuuacacccagcaugaaaaguacuaaagacuauccagaugagguuauuaauuuuaugagaagucacccucuuauguaucaagcaguuuauccccugcaacggagaccccugguugugcggacaggcgcccccuacaggcugaccacgaucgccguggaucagguugacgcagcagaugggagauacgagguguuauuccugggaaccgacagaggaacaguacagaaagugauugugcucccuaaagaugaucaggagcucgaagaacugauguuggaggagguugaaguguucaaagaccccgcuccagugaaaacuaugacaauaaguucgaaacgacagcaauuguacgucgccucugcuguagguguuacgcaccugucucugcauaggugucaggccuauggcgccgccugcgcugauuguuguuuagcccgagacccauauugcgccugggacggccaggccugcuccagauauacagcaucuagcaaaagacgguccaggcgacaagacguccgacauggaaacccaauucgccaguguagaggcuuuaauagcaacgccaacaaaaaugcugucgaaucagugcaguacggaguugccggcucagcagcuuuccuggagugucagccccggaguccacaagcgaccgugaaguggcuguuccagcgugaucccggagaccgcagacgcgagauucgcgccgaggaucgauuucugcguacagaacaggggcuuuugcuacgugcucuucaacuuucugacagaggccuauauucaugcacugcaacggagaacaacuuuaagcaugucgugacccgcguucaauuacacguccucggcagggaugcaguucacgccgcucucuuuccaccccucagcaugagugcuccaccuccaccuggcgccggcccccccacuccuccuuaccaggagcuugcccaacuccuugcccaaccugaaguagggcuuauucaccaguacugccagggguauuggcgccauguaccccccagccccagagaggccccuggagccccucgaucccccgagccucaagaccagaagaaaccacggaacagacgacaccauccgcccgauacuuag

SEQ ID NO: 144111 - protein, 1560 aa, Artificial Sequence
  derived and/or modified sequence
MEPGSDDFLPPPECPVFEPSWAEFRDPLGYIAKIRPIAEKSGICKIRPPADWQPPFAVEVDNFRFTPRIQRLNELEAQTRVKLNYLDQIAKFWEIQGSSLKIPNVERRILDLYSLSKIVVEEGGYEAICKDRRWARVAQRLNYPPGKNIGSLLRSHYERIVYPYEMYQSGANLVQCNTRPFDNEEKDKEYKPHSIPLRQSVQPSKFNSYGRRAKRLQPDPEPTEEDIEKNPELKKLQIYGAGPKMMGLGLMAKDKTLRKKDKEGPECPPTVVVKEELGGDVKVESTSPKTFLESKEELSHSPEPCTKMTMRLRRNHSNAQFIESYVCRMCSRGDEDDKLLLCDGCDDNYHIFCLLPPLPEIPKGVWRCPKCVMAECKRPPEAFGFEQATREYTLQSFGEMADSFKADYFNMPVHMVPTELVEKEFWRLVNSIEEDVTVEYGADIHSKEFGSGFPVSDSKRHLTPEEEEYATSGWNLNVMPVLEQSVLCHINADISGMKVPWLYVGMVFSAFCWHIEDHWSYSINYLHWGEPKTWYGVPSLAAEHLEEVMKKLTPELFDSQPDLLHQLVTLMNPNTLMSHGVPVVRTNQCAGEFVITFPRAYHSGFNQGYNFAEAVNFCTADWLPAGRQCIEHYRRLRRYCVFSHEELICKMAACPEKLDLNLAAAVHKEMFIMVQEERRLRKALLEKGITEAEREAFELLPDDERQCIKCKTTCFLSALACYDCPDGLVCLSHINDLCKCSSSRQYLRYRYTLDELPAMLHKLKVRAESFDTWANKVRVALEVEDGRKRSLEELRALESEARERRFPNSELLQQLKNCLSEAEACVSRALGLVSGQEAGPHRVAGLQMTLTELRAFLDQMNNLPCAMHQIGDVKGVLEQVEAYQAEAREALASLPSSPGLLQSLLERGRQLGVEVPEAQQLQRQVEQARWLDEVKRTLAPSARRGTLAVMRGLLVAGASVAPSPAVDKAQAELQELLTIAERWEEKAHLCLEARQKHPPATLEAIIREAENIPVHLPNIQALKEALAKARAWIADVDEIQNGDHYPCLDDLEGLVAVGRDLPVGLEELRQLELQVLTAHSWREKASKTFLKKNSCYTLLEVLCPCADAGSDSTKRSRWMEKELGLYKSDTELLGLSAQDLRDPGSVIVAFKEGEQKEKEGILQLRRTNSAKPSPLASSSTASSTTSICVCGQVLAGAGALQCDLCQDWFHGRCVSVPRLLSSPRPNPTSSPLLAWWEWDTKFLCPLCMRSRRPRLETILALLVALQRLPVRLPEGEALQCLTERAISWQGRARQALASEDVTALLGRLAELRQRLQAEPRPEEPPNYPAAPASDPLREGSGKDMPKVQGLLENGDSVTSPEKVAPEEGSGKRDLELLSSLLPQLTGPVLELPEATRAPLEELMMEGDLLEVTLDENHSIWQLLQAGQPPDLERIRTLLELEKAERHGSRARGRALERRRRRKVDRGGEGDDPAREELEPKRVRSSGPEAEEVQEEEELEEETGGEGPPAPIPTTGSPSTQENQNGLEPAEGTTSGPSAPFSTLTPRLHLPCPQQPPQQQL

SEQ ID NO: 144112 - DNA, 6863 bp, Artificial Sequence
  derived and/or modified sequence
cttgttcctccgccgttgcaatgaactattttctctcagtccggggtggtacttttgagtaaccccttccaaatagaaacccataccagcctatttagctcggtctccactatatgaaggtttcctagggcttggtgtgacgcaacgtatacgaggctcggaaggacaccccgcggaaggatccggtttgttgtggtgtggggaggggagacgctgacaaaccaagatggcggcggcggcgctgaaggccgcggcgtttgggaggtaactgtggtggcgaaggctgcggtagtggggaggcaaccacacagtttggaagaaacggagcgggacgaagaggcggtagcagtagagtcagcctgagactctcagagcacgacggccacacgcccccttaggccctcggcgggcggcggctgccccgcttagggcctagcctccgagcattgcctcggcttcaaacagcggcggcgccatgagtccttaagggcggtccaagcctcccgatccctggcccagacctcgggcccaccatggagccggggtccgacgatttcctaccgccaccggagtgcccggtgttcgagcctagctgggccgagttccgagaccctcttggctacatcgcgaaaatcaggcccatcgcagagaaatcgggcatttgcaagatccgcccacccgcggactggcagccaccctttgctgtggaagtggacaacttcaggtttaccccccgaatccagaggctgaatgagctagaggcccagacgagagtgaaactgaactacttggaccagattgccaaattctgggaaatccagggctcctccttaaagattcccaatgtagaacggcggatcttggacctctacagtctcagcaaaattgtggtggaggaaggtggttatgaagctatctgcaaggaccgtcggtgggctcgggtagcccagcgcctcaactatccaccaggcaaaaatattggctccttgctacgctcccactacgaacgcattgtttatccctatgaaatgtaccagtctggagccaaccttgtgcagtgtaacacacgtccatttgataatgaggagaaggacaaggaatacaaaccccacagcatccccctacgacagtctgtgcagccttccaagttcaacagctatggccggcgggccaagagactgcagcctgatccggaacccacagaggaagacattgagaagaatccagagctgaaaaagctacagatctatggggcaggccccaagatgatgggcctgggcctcatggccaaagacaagactctgcggaagaaagataaggaggggcctgagtgtccccccacagtagtggtgaaggaggagttaggtggggatgtgaaggtggagtcaacatcgcctaagaccttcctggagagcaaggaggagctgagtcacagcccagaaccctgcaccaagatgaccatgaggctacggaggaaccacagcaatgcccagtttattgagtcatatgtctgccggatgtgttctcgaggggatgaggatgacaagctcctgctgtgtgatggctgtgatgacaactaccacatcttctgcctgctgcctcctctgcctgagatccccaagggtgtctggcggtgcccaaagtgtgtcatggcggagtgtaagcggcccccagaagcctttggctttgagcaggctacccgggaatacactctgcagagctttggcgagatggccgactcctttaaagctgactacttcaacatgcccgtgcatatggtgcccacagaacttgtggagaaggagttctggaggctggtaaatagcattgaggaagatgtgactgttgagtatggagctgacatccattccaaagaatttggcagcggtttccctgtcagtgacagtaaacggcacctaacccccgaagaggaggagtatgctaccagtggttggaacctaaatgtgatgccggtgttggaacagtctgtactgtgccacatcaatgcagatatctctggcatgaaggtgccctggctctacgtgggcatggtcttctcagccttttgctggcatattgaggatcactggagttactccattaactacctccactggggtgagccgaagacctggtatggggtgccctcacttgcagcagaacatttggaagaagtgatgaagaagctgacacctgaactatttgatagccagcctgacctcctgcaccaacttgtcaccctcatgaatcccaacaccctcatgtcccatggtgtgccagttgtccgcacaaaccagtgtgcaggagagtttgtcatcaccttcccccgtgcttaccacagcggcttcaaccaaggctacaactttgccgaggctgtcaacttttgcactgctgactggttgcctgctgggcgccagtgcattgagcactaccgccggctccggagatactgcgtcttctcccatgaggagcttatctgcaagatggctgcctgcccagagaagctagacctgaacctggcggcagctgtgcataaggagatgttcatcatggtgcaagaagagcggcgtctacgaaaggccctgctggagaagggtatcacagaggctgagcgagaggctttcgagctgctcccagatgatgagcgccagtgtatcaagtgcaagactacgtgtttcctgtcagccctggcctgctacgactgcccagacggccttgtctgcctttcccacatcaatgatctctgcaagtgctccagtagccggcagtacctgcggtatcggtataccttggatgagcttcctgccatgctgcataagctgaaggttcgggctgagtcctttgacacctgggccaacaaagtgcgagtggccctggaggtggaggatgggcggaagcgcagccttgaagaactgagggcactagagtctgaagcccgtgagcggaggtttcctaatagtgagctgctgcagcaactaaagaactgcctgagtgaggcagaggcttgcgtgtcccgagctctgggactggtcagcggccaggaagctggcccccacagggtggctggtctacagatgaccctgactgagctccgggcctttctggaccagatgaacaacctgccttgcgccatgcaccagattggggatgtcaagggtgttctggaacaggtggaggcctaccaggctgaggctcgtgaggccctggcctcactgccctccagtccagggctactgcagtccctgttggagagggggcggcagctgggggtggaggtgcctgaggcccagcagctccagcggcaggtggaacaggcgcgatggctggatgaggtgaaacgcacactggccccctcagcccgaaggggcaccttggctgtcatgcgaggactgttggtcgcgggtgccagtgtagcccctagccctgctgtggataaagcccaggccgagctgcaggaactgctgaccattgctgaacgctgggaggagaaagcccacctctgcctggaggccaggcagaagcatccaccagccacacttgaggccataatccgtgaagcggaaaacatccctgttcacctgcccaacatccaggctctcaaggaggctcttgctaaggcccgggcctggattgctgatgttgatgagatccaaaatggtgaccactacccctgcctggatgacttggagggcctagtagctgtgggccgggacctacctgtggggctggaggagctgagacagctagagctacaggtactgacagcgcactcctggagggagaaggcctccaagaccttcctcaagaaaaattcttgctacacgctgctggaggttctctgcccatgtgcagatgccggctcagacagcaccaagcgcagccggtggatggagaaggagctggggttgtacaaatctgacacagagctgctggggctgtctgcgcaggacctcagggacccaggctctgtgatcgtggccttcaaggagggggaacagaaggagaaggagggtatcctgcagctgcgtcgcaccaattcggccaagcccagtccactggcatcatcgagcacggcctcctctacaacctctatctgtgtgtgtgggcaggtgctggctggggcgggagctctgcagtgtgacctgtgtcaggactggttccatgggcggtgtgtgtcagtgcctcgcctcctcagctctccgaggcccaatcccacctcatccccactgctggcctggtgggaatgggacaccaaattcctgtgtccactgtgtatgcgctcaaggcgcccgcgcctggagaccatcctggcactgctggtagccctgcagagactgcctgtgcggctgcccgagggcgaggccctgcagtgcctcacagagagggccatcagctggcaaggccgcgccaggcaggctctggcctctgaagatgtgactgctcttttgggacggctggctgagctccgccaacggctacaggctgaacctagacctgaggagcctcctaactaccctgcagcccctgcttctgaccccctcagagagggcagtggcaaggatatgcctaaggtccagggcttactggagaatggagacagtgtgaccagtcctgagaaggtagccccggaggagggctcaggtaagagagatctggagctgctgtcctcgctgttgccacagttgactggccctgtgttggaactgcctgaggcaacccgggcccccttggaggagctcatgatggagggggacctgctcgaggtgaccctggatgagaaccacagcatatggcagctgctgcaggctggacagcccccagacctggagaggatccgcacacttctggagctggagaaggcagagcgtcacgggagtcgggctcggggccgggccctggagaggcggcggcggcggaaggtggatcggggtggggagggcgatgacccagcccgagaggagctagagccaaagagggtacggagctcagggccagaggctgaggaggtccaggaggaggaagagctggaggaggagactgggggtgagggcccccctgcacccatccccaccactggcagccccagcacccaggagaaccagaatggcttggaaccggcggaagggaccacttcaggcccctcggcccctttctccactctgactccccggctgcatctgccctgcccacagcagccgcctcagcaacagttgtgacagtggctgagcctagcacagaccctgacagagacccccctcggcctcaaggatcctctttctgaccatcaagcctgcttcttggggggtgggcgggtaggggggtggccatccctgctacccgcccacccctgagtcccttgacttttgtattctgactccaaggtattgttcagacctcagctcctgggggccggcccctggagtcttccctccctggtagcctctaaccagcattcccagacacctgaggcagatagatggatgggctggtgggcaggggggtggctggggctgggccatcaccattccagagacaaggccagtgtatatgcaaactgggggactctcctcccttctctccccagttctggtcctggccaggccatgctacactaacccctgcccccactctcctcccctcttttccttccttcctacccccttctccctctcccttcccctgactgttccacccaggaggaggaaacttcacatagccgtgctcacagttttttattttaaaggaatttggctggggagctgaacagggctccctgtgatctgaagaaagcttttggtgcttgtcctcacaaccacctcagtcctccctccctgtcctcccctgtctcctttcctcctcctgggttcatgttgtaataaaagaagattgttggtgtgtaattaatttgttcaaaagaaaaaaaaaagcaaaacaagaaacttggttccaactgaagcctattttaattttattttattattttcctcttgttagaaataaaacccttagaaacattttttggaaacatgtttctgaagtgcatttctcttagacggggaagacagtgcttccatcaccagtcagtggagcagctgtagtgctggcaggagcactagggctgaagccagggagctctgggttctgaaatcaagttccaccagcttcttaaccttgggcaagacattctgatcctcccccgactctaaccccaagccactttccctcaagtccaaacagatgggctcgggccccctcacccaaactcctacactacaacctcccccagttgatgccctccagtttatcctcctcaagctcccaaagggatttttttgttaatggctttattgagatataatttacatactataaaattcacttgtttgaaatgtacaattcagtgatttggggggtttctaaagtgtagatctgattatatactgcttaaaaccttccatgatgctttattgcccttaagattatacatagaatctcgttcttcctagaatgttttcctgtctaacccatctactgcataattccctgatttttctccacaggttatgcccctgatgaatggggactaaagctcagatgtgtggtcatttgcaacccctgagttcacttttttaagacagcttattgatatatataatgtacataccatacagtcacccacttaaaagtatacaattaaatagcttttagtatattcagagttgtgcagccatcattcgaaaaaaaatttcagaacattttcatcactgcagaaagaaactccatatcccttaggcgtcctttacccctcatcccatttgcctattctggacattttacataaatggaatcgtataatatgtgaa

SEQ ID NO: 144113 - DNA, 4683 bp, Artificial Sequence
  derived and/or modified sequence
atggaacccggatccgatgactttctccctcctccagagtgtccagtgtttgaaccgagctgggcggagttcagagatccactgggttatatcgccaaaattagaccaattgcagaaaaatccgggatctgtaaaatacggcctcctgctgactggcagcccccatttgctgtggaggtcgataattttcgatttaccccaaggattcagcggttgaacgagttagaggctcagacgagagttaagctgaattacctggatcaaatcgcaaagttctgggagatccagggaagttctcttaagatccccaatgttgagcgcagaatcctcgacttatattccctcagcaagatagtggtggaggagggaggctatgaggccatttgcaaggatcggcggtgggctcgagtggcccagcgcctcaattatcctcccgggaagaacattgggagtttacttaggtcccactatgaaaggatcgtgtacccttacgagatgtaccagagtggtgcgaatctggtgcaatgtaacactagacctttcgacaacgaggaaaaggacaaagaatacaagccacactcaatcccgctgcggcagagtgtccagccttctaagttcaattcgtacgggcgaagagcaaaacggctgcaaccagatcctgaacctacagaagaagatatcgagaaaaatccagagcttaagaagcttcagatatatggcgccggccccaagatgatgggtctgggactcatggccaaggataaaaccctgagaaaaaaggacaaagagggacctgagtgtccccctacagtggttgtcaaggaggagctcgggggagacgttaaagtcgaatctacctccccaaaaacattcctggagtccaaagaggagctgagccatagcccggagccttgcactaagatgaccatgcgcttgcgtaggaaccacagtaacgcgcagttcatcgagtcttacgtctgccggatgtgctctagaggcgatgaggacgacaaactgcttttgtgtgatgggtgcgatgacaattaccacatcttctgcctccttcctccactacctgagatccccaaaggtgtgtggcgctgccctaagtgtgtgatggctgagtgcaaacgaccacctgaagcgtttggtttcgaacaggctacgcgagaatatacactccagagcttcggagagatggccgactcgttcaaggcggattactttaatatgccggtccacatggtccctaccgagctcgtagaaaaggagttttggagactggtcaattctattgaggaagatgtgaccgttgagtacggggcagatatccactcaaaagagttcgggtctggattccccgtatccgattcaaagcgacaccttactccagaggaagaagaatatgccacatcaggatggaacctgaacgtgatgcctgtgctggaacaatcagtgctctgtcacataaatgctgatatttcaggcatgaaggtgccctggctctacgtgggcatggtgttctctgctttttgttggcacatcgaggaccactggagctattccatcaattatttgcattggggagaacctaaaacatggtacggtgtgccttctctggccgctgaacacctcgaggaggtgatgaagaaacttaccccggagttattcgatagtcagccagacctcctgcatcagctcgtgacattaatgaatccgaatactttgatgagccatggggtccccgtagtgaggactaaccagtgtgccggtgaatttgtaattacctttcccagggcatatcacagcggatttaatcagggctataactttgcggaagctgtcaatttttgcaccgccgactggcttccggccggtcgtcagtgcatcgagcactatagacggttgagacgctactgcgtgttcagtcacgaagagttgatttgtaaaatggctgcttgtcccgagaaactggatctgaatctggccgccgccgtccacaaggagatgtttataatggttcaagaggaaagaagactaagaaaagcgctcctggagaagggcattacagaggctgagcgggaagcctttgaattgctccctgacgacgagagacagtgtattaagtgcaaaaccacatgctttctatccgcactggcctgttatgactgcccagatgggttggtttgtctgtctcatatcaatgatctgtgcaaatgcagttcctcaagacaatacctgcgctaccgctacaccctagatgaactgccagcaatgcttcacaagttgaaggtgagggctgagagtttcgatacctgggcaaacaaagtgcgcgtggccctcgaggtggaagacgggcgaaagcgctcacttgaagagctccgggctttggagtcagaggccagggaacggcgctttcccaactccgagctactccagcagttgaaaaactgcttatctgaggctgaggcctgtgtatcccgggcactgggtctcgtgtccgggcaggaggccggacctcatcgagttgccggtttacaaatgacactgacggagcttcgtgcgttccttgaccaaatgaacaatctcccttgcgctatgcatcaaatcggcgatgtgaagggggtactggagcaggtggaagcctatcaggcagaagcccgggaggccctggcctctctgccttctagcccgggccttctgcagagcttactggagaggggccgacaattaggtgtggaagtgcccgaggcacagcagctgcagagacaagtggagcaggcgcgatggctcgatgaggtgaaaaggacactggcgccctctgctagacgaggcacgcttgctgtgatgcgcggactgctggttgccggggcctctgtggcgccgtcgcctgccgttgacaaagcccaggcggaactacaagagttattaacaattgcagaacgctgggaggagaaggcacatctttgcctggaggctaggcagaagcaccctccggccaccctcgaagcaattatcagagaagcagagaatatccctgtacacctacccaacattcaggccttgaaggaggctctcgcaaaggctagagcgtggattgccgatgtggacgaaatacagaacggcgatcactatccatgcctggacgacctggagggcctggtggctgtcggtcgcgatctgccagtggggctggaggagcttaggcagttggagttgcaggtcctcaccgcccatagctggcgggagaaggcatccaagaccttcctgaagaagaactcgtgttacaccttactcgaggtactgtgcccttgtgcagatgcgggttctgacagtaccaaacggtcaaggtggatggagaaggagttggggctgtataagagcgacacagaacttctgggcttgtcagctcaggacctccgggacccaggtagcgtcattgttgcatttaaggagggggaacagaaggagaaggagggtatcctgcagctgcgcagaacgaattcggcgaagccaagcccactggcctctagtagcactgcgtccagcacaacttcaatttgcgtatgcggccaagtcttggcgggggctggtgctctccagtgtgacttgtgtcaggattggtttcatggccggtgcgtgtctgttcctaggcttcttagttctccacgtcccaatccaaccagtagcccactcttagcttggtgggagtgggacactaaatttctgtgccctctttgcatgagatctagaagaccccggttggagacaatcctggccctcttggtagccctgcagcgccttcctgtgaggttgcccgagggagaggccctgcagtgcttaactgagcgcgcaataagctggcagggacgagcccgacaggccttggcgtcggaggacgtcacagccctcttaggccgcctggccgagttgcgccaaagactgcaggcggagccaagacctgaagaacctcccaattacccggctgcgcctgctagtgatccactcagagagggaagtggaaaagatatgccaaaagtacagggcctgctggagaatggggacagcgtcactagcccagaaaaggtggctcccgaggaaggctcaggcaagcgagatctggagctcctctcttccctgctgcctcagctgaccggtcccgtcctagaactgcccgaggctactagagcacctcttgaagaattgatgatggaaggtgacctgctcgaggtgaccctcgacgagaatcattcaatttggcaactcctccaagccggccaaccccccgacttagaacggataagaaccctgttggaactggagaaagcagaacgtcatggatccagagctagaggaagagcattggaacgccgacggcgacggaaagtggatagaggaggagagggtgacgatccggcaagagaagagctggagccaaagcgggtgcgatcttcaggccccgaggctgaggaagtacaggaggaggaagagcttgaggaggagacgggcggggagggacctccagctccaatccccacaacaggttctcctagtactcaggagaaccagaacgggttagaaccagctgaggggacaacctcaggacccagcgcccctttttctaccctgacgccccgcttgcacttgccttgtccgcagcagccgccacagcagcagctgtag

SEQ ID NO: 144114 - DNA, 4683 bp, Artificial Sequence
  derived and/or modified sequence
atggagcccggcagtgatgacttcctgcccccaccagaatgtcctgtgtttgagcccagctgggccgagttccgggaccccctgggctacatcgccaagatccggcccatcgccgagaagagcggcatctgcaagatccggcccccagctgactggcagcccccatttgctgtggaggtggacaacttccgcttcaccccccgcatccagaggctgaatgagctggaggcccagaccagggtgaagctgaactacctggaccagatcgccaagttctgggagatccagggcagcagcctgaagatccccaacgtggagcggcgcatcctggacctgtacagcctgagcaagatcgtggtggaggagggcggctatgaggccatctgcaaggaccggcgctgggcccgggtggcccagaggctgaactacccacctgggaagaacatcggcagcctgctgcggagccactatgagcgcatcgtgtacccctatgagatgtaccagagcggggccaacctggtgcagtgcaacacccggccctttgacaatgaggagaaggacaaggagtacaagccccacagcatccccctgcggcagagcgtgcagcccagcaagttcaacagctatggaagaagagccaagaggctgcagcctgaccctgagcccacagaagaagatattgagaagaaccctgagctgaagaagctgcagatctatggagctggccccaagatgatgggcctgggcctgatggccaaggacaagaccctgaggaagaaggacaaggagggccctgagtgcccccccaccgtggtggtgaaggaggagctgggcggagatgtgaaggtggagagcaccagccccaagaccttcctggagagcaaggaggagctgagccacagccctgagccctgcaccaagatgaccatgaggctgcggaggaaccacagcaatgcccagttcatcgagagctatgtgtgcaggatgtgcagcagaggagatgaagatgacaagctgctgctgtgtgatggctgtgatgacaactaccacatcttctgcctgctgccccccctgcctgagatccccaagggcgtgtggcgctgccccaagtgtgtgatggccgagtgcaagaggcctcctgaggcctttggatttgagcaggccacccgggagtacaccctgcagagctttggagagatggctgacagcttcaaggctgactacttcaacatgcctgtgcacatggtgcccacagagctggtggagaaggagttctggaggctggtgaacagcattgaggaggatgtgacagtggagtatggagctgacatccacagcaaggagtttggaagtggcttccctgtgtctgacagcaagaggcacctgaccccagaggaggaggagtatgccaccagcggctggaacctgaatgtgatgcctgtgctggagcagagcgtgctgtgccacatcaatgctgacatcagcggcatgaaggtgccctggctgtatgtgggcatggtgttttctgccttctgctggcacatcgaggaccactggagctacagcatcaactacctgcactggggcgagcccaagacctggtatggagtgcccagcctggccgctgagcacctggaggaggtgatgaagaagctgaccccagagctgtttgacagccagcctgacctgctgcaccagctggtgaccctgatgaaccccaacaccctgatgagccatggagtgcctgtggtgaggaccaaccagtgtgccggggagtttgtgatcaccttcccccgggcctaccacagcggcttcaaccagggctacaactttgctgaggccgtgaacttctgcacagctgactggctgcctgctggccggcagtgcatcgagcactaccgccgcctgcggcgctactgtgtgttcagccatgaggagctgatctgcaagatggccgcctgcccagagaagctggacctgaacctggccgctgctgtgcacaaggagatgttcatcatggtgcaggaggagcggcggctgaggaaggccctgctggagaagggcatcacagaggccgagcgggaggcctttgagctgctgcctgatgatgagcggcagtgcatcaagtgcaagaccacctgcttcctgagcgccctggcctgctatgactgcccagatggcctggtgtgcctgagccacatcaatgacctgtgcaagtgcagcagcagccggcagtacctgcgctaccgctacaccctggatgagctgcctgccatgctgcacaagctgaaggtgcgggcagagagctttgacacctgggccaacaaggtgcgggtggccctggaggtggaggatggcaggaagaggagcctggaggagctgcgggccctggagagcgaggcccgggagcggcgcttccccaacagcgagctgctgcagcagctgaagaactgcctgtctgaggccgaggcctgtgtgtcccgggccctgggcctggtgtctggccaggaggccggcccccaccgggtggccggcctgcagatgaccctgacagagctgcgggccttcctggaccagatgaacaacctgccctgtgccatgcaccagattggagatgtgaagggcgtgctggagcaggtggaggcctaccaggccgaggcccgggaggccctggccagcctgcccagcagccctggcctgctgcagagcctgctggagcggggccggcagctgggcgtggaggtgcctgaggcccagcagctgcagaggcaggtggagcaggcccgctggctggatgaggtgaagaggaccctggcccccagcgcccggcggggcaccctggccgtgatgaggggcctgctggtggccggggcctctgtggcccccagccctgctgtggacaaggcccaggccgagctgcaggagctgctgaccatcgccgagcgctgggaggagaaggcccacctgtgcctggaggcccggcagaagcaccccccagccaccctggaggccatcatccgggaggccgagaacatccctgtgcacctgcccaacatccaggccctgaaggaggccctggccaaggcccgggcctggattgctgatgtggatgagatccagaatggagaccactacccctgcctggatgacctggagggcctggtggccgtgggccgggacctgcctgtgggcctggaggagctgcggcagctggagctgcaggtgctgacagcccacagctggagggagaaggccagcaagaccttcctgaagaagaacagctgctacaccctgctggaggtgctgtgcccctgtgctgatgctggcagtgacagcaccaagaggagccgctggatggagaaggagctgggcctgtacaagagtgacacagagctgctgggcctgagcgcccaggacctgcgggaccccggctctgtgattgtggccttcaaggagggggagcagaaggagaaggagggcatcctgcagctgcggaggaccaacagcgccaagcccagccccctggccagcagcagcacagccagcagcaccaccagcatctgtgtgtgtggccaggtgctggccggggccggggccctgcagtgtgacctgtgccaggactggttccacggccgctgtgtgtctgtgccccggctgctgagcagcccccggcccaaccccaccagcagccccctgctggcctggtgggagtgggacaccaagttcctgtgccccctgtgcatgaggagcagaagaccccggctggagaccatcctggccctgctggtggccctgcagaggctgcctgtgcggctgcctgagggggaggccctgcagtgcctgacagagcgggccatctcctggcagggccgggcccggcaggccctggcctctgaagatgtgacagccctgctgggccgcctggccgagctgcggcagaggctgcaggccgagcccaggcctgaggagccccccaactacccagctgccccagccagtgaccccctgcgggagggcagcggcaaggacatgcccaaggtgcagggcctgctggagaatggagacagcgtgaccagccctgagaaggtggcccctgaggagggcagcggcaagagggacctggagctgctgagcagcctgctgccccagctgactggacctgtgctggagctgcctgaggccacccgggcccccctggaggagctgatgatggagggggacctgctggaggtgaccctggatgagaaccacagcatctggcagctgctgcaggccggccagcccccagacctggagcgcatccgcaccctgctggagctggagaaggccgagcggcacggcagccgggcccggggccgggccctggagaggagaagaagaaggaaggtggaccggggcggggagggagatgatcctgcccgggaggagctggagcccaagagggtgcgcagcagcggccctgaggccgaggaggtgcaggaggaggaggagctggaggaggagaccggcggggagggccccccagcccccatccccaccaccggcagccccagcacccaggagaaccagaatggcctggagcctgctgagggcaccaccagcggccccagcgcccccttcagcaccctgaccccccggctgcacctgccctgcccccagcagcccccccagcagcagctgtag

SEQ ID NO: 144115 - DNA, 6031 bp, Artificial Sequence
  derived and/or modified sequence
cttgttcctccgccgttgcaatgaactattttctctcagtccggggtggtacttttgagtaaccccttccaaatagaaacccataccagcctatttagctcggtctccactatatgaaggtttcctagggcttggtgtgacgcaacgtatacgaggctcggaaggacaccccgcggaaggatccggtttgttgtggtgtggggaggggagacgctgacaaaccaagatggcggcggcggcgctgaaggccgcggcgtttgggaggtaactgtggtggcgaaggctgcggtagtggggaggcaaccacacagtttggaagaaacggagcgggacgaagaggcggtagcagtagagtcagcctgagactctcagagcacgacggccacacgcccccttaggccctcggcgggcggcggctgccccgcttagggcctagcctccgagcattgcctcggcttcaaacagcggcggcgccatgagtccttaagggcggtccaagcctcccgatccctggcccagacctcgggcccaccatggagccggggtccgacgatttcctaccgccaccggagtgcccggtgttcgagcctagctgggccgagttccgagaccctcttggctacatcgcgaaaatcaggcccatcgcagagaaatcgggcatttgcaagatccgcccacccgcggactggcagccaccctttgctgtggaagtggacaacttcaggtttaccccccgaatccagaggctgaatgagctagaggcccagacgagagtgaaactgaactacttggaccagattgccaaattctgggaaatccagggctcctccttaaagattcccaatgtagaacggcggatcttggacctctacagtctcagcaaaattgtggtggaggaaggtggttatgaagctatctgcaaggaccgtcggtgggctcgggtagcccagcgcctcaactatccaccaggcaaaaatattggctccttgctacgctcccactacgaacgcattgtttatccctatgaaatgtaccagtctggagccaaccttgtgcagtgtaacacacgtccatttgataatgaggagaaggacaaggaatacaaaccccacagcatccccctacgacagtctgtgcagccttccaagttcaacagctatggccggcgggccaagagactgcagcctgatccggaacccacagaggaagacattgagaagaatccagagctgaaaaagctacagatctatggggcaggccccaagatgatgggcctgggcctcatggccaaagacaagactctgcggaagaaagataaggaggggcctgagtgtccccccacagtagtggtgaaggaggagttaggtggggatgtgaaggtggagtcaacatcgcctaagaccttcctggagagcaaggaggagctgagtcacagcccagaaccctgcaccaagatgaccatgaggctacggaggaaccacagcaatgcccagtttattgagtcatatgtctgccggatgtgttctcgaggggatgaggatgacaagctcctgctgtgtgatggctgtgatgacaactaccacatcttctgcctgctgcctcctctgcctgagatccccaagggtgtctggcggtgcccaaagtgtgtcatggcggagtgtaagcggcccccagaagcctttggctttgagcaggctacccgggaatacactctgcagagctttggcgagatggccgactcctttaaagctgactacttcaacatgcccgtgcatatggtgcccacagaacttgtggagaaggagttctggaggctggtaaatagcattgaggaagatgtgactgttgagtatggagctgacatccattccaaagaatttggcagcggtttccctgtcagtgacagtaaacggcacctaacccccgaagaggaggagtatgctaccagtggttggaacctaaatgtgatgccggtgttggaacagtctgtactgtgccacatcaatgcagatatctctggcatgaaggtgccctggctctacgtgggcatggtcttctcagccttttgctggcatattgaggatcactggagttactccattaactacctccactggggtgagccgaagacctggtatggggtgccctcacttgcagcagaacatttggaagaagtgatgaagaagctgacacctgaactatttgatagccagcctgacctcctgcaccaacttgtcaccctcatgaatcccaacaccctcatgtcccatggtgtgccagttgtccgcacaaaccagtgtgcaggagagtttgtcatcaccttcccccgtgcttaccacagcggcttcaaccaaggctacaactttgccgaggctgtcaacttttgcactgctgactggttgcctgctgggcgccagtgcattgagcactaccgccggctccggagatactgcgtcttctcccatgaggagcttatctgcaagatggctgcctgcccagagaagctagacctgaacctggcggcagctgtgcataaggagatgttcatcatggtgcaagaagagcggcgtctacgaaaggccctgctggagaagggtatcacagaggctgagcgagaggctttcgagctgctcccagatgatgagcgccagtgtatcaagtgcaagactacgtgtttcctgtcagccctggcctgctacgactgcccagacggccttgtctgcctttcccacatcaatgatctctgcaagtgctccagtagccggcagtacctgcggtatcggtataccttggatgagcttcctgccatgctgcataagctgaaggttcgggctgagtcctttgacacctgggccaacaaagtgcgagtggccctggaggtggaggatgggcggaagcgcagccttgaagaactgagggcactagagtctgaagcccgtgagcggaggtttcctaatagtgagctgctgcagcaactaaagaactgcctgagtgaggcagaggcttgcgtgtcccgagctctgggactggtcagcggccaggaagctggcccccacagggtggctggtctacagatgaccctgactgagctccgggcctttctggaccagatgaacaacctgccttgcgccatgcaccagattggggatgtcaagggtgttctggaacaggtggaggcctaccaggctgaggctcgtgaggccctggcctcactgccctccagtccagggctactgcagtccctgttggagagggggcggcagctgggggtggaggtgcctgaggcccagcagctccagcggcaggtggaacaggcgcgatggctggatgaggtgaaacgcacactggccccctcagcccgaaggggcaccttggctgtcatgcgaggactgttggtcgcgggtgccagtgtagcccctagccctgctgtggataaagcccaggccgagctgcaggaactgctgaccattgctgaacgctgggaggagaaagcccacctctgcctggaggccaggcagaagcatccaccagccacacttgaggccataatccgtgaagcggaaaacatccctgttcacctgcccaacatccaggctctcaaggaggctcttgctaaggcccgggcctggattgctgatgttgatgagatccaaaatggtgaccactacccctgcctggatgacttggagggcctagtagctgtgggccgggacctacctgtggggctggaggagctgagacagctagagctacaggtactgacagcgcactcctggagggagaaggcctccaagaccttcctcaagaaaaattcttgctacacgctgctggaggttctctgcccatgtgcagatgccggctcagacagcaccaagcgcagccggtggatggagaaggagctggggttgtacaaatctgacacagagctgctggggctgtctgcgcaggacctcagggacccaggctctgtgatcgtggccttcaaggagggggaacagaaggagaaggagggtatcctgcagctgcgtcgcaccaattcggccaagcccagtccactggcatcatcgagcacggcctcctctacaacctctatctgtgtgtgtgggcaggtgctggctggggcgggagctctgcagtgtgacctgtgtcaggactggttccatgggcggtgtgtgtcagtgcctcgcctcctcagctctccgaggcccaatcccacctcatccccactgctggcctggtgggaatgggacaccaaattcctgtgtccactgtgtatgcgctcaaggcgcccgcgcctggagaccatcctggcactgctggtagccctgcagagactgcctgtgcggctgcccgagggcgaggccctgcagtgcctcacagagagggccatcagctggcaaggccgcgccaggcaggctctggcctctgaagatgtgactgctcttttgggacggctggctgagctccgccaacggctacaggctgaacctagacctgaggagcctcctaactaccctgcagcccctgcttctgaccccctcagagagggcagtggcaaggatatgcctaaggtccagggcttactggagaatggagacagtgtgaccagtcctgagaaggtagccccggaggagggctcaggtaagagagatctggagctgctgtcctcgctgttgccacagttgactggccctgtgttggaactgcctgaggcaacccgggcccccttggaggagctcatgatggagggggacctgctcgaggtgaccctggatgagaaccacagcatatggcagctgctgcaggctggacagcccccagacctggagaggatccgcacacttctggagctggagaaggcagagcgtcacgggagtcgggctcggggccgggccctggagaggcggcggcggcggaaggtggatcggggtggggagggcgatgacccagcccgagaggagctagagccaaagagggtacggagctcagggccagaggctgaggaggtccaggaggaggaagagctggaggaggagactgggggtgagggcccccctgcacccatccccaccactggcagccccagcacccaggagaaccagaatggcttggaaccggcggaagggaccacttcaggcccctcggcccctttctccactctgactccccggctgcatctgccctgcccacagcagccgcctcagcaacagttgtgacagtggctgagcctagcacagaccctgacagagacccccctcggcctcaaggatcctctttctgaccatcaagcctgcttcttggggggtgggcgggtaggggggtggccatccctgctacccgcccacccctgagtcccttgacttttgtattctgactccaaggtattgttcagacctcagctcctgggggccggcccctggagtcttccctccctggtagcctctaaccagcattcccagacacctgaggcagatagatggatgggctggtgggcaggggggtggctggggctgggccatcaccattccagagacaaggccagtgtatatgcaaactgggggactctcctcccttctctccccagttctggtcctggccaggccatgctacactaacccctgcccccactctcctcccctcttttccttccttcctacccccttctccctctcccttcccctgactgttccacccaggaggaggaaacttcacatagccgtgctcacagttttttattttaaaggaatttggctggggagctgaacagggctccctgtgatctgaagaaagcttttggtgcttgtcctcacaaccacctcagtcctccctccctgtcctcccctgtctcctttcctcctcctgggttcatgttgtaataaaagaagattgttggtgtgtaattaatttgttcaaaagaaaaaaaaaagcaaaacaagaaacttggttccaactgaagcctattttaattttattttattattttcctcttgttagaaataaaacccttagaaacattttttggaaacatgtt

SEQ ID NO: 144116 - DNA, 4683 bp, Artificial Sequence
  derived and/or modified sequence
atggagcccggcagcgacgacttcctgcccccccccgagtgccccgtgtttgaaccttcctgggcagagtttcgcgaccccctggggtatatcgccaagatcagacctatcgctgagaaatccggcatatgcaagatcaggccccccgccgattggcagccgcccttcgccgtggaggttgacaacttcagattcacccctaggattcagcgcctcaacgaactcgaggcccagaccagagtcaagttgaactacctcgaccagattgccaagttctgggaaatccagggcagctcactaaagatcccaaatgtcgaaagacggatcctggatctctattctctttccaagatcgttgtcgaggagggggggtatgaagctatctgcaaagacagaagatgggcacgcgtggcccagaggctgaactatcctccgggaaagaacattgggagcctgctgcggtcacactatgagaggattgtttacccttacgaaatgtaccagagcggagcaaacctggttcaatgcaacacccgcccctttgacaatgaagagaaggacaaagaatacaaaccccattcaatccctctcagacagagcgtacagccctctaaattcaactcctacgggagacgagcgaaacgattgcaacctgatccagagcctacagaagaggacatcgagaaaaacccagagttgaagaagctgcagatttacggcgctgggcccaaaatgatgggcctcggccttatggctaaggacaagactttgaggaagaaagataaggagggcccggaatgcccacccactgttgtggtaaaagaggaactgggtggcgacgtgaaagtcgaatcgacctcccctaagacctttttggaatcaaaggaggagctctcccattcccccgagccttgcactaagatgaccatgcgcctgcggaggaaccacagcaatgctcagtttatagagtcttacgtatgcagaatgtgttcccgtggtgatgaagacgacaagcttctgctgtgcgacgggtgcgatgataattatcacattttctgtctgttgccccctctgcccgaaatccctaagggggtgtggagatgccctaagtgcgtcatggctgaatgcaaacgcccaccggaagcattcggtttcgagcaggctacacgcgagtataccttgcaaagttttggggaaatggctgacagcttcaaggcagactacttcaatatgcccgtgcatatggtcccaacggagctcgttgagaaggaattttggcgtcttgttaattccatagaggaagacgtgactgtggaatatggggctgatatccattccaaggagttcggatccggttttcccgtttccgacagcaagcgccacttaacccctgaggaagaagagtacgccaccagcgggtggaacttgaacgtgatgcctgtgctcgagcaatccgtattgtgtcatataaacgccgatatctcaggcatgaaggtaccttggttgtatgtcgggatggtatttagcgccttctgctggcatatcgaagatcactggtcctatagcattaactacctccactggggggagccgaaaacatggtatggcgtaccctcgctcgcggccgagcatctcgaggaggttatgaagaagctcaccccagagctttttgacagtcagcccgatttgctacatcaactggtcacactaatgaatcccaatacgttgatgtcccatggcgtgcctgtggtgcgaaccaatcagtgtgccggggaatttgtgatcacctttcctagagcctaccattctggcttcaatcagggctacaactttgcagaagccgtcaacttttgcaccgcggactggctccccgctggcaggcagtgcattgaacactaccggcgcctgagacgctactgtgtgttttcccatgaagaactgatttgtaagatggccgcatgccccgaaaagctcgacctcaatttagcggctgcggtgcacaaagaaatgtttattatggtgcaagaagagaggaggttacgaaaagccttgctggagaagggcattaccgaggccgagagggaggccttcgaactgctacctgacgatgagaggcagtgtatcaagtgtaagaccacttgttttcttagcgctcttgcctgttatgactgtcccgatggtctcgtttgtcttagtcatatcaatgacttgtgtaagtgtagcagttcccggcagtatctgaggtacaggtacaccctcgatgagctgcctgccatgctgcataaattgaaagttcgcgccgagtcattcgatacctgggccaataaggttcgcgtggcactagaagtggaagacggaagaaagcgctcgctcgaggagcttcgggcattggaaagcgaggccagggagcgacgatttccaaacagcgagctgcttcaacagctcaagaactgcctgtctgaggctgaggcgtgcgtgagcagggcactcggactggtctcaggccaggaggccgggccccatagggtagctggtctgcaaatgactcttacagaacttagggcttttctcgatcagatgaataacctcccctgcgctatgcaccagattggagatgtgaaaggagtgttggagcaagtggaggcttaccaggccgaggcccgggaagccctagcctcactgcccagcagtcctggtttactgcagagtttgttagagagaggccggcagttgggggtggaagtgccagaggcacagcaattgcagcgccaggtggaacaggcccgatggctggacgaggtcaagcggactctggctccatccgcacgccggggaaccctcgcagtgatgaggggcctgttggttgctggggccagcgtagctccgagccccgcagttgacaaggctcaagcggagcttcaggagcttcttactatcgccgaacgatgggaggaaaaggctcacctgtgcctggaggcacggcagaaacacccaccagcgactctcgaagccataattcgcgaggcggagaatattcctgtgcacctgccaaacatccaggccttgaaggaggccctggccaaggcccgggcctggatcgctgatgttgatgagatccaaaacggcgaccactatccttgccttgacgacctagaagggctggtagcagtgggacgggacctgcctgttggcctggaggagctccgccagctggagctccaggtgctgacagcacacagctggagagagaaggccagcaagactttcctaaagaagaattcatgttacaccctgctagaagtgttatgtccttgtgctgacgctggcagcgattctactaagcgctcacgctggatggagaaggagctcggtctgtacaagagcgacacagagttactagggctgtcagcccaggatttgcgtgaccctggtagtgtaatagtggcgttcaaggaaggcgagcaaaaagaaaaggagggaatactgcagttgcggcgcacaaactccgctaaacccagcccactggcctcctccagcaccgcctcgtcaaccacttcaatttgtgtgtgtggccaggtactagcaggagcaggcgctctgcagtgtgacctatgtcaagattggtttcatggacgctgtgtgtctgtgcccagacttcttagcagccctagaccgaatcccacatccagtccattgcttgcttggtgggagtgggacactaagttcctgtgccctctctgtatgcgaagtcggcgacctcgcctcgaaactatactcgcccttttagtggccttgcagagattgcccgtcagactgcctgagggtgaagccttgcagtgcctcactgagagggccattagctggcaggggcgggccagacaggcactggctagcgaggacgtgactgccctgcttggacgactcgccgaactgcgacagagactgcaggccgaacccaggcccgaagagcctcctaattatcccgctgctccagctagcgatccgctccgagaaggctccggaaaggatatgccaaaagtgcagggactcttagaaaacggagatagcgtcacaagccccgagaaggttgcgcccgaggagggctcaggcaagagagacttggagttgctgtcaagcttgctcccacaacttacagggcctgtgctggaactccccgaggccactagggctccgcttgaggagctgatgatggagggtgatttgctggaggtgacactggacgaaaatcacagtatctggcagcttcttcaggccggccagcccccagacctagaacgtatccgaaccttgctcgagctggagaaagcagaaaggcacggttcccgggccaggggacgagcactggagcgccgcaggcgcagaaaagttgatcgcggcggtgaaggagatgacccagctagggaagagctggaaccaaagcgggtgagatcctccggcccggaagccgaagaagtccaagaggaagaggaactagaagaagagaccggaggcgaggggccgcctgccccaataccaactacgggcagtccctcaacacaagagaaccagaatgggctcgaaccagctgaagggactacatcaggcccttcagcccctttctccaccctgacaccacgcctgcacctaccatgtccccaacagccaccacaacaacagctgtag

SEQ ID NO: 144117 - DNA, 4683 bp, Artificial Sequence
  derived and/or modified sequence
atggagcccggttccgacgattttctgcctcccccagaatgccccgttttcgaaccctcatgggccgagtttcgagatccgctgggctacatcgcaaagattaggccaatcgctgagaagtctgggatctgtaaaattcgccctcccgcagactggcagcctcccttcgctgtagaggtggacaatttcagattcacaccacgcatccagcgtttgaacgaattggaagcacagacccgtgtgaagctcaactatcttgatcagattgccaagttttgggagatacagggctcaagcctgaagatcccgaatgtagagcggaggatattagacttgtacagtctgagtaaaattgtggtcgaggaaggtggatatgaagccatatgcaaagatcgcaggtgggcgcgtgtggcccaacggctcaattacccccctggcaagaacatcgggtctctactacggagccattacgagaggatcgtttacccctacgagatgtatcagagtggcgctaatctggtgcagtgcaatacaaggccgtttgataatgaggagaaagataaagaatataaaccccactctattccattgaggcagagcgtacagccttccaaattcaactcatacggccgaagggcgaaacggctgcagcccgacccagagcctaccgaggaagacatcgagaagaacccggagcttaaaaagctgcagatttacggtgccggtcccaaaatgatgggtctcggcctcatggcaaaggataaaaccctaagaaagaaggacaaagagggacctgaatgcccgcctaccgtagtggttaaggaagaactgggaggtgatgtaaaagtggaaagcacctcccctaagacattcctggagagcaaagaggaactgtcgcactctccagagccctgcaccaagatgaccatgcggttgaggagaaatcactcaaacgcacagttcatcgagagttacgtgtgccgaatgtgcagtcggggagatgaagatgacaaactgttgttgtgcgatggctgcgatgataattatcatatcttctgccttttgccccctctacccgaaatccctaaaggggtgtggagatgtccgaaatgtgtgatggcagagtgcaagcggcctcctgaggccttcgggttcgagcaggctacccgagaatatacactccagtccttcggcgagatggccgactcctttaaagcagactacttcaatatgcccgtgcacatggtccctactgagctagtagaaaaggaattttggcgtctagttaattccatagaggaagatgtcactgtcgagtatggggcagatatacattccaaggagtttgggagcggttttcctgtctctgactcaaaacgccatttgactcccgaggaggaggagtatgcaaccagcgggtggaatctaaacgtgatgcctgttttagagcagtccgttctatgccatattaacgccgacatttctggcatgaaagtaccctggctgtacgtaggcatggttttttccgccttctgctggcacatcgaagaccattggtcttacagtataaattacctgcactggggtgagcccaagacctggtatggcgttccttctctggcagcggagcacctggaggaagtgatgaagaaactgacgccagagcttttcgatagtcagccagacctgctgcaccagctggtaacactcatgaatcccaacacacttatgagtcacggagtgcccgtcgtacggactaaccaatgtgcgggtgaattcgtgattacatttcctcgcgcatatcacagtggtttcaatcaggggtataattttgcagaagcagtgaatttctgtactgcagactggctgccagcaggacgacaatgcatcgagcattacagacgcttgaggaggtactgtgtgtttagtcacgaagaacttatttgtaagatggccgcttgtccggaaaagctggatctgaatctcgccgcagccgtgcacaaagagatgttcatcatggtacaagaggagcgtaggctgagaaaagcccttcttgagaaaggcatcaccgaagccgagcgggaggcctttgagctcctccccgatgatgagaggcagtgcattaagtgcaagacaacttgcttcctcagcgccttggcctgctacgattgccctgacggcttggtttgcttatcccacatcaatgacttatgcaaatgctctagcagcaggcagtacctcaggtaccgttatacactggatgagctacccgctatgcttcataagctgaaagttagggccgagtcattcgacacctgggcgaataaggtgcgcgtggctctggaagttgaagatggcagaaagcggtctctggaggagctgcgcgctttagaatcagaagcaagagagaggagattcccaaactccgagctcctacaacagctcaaaaattgcctcagcgaagcggaggcctgtgtgtcacgggcactgggattggtctcagggcaggaggcaggaccgcaccgtgtggcgggactgcagatgactctgacggaattaagggcctttctagatcaaatgaacaatttgccttgcgccatgcaccaaattggtgacgtgaagggggtgctggagcaggtggaagcctaccaggcagaggctcgagaagccctggcttccctgccgtcgtccccaggattgctccagtccttgctggaacgcggacgccagcttggggtggaagtgccagaggcacagcagctgcagcgccaggttgagcaggcaaggtggctggatgaagtgaagcggacactcgccccaagcgcaaggcggggaaccctcgccgtgatgagagggctactcgtggctggtgccagcgtcgctccatctcccgcagtggataaggctcaagcggaattacaggaactgctcacaattgccgagcgctgggaagaaaaagctcatctttgtctagaggcacgccagaagcacccccctgccacgctcgaggccatcatccgagaggcagagaacatccccgtccacctcccaaatatacaggcgctaaaggaagcactggctaaagcaagagcctggatcgcagacgttgacgaaatacagaatggcgatcactatccctgcctcgacgatttagagggactagttgcagtcggcagagacctccctgttggtctcgaggagctacgccagctcgagcttcaagttctaacagctcactcttggagagaaaaagcttctaagaccttcctaaagaaaaattcatgttacaccttactcgaggtgctctgtccttgtgcggacgcgggatcggactccacaaaacggtctcggtggatggaaaaagagctcggtctgtataaatctgacacagaactgctaggcctgtcggcacaggatctccgcgaccccggttccgtgattgtggcattcaaagagggcgaacagaaagagaaggaggggatattgcagctgcgcaggacaaattcagcaaaaccgtcgccactggcctcatcctctactgcctcatctaccacttcaatttgtgtttgtggacaggttttggccggtgccggtgcactgcagtgcgacctctgccaggactggtttcatggtcgctgtgtgtcggttcctagactgctctcttctcctagaccaaatcctacatctagtcccctgcttgcctggtgggagtgggacaccaagtttctgtgccctctgtgtatgagatcacggaggccccgactcgaaacaattttggctctgctggtcgccctgcagcgtcttcctgtgcggctcccggaaggagaagctctgcagtgtctgaccgagagagccatttcatggcagggacgcgctcggcaggcccttgcgagcgaggacgtcacagccctcctgggcaggctcgccgaactacgccaacggttacaggctgagcccaggcctgaagagcctcctaattatcctgctgcacctgcatcagatcccctccgggagggtagcggcaaggacatgcccaaggttcagggtttgttagagaacggggactctgtgacatccccggaaaaagtggcacctgaggagggctctggcaagagggatctcgaactgctgtcttcgctcctaccacagctaacgggaccggttctcgaacttccagaggccaccagagctcccctggaagaacttatgatggaaggcgaccttctggaagttacattagatgaaaatcacagcatatggcagctactgcaagccggtcagcctccagatctggaaaggattcgcactctcctggagttagaaaaagctgaacggcacggcagcagggctcgaggcagagctcttgagcggcgaagacgcagaaaggtggaccggggaggcgagggagacgatccagctcgtgaggagctcgagcctaaacgcgtgagaagctccggacctgaggcagaagaagtgcaggaagaggaggaactggaagaggagacaggcggtgaaggaccgcctgcacctattcctacgacaggaagcccctctacccaggagaatcagaatggactggaaccagccgagggaactacgagtggcccttccgcgcctttctctacactcactccgcgtcttcacttgccttgtcctcagcagccgccacagcaacagttatag

SEQ ID NO: 144118 - DNA, 4683 bp, Artificial Sequence
  derived and/or modified sequence
atggagcccggcagcgacgacttcctgcccccccccgagtgccccgtgttcgagcccagctgggccgagttcagagaccccctgggctacatcgccaagatcagacccatcgccgagaagagcggcatctgcaagatcagaccccccgccgactggcagccccccttcgccgtggaggtggacaacttcagattcacccccagaatccagagactgaacgagctggaggcccagaccagagtgaagctgaactacctggaccagatcgccaagttctgggagatccagggcagcagcctgaagatccccaacgtggagagaagaatcctggacctgtacagcctgagcaagatcgtggtggaggagggcggctacgaggccatctgcaaggacagaagatgggccagagtggcccagagactgaactacccccccggcaagaacatcggcagcctgctgagaagccactacgagagaatcgtgtacccctacgagatgtaccagagcggcgccaacctggtgcagtgcaacaccagacccttcgacaacgaggagaaggacaaggagtacaagccccacagcatccccctgagacagagcgtgcagcccagcaagttcaacagctacggcagaagagccaagagactgcagcccgaccccgagcccaccgaggaggacatcgagaagaaccccgagctgaagaagctgcagatctacggcgccggccccaagatgatgggcctgggcctgatggccaaggacaagaccctgagaaagaaggacaaggagggccccgagtgcccccccaccgtggtggtgaaggaggagctgggcggcgacgtgaaggtggagagcaccagccccaagaccttcctggagagcaaggaggagctgagccacagccccgagccctgcaccaagatgaccatgagactgagaagaaaccacagcaacgcccagttcatcgagagctacgtgtgcagaatgtgcagcagaggcgacgaggacgacaagctgctgctgtgcgacggctgcgacgacaactaccacatcttctgcctgctgccccccctgcccgagatccccaagggcgtgtggagatgccccaagtgcgtgatggccgagtgcaagagaccccccgaggccttcggcttcgagcaggccaccagagagtacaccctgcagagcttcggcgagatggccgacagcttcaaggccgactacttcaacatgcccgtgcacatggtgcccaccgagctggtggagaaggagttctggagactggtgaacagcatcgaggaggacgtgaccgtggagtacggcgccgacatccacagcaaggagttcggcagcggcttccccgtgagcgacagcaagagacacctgacccccgaggaggaggagtacgccaccagcggctggaacctgaacgtgatgcccgtgctggagcagagcgtgctgtgccacatcaacgccgacatcagcggcatgaaggtgccctggctgtacgtgggcatggtgttcagcgccttctgctggcacatcgaggaccactggagctacagcatcaactacctgcactggggcgagcccaagacctggtacggcgtgcccagcctggccgccgagcacctggaggaggtgatgaagaagctgacccccgagctgttcgacagccagcccgacctgctgcaccagctggtgaccctgatgaaccccaacaccctgatgagccacggcgtgcccgtggtgagaaccaaccagtgcgccggcgagttcgtgatcaccttccccagagcctaccacagcggcttcaaccagggctacaacttcgccgaggccgtgaacttctgcaccgccgactggctgcccgccggcagacagtgcatcgagcactacagaagactgagaagatactgcgtgttcagccacgaggagctgatctgcaagatggccgcctgccccgagaagctggacctgaacctggccgccgccgtgcacaaggagatgttcatcatggtgcaggaggagagaagactgagaaaggccctgctggagaagggcatcaccgaggccgagagagaggccttcgagctgctgcccgacgacgagagacagtgcatcaagtgcaagaccacctgcttcctgagcgccctggcctgctacgactgccccgacggcctggtgtgcctgagccacatcaacgacctgtgcaagtgcagcagcagcagacagtacctgagatacagatacaccctggacgagctgcccgccatgctgcacaagctgaaggtgagagccgagagcttcgacacctgggccaacaaggtgagagtggccctggaggtggaggacggcagaaagagaagcctggaggagctgagagccctggagagcgaggccagagagagaagattccccaacagcgagctgctgcagcagctgaagaactgcctgagcgaggccgaggcctgcgtgagcagagccctgggcctggtgagcggccaggaggccggcccccacagagtggccggcctgcagatgaccctgaccgagctgagagccttcctggaccagatgaacaacctgccctgcgccatgcaccagatcggcgacgtgaagggcgtgctggagcaggtggaggcctaccaggccgaggccagagaggccctggccagcctgcccagcagccccggcctgctgcagagcctgctggagagaggcagacagctgggcgtggaggtgcccgaggcccagcagctgcagagacaggtggagcaggccagatggctggacgaggtgaagagaaccctggcccccagcgccagaagaggcaccctggccgtgatgagaggcctgctggtggccggcgccagcgtggcccccagccccgccgtggacaaggcccaggccgagctgcaggagctgctgaccatcgccgagagatgggaggagaaggcccacctgtgcctggaggccagacagaagcacccccccgccaccctggaggccatcatcagagaggccgagaacatccccgtgcacctgcccaacatccaggccctgaaggaggccctggccaaggccagagcctggatcgccgacgtggacgagatccagaacggcgaccactacccctgcctggacgacctggagggcctggtggccgtgggcagagacctgcccgtgggcctggaggagctgagacagctggagctgcaggtgctgaccgcccacagctggagagagaaggccagcaagaccttcctgaagaagaacagctgctacaccctgctggaggtgctgtgcccctgcgccgacgccggcagcgacagcaccaagagaagcagatggatggagaaggagctgggcctgtacaagagcgacaccgagctgctgggcctgagcgcccaggacctgagagaccccggcagcgtgatcgtggccttcaaggagggcgagcagaaggagaaggagggcatcctgcagctgagaagaaccaacagcgccaagcccagccccctggccagcagcagcaccgccagcagcaccaccagcatctgcgtgtgcggccaggtgctggccggcgccggcgccctgcagtgcgacctgtgccaggactggttccacggcagatgcgtgagcgtgcccagactgctgagcagccccagacccaaccccaccagcagccccctgctggcctggtgggagtgggacaccaagttcctgtgccccctgtgcatgagaagcagaagacccagactggagaccatcctggccctgctggtggccctgcagagactgcccgtgagactgcccgagggcgaggccctgcagtgcctgaccgagagagccatcagctggcagggcagagccagacaggccctggccagcgaggacgtgaccgccctgctgggcagactggccgagctgagacagagactgcaggccgagcccagacccgaggagccccccaactaccccgccgcccccgccagcgaccccctgagagagggcagcggcaaggacatgcccaaggtgcagggcctgctggagaacggcgacagcgtgaccagccccgagaaggtggcccccgaggagggcagcggcaagagagacctggagctgctgagcagcctgctgccccagctgaccggccccgtgctggagctgcccgaggccaccagagcccccctggaggagctgatgatggagggcgacctgctggaggtgaccctggacgagaaccacagcatctggcagctgctgcaggccggccagccccccgacctggagagaatcagaaccctgctggagctggagaaggccgagagacacggcagcagagccagaggcagagccctggagagaagaagaagaagaaaggtggacagaggcggcgagggcgacgaccccgccagagaggagctggagcccaagagagtgagaagcagcggccccgaggccgaggaggtgcaggaggaggaggagctggaggaggagaccggcggcgagggcccccccgcccccatccccaccaccggcagccccagcacccaggagaaccagaacggcctggagcccgccgagggcaccaccagcggccccagcgcccccttcagcaccctgacccccagactgcacctgccctgcccccagcagcccccccagcagcagctgtag

SEQ ID NO: 144119 - protein, 330 aa, Artificial Sequence
  derived and/or modified sequence
MPRSFLVKSKKAHTYHQPRVQEDEPLWPPALTPVPRDQAPSNSPVLSTLFPNQCLDWTNLKREPELEQDQNLARMAPAPEGPIVLSRPQDGDSPLSDSPPFYKPSFSWDTLATTYGHSYRQAPSTMQSAFLEHSVSLYGSPLVPSTEPALDFSLRYSPGMDAYHCVKCNKVFSTPHGLEVHVRRSHSGTRPFACDICGKTFGHAVSLEQHTHVHSQERSFECRMCGKAFKRSSTLSTHLLIHSDTRPYPCQFCGKRFHQKSDMKKHTYIHTGEKPHKCQVCGKAFSQSSNLITHSRKHTGFKPFSCELCTKGFQRKVDLRRHRESQHNLK

SEQ ID NO: 144120 - DNA, 1801 bp, Artificial Sequence
  derived and/or modified sequence
aaaaaggagaagtatctatttgtgcaaagagtcacacagttgacagagtggaggccagtcccgagagaggctttgcagttcccacctcgggaagctccggcagaacccaggcgagggacagctccggacaggtgtggggtgcacactgaaaatgccacgctccttcctggtgaagagcaagaaggctcacacctaccaccagccccgtgtgcaggaagatgaaccgctctggcctcctgcccttaccccggtgcccagagaccaggctccaagcaacagccctgtccttagcactctattcccaaaccagtgcctggactggaccaacctcaaacgagagccggagctggagcaggaccagaacttggccaggatggccccggcaccagagggccccattgtgctgtcccgaccccaggatggggactctccactgtccgactcacccccattctacaagcctagcttctcctgggacaccttggccacaacctatggccacagctaccggcaggccccctccaccatgcagtcagccttcctggagcactccgtcagcctgtacggcagtcctcttgtgcccagcactgagcccgccttggacttcagcctccgctactccccaggcatggatgcgtaccactgtgtgaagtgcaacaaggtcttctccacccctcacgggctcgaagtgcatgtgcgacgctcccatagtgggacccggcccttcgcctgtgacatctgcggcaaaaccttcggccacgctgtgagcctggagcagcacacgcacgtccactcccaggagcgcagcttcgagtgccgcatgtgcggcaaggccttcaagcgctcgtccacgctgtccacccacctgctcatccactcagacacgcggccctacccctgccagttctgcggcaagcgtttccaccagaagtccgacatgaagaagcacacctacatccacacaggtgagaagccgcacaagtgccaggtgtgcggaaaggccttcagccagagctccaacctcatcacccacagccgcaagcacacaggcttcaagcccttcagctgtgagctgtgcaccaaaggcttccagcgcaaggtggacctgcggcggcaccgcgagagccagcacaatctcaagtgaggctgcgccggctcccagctcctggccagcctgccctgcggtcctgtcacctggaggccagcctcacatgcccaaatctccagtctcctggaggtgggactggacaggagtctaccagcttgttttgagactcatgaaattgctgtgtgaccttgggcaagtcacttaccctgtctggatcaacatttctcctgctgccaagtgtgggagcctggctgggtctttctcagcagaagttgtttccaggtgtgctcaagtgccttcctctagcagagcacagaaagctagaatacccccagggagacagggatgccaagagtagaccagagctgggacccacagacagaacctccacctgcctgctgcccactgagctgggacctggtcaccttggattttagccggcctctttctggctataacaggcagagtcggagctgcctcccaccccagtcagaagcctggcaccccctctgcttcggccagatgtgctggctgactccgacttccgaccagcactcagctggcctctggggattctagctccacaaccaggccgtgaggctggagaaactggcagttattgctgtcaaaagcctgttctctcaactgctgtcaataaaattaaagatacagatttgctgccaaaaaaaaaaa

SEQ ID NO: 144121 - DNA, 993 bp, Artificial Sequence
  derived and/or modified sequence
atgccgcgatcctttctcgtgaagtccaaaaaggctcatacatatcatcagccacgggtccaggaggacgaacccttatggccccctgccctcactcctgtccctagggatcaggctccctcgaactcaccggttctgtctacattgtttccgaatcagtgcctcgattggactaacttgaaacgcgagccagagctagaacaagaccagaatctggctagaatggcccccgctccagagggaccaatcgtactatccaggccgcaggacggtgactctcctctgtccgattcccctccattctataagcctagtttcagctgggatacgctcgccaccacctatggccattcatataggcaggccccttctactatgcaaagcgcattcctcgaacattcagtatctctgtacggatcacccttagtgccatctacagagcctgccctcgactttagtcttcggtactcgcccggcatggacgcataccactgcgtcaagtgtaacaaagtattctctacgccccatggcctggaagtgcacgtgcgacggagtcacagtggaactagacctttcgcatgtgatatttgcggtaagacctttgggcatgccgtgtccttagagcagcacactcatgtccatagtcaagagcgaagcttcgaatgtcgtatgtgtgggaaagctttcaaacgctcatctacactctctacacacctactgatccatagtgacactcggccatacccctgtcagttctgtggcaaaaggttccaccagaagagcgacatgaagaaacacacctatattcacacaggggagaaacctcacaaatgtcaggtttgcggaaaggccttcagccagtcatccaacttaataacccacagcagaaagcacactggctttaaaccattctcctgcgagctgtgtactaagggtttccagaggaaggtcgacctcagaagacaccgggagtcgcagcataatctgaagtag

SEQ ID NO: 144122 - DNA, 993 bp, Artificial Sequence
  derived and/or modified sequence
atgccgcgaagctttttagtgaagtccaagaaggctcacacttaccaccaacctcgagtacaggaggacgagcctctgtggccacccgctcttacgcccgtgcccagggatcaggctccctcaaattcccctgtcctgagcaccctgtttcctaatcaatgcttggattggacaaatctaaagcgggagcctgagttagagcaggaccagaacctcgcgagaatggcccccgctccagaagggcccatcgtgttaagtcgcccacaggatggcgacagtcccctcagcgattcacctcccttctataaacctagcttctcatgggacacactggccacaacatacggacattcctacagacaggcaccttccaccatgcagagcgccttcctggaacacagtgtgtccctgtacggatccccattggtgccgtcgacagagcctgccctcgatttctccctgcggtactctcctggaatggacgcgtaccactgcgttaagtgcaacaaagtgttcagcacgccacacggactggaagtccacgttcggcggtctcatagcgggacccgcccatttgcttgtgatatttgcggaaagaccttcggccacgccgtgtccctcgagcaacatacgcatgtgcatagccaggagcgatcctttgagtgtcggatgtgtggcaaggcctttaaacggtcctccacgctgagcacacacttgctgattcactccgacacaaggccctacccatgtcaattttgcggcaagcgcttccaccagaagtccgacatgaaaaagcatacatatatccacaccggggagaagccacacaagtgtcaggtttgcggaaaggccttttcacaatcatcaaacttgattactcattcccgtaagcatacaggatttaaacccttttcctgtgagctttgcaccaaagggtttcagcgaaaagtagacctgaggagacatcgcgagtcccagcacaacctgaagtag

SEQ ID NO: 144123 - DNA, 993 bp, Artificial Sequence
  derived and/or modified sequence
atgccccgctcgttccttgtgaagtctaagaaagcccacacctatcatcagccgcgcgtgcaggaggatgagcccctgtggcctcccgccctgaccccagtgccacgcgaccaagccccttcgaacagtcccgtgctgtcgaccctgttccccaaccaatgtctggactggacgaacctgaagcgggagcctgagctggaacaggaccaaaatcttgctcggatggcccccgccccggaaggtccaatcgttctttccagaccccaggacggagatagtccactgtcagactcccccccattctataagccgtcttttagctgggacaccctggctacaacctatggccactcttataggcaggcaccctccaccatgcagtcagccttccttgaacattcagtctctctgtatggatcacctctcgttcccagtaccgagcccgctctagatttttctctgaggtattcacccggcatggatgcctaccattgtgtgaagtgcaacaaggtctttagcactcctcacggcctcgaggtgcacgtgcgcaggtcccactccggtacccgacctttcgcctgcgacatatgtggcaaaactttcggtcacgcagtttcactggagcagcacacccacgtgcattctcaggagcgttctttcgagtgtcgcatgtgtggtaaggcctttaagcggtcatccaccctaagcacccacctcctgatccattccgatacaagaccctatccgtgtcagttttgcggtaaacgattccatcagaagagcgacatgaagaagcacacttatatacacaccggcgaaaagccccacaagtgccaggtgtgcggaaaggcattttcccagtcaagtaacctcattacacacagtcgcaaacatacgggctttaaacccttttcctgcgagctatgtactaaaggcttccagaggaaggtggatttacgcaggcatcgggagagtcagcacaacctcaagtag

SEQ ID NO: 144124 - DNA, 2449 bp, Artificial Sequence
  derived and/or modified sequence
tgcgaggctgagtatgatgggctccatccagcacgaacacaaagccctgtgagaggaggcagagtgagatgaagtcgaactgtgggatatgaaaggcattttgaaggagtaggcatcaggctggtttttgttcgaggaaagctactcaggagcttgggaggattgcttgagaccaggagttcaagaccagcctgggctacagagcaagaccccatctttttgaaacttcctgcaactcgcatctggaaaagtgctgttatttgaaagggtgccgacattgtgaaaaacacggagtattgatctctgaagctgagatttttgtcctaaagaatactcaagatgtgtccctggctgggcacagcagctcgtgcctgtaatcccagcactttgggaggctgaggcaggaggatcgcttgaggccaggagttcaagaccagcctattgtgaatagtaccactataaatagagaaagcgtgccgctccaagtgtcgagggttagaaatgagaattcgaagtcttgtgtcctggaaagttttgataagcaaatacggctgagctcccgcgctctcttcattggctgcttgttcaccgccagattttgacacaaataatcagattgaaaatcagggaggggaacagaagaggaaaaacacacagagagacagagcaaaaaggagaagtatctatttgtgcaaagagtcacacagttgacagagtggaggccagtcccgagagaggctttgcagttcccacctcgggaagctccggcagaacccaggcgagggacagctccggacaggtgtggggtgcacactgaaaatgccacgctccttcctggtgaagagcaagaaggctcacacctaccaccagccccgtgtgcaggaagatgaaccgctctggcctcctgcccttaccccggtgcccagagaccaggctccaagcaacagccctgtccttagcactctattcccaaaccagtgcctggactggaccaacctcaaacgagagccggagctggagcaggaccagaacttggccaggatggccccggcaccagagggccccattgtgctgtcccgaccccaggatggggactctccactgtccgactcacccccattctacaagcctagcttctcctgggacaccttggccacaacctatggccacagctaccggcaggccccctccaccatgcagtcagccttcctggagcactccgtcagcctgtacggcagtcctcttgtgcccagcactgagcccgccttggacttcagcctccgctactccccaggcatggatgcgtaccactgtgtgaagtgcaacaaggtcttctccacccctcacgggctcgaagtgcatgtgcgacgctcccatagtgggacccggcccttcgcctgtgacatctgcggcaaaaccttcggccacgctgtgagcctggagcagcacacgcacgtccactcccaggagcgcagcttcgagtgccgcatgtgcggcaaggccttcaagcgctcgtccacgctgtccacccacctgctcatccactcagacacgcggccctacccctgccagttctgcggcaagcgtttccaccagaagtccgacatgaagaagcacacctacatccacacaggtgagaagccgcacaagtgccaggtgtgcggaaaggccttcagccagagctccaacctcatcacccacagccgcaagcacacaggcttcaagcccttcagctgtgagctgtgcaccaaaggcttccagcgcaaggtggacctgcggcggcaccgcgagagccagcacaatctcaagtgaggctgcgccggctcccagctcctggccagcctgccctgcggtcctgtcacctggaggccagcctcacatgcccaaatctccagtctcctggaggtgggactggacaggagtctaccagcttgttttgagactcatgaaattgctgtgtgaccttgggcaagtcacttaccctgtctggatcaacatttctcctgctgccaagtgtgggagcctggctgggtctttctcagcagaagttgtttccaggtgtgctcaagtgccttcctctagcagagcacagaaagctagaatacccccagggagacagggatgccaagagtagaccagagctgggacccacagacagaacctccacctgcctgctgcccactgagctgggacctggtcaccttggattttagccggcctctttctggctataacaggcagagtcggagctgcctcccaccccagtcagaagcctggcaccccctctgcttcggccagatgtgctggctgactccgacttccgaccagcactcagctggcctctggggattctagctccacaaccaggccgtgaggctggagaaactggcagttattgctgtcaaaagcctgttctctcaactgctgtcaataaaattaaagatacaga

SEQ ID NO: 144125 - DNA, 1653 bp, Artificial Sequence
  derived and/or modified sequence
caggtgtggggtgcacactgaaaatgccacgctccttcctggtgaagagcaagaaggctcacacctaccaccagccccgtgtgcaggaagatgaaccgctctggcctcctgcccttaccccggtgcccagagaccaggctccaagcaacagccctgtccttagcactctattcccaaaccagtgcctggactggaccaacctcaaacgagagccggagctggagcaggaccagaacttggccaggatggccccggcaccagagggccccattgtgctgtcccgaccccaggatggggactctccactgtccgactcacccccattctacaagcctagcttctcctgggacaccttggccacaacctatggccacagctaccggcaggccccctccaccatgcagtcagccttcctggagcactccgtcagcctgtacggcagtcctcttgtgcccagcactgagcccgccttggacttcagcctccgctactccccaggcatggatgcgtaccactgtgtgaagtgcaacaaggtcttctccacccctcacgggctcgaagtgcatgtgcgacgctcccatagtgggacccggcccttcgcctgtgacatctgcggcaaaaccttcggccacgctgtgagcctggagcagcacacgcacgtccactcccaggagcgcagcttcgagtgccgcatgtgcggcaaggccttcaagcgctcgtccacgctgtccacccacctgctcatccactcagacacgcggccctacccctgccagttctgcggcaagcgtttccaccagaagtccgacatgaagaagcacacctacatccacacaggtgagaagccgcacaagtgccaggtgtgcggaaaggccttcagccagagctccaacctcatcacccacagccgcaagcacacaggcttcaagcccttcagctgtgagctgtgcaccaaaggcttccagcgcaaggtggacctgcggcggcaccgcgagagccagcacaatctcaagtgaggctgcgccggctcccagctcctggccagcctgccctgcggtcctgtcacctggaggccagcctcacatgcccaaatctccagtctcctggaggtgggactggacaggagtctaccagcttgttttgagactcatgaaattgctgtgtgaccttgggcaagtcacttaccctgtctggatcaacatttctcctgctgccaagtgtgggagcctggctgggtctttctcagcagaagttgtttccaggtgtgctcaagtgccttcctctagcagagcacagaaagctagaatacccccagggagacagggatgccaagagtagaccagagctgggacccacagacagaacctccacctgcctgctgcccactgagctgggacctggtcaccttggattttagccggcctctttctggctataacaggcagagtcggagctgcctcccaccccagtcagaagcctggcaccccctctgcttcggccagatgtgctggctgactccgacttccgaccagcactcagctggcctctggggattctagctccacaaccaggccgtgaggctggagaaactggcagttattgctgtcaaaagcctgttctctcaactgctgtcaataaaattaaagatacaga

SEQ ID NO: 144126 - DNA, 1790 bp, Artificial Sequence
  derived and/or modified sequence
aaaaaggagaagtatctatttgtgcaaagagtcacacagttgacagagtggaggccagtcccgagagaggctttgcagttcccacctcgggaagctccggcagaacccaggcgagggacagctccggacaggtgtggggtgcacactgaaaatgccacgctccttcctggtgaagagcaagaaggctcacacctaccaccagccccgtgtgcaggaagatgaaccgctctggcctcctgcccttaccccggtgcccagagaccaggctccaagcaacagccctgtccttagcactctattcccaaaccagtgcctggactggaccaacctcaaacgagagccggagctggagcaggaccagaacttggccaggatggccccggcaccagagggccccattgtgctgtcccgaccccaggatggggactctccactgtccgactcacccccattctacaagcctagcttctcctgggacaccttggccacaacctatggccacagctaccggcaggccccctccaccatgcagtcagccttcctggagcactccgtcagcctgtacggcagtcctcttgtgcccagcactgagcccgccttggacttcagcctccgctactccccaggcatggatgcgtaccactgtgtgaagtgcaacaaggtcttctccacccctcacgggctcgaagtgcatgtgcgacgctcccatagtgggacccggcccttcgcctgtgacatctgcggcaaaaccttcggccacgctgtgagcctggagcagcacacgcacgtccactcccaggagcgcagcttcgagtgccgcatgtgcggcaaggccttcaagcgctcgtccacgctgtccacccacctgctcatccactcagacacgcggccctacccctgccagttctgcggcaagcgtttccaccagaagtccgacatgaagaagcacacctacatccacacaggtgagaagccgcacaagtgccaggtgtgcggaaaggccttcagccagagctccaacctcatcacccacagccgcaagcacacaggcttcaagcccttcagctgtgagctgtgcaccaaaggcttccagcgcaaggtggacctgcggcggcaccgcgagagccagcacaatctcaagtgaggctgcgccggctcccagctcctggccagcctgccctgcggtcctgtcacctggaggccagcctcacatgcccaaatctccagtctcctggaggtgggactggacaggagtctaccagcttgttttgagactcatgaaattgctgtgtgaccttgggcaagtcacttaccctgtctggatcaacatttctcctgctgccaagtgtgggagcctggctgggtctttctcagcagaagttgtttccaggtgtgctcaagtgccttcctctagcagagcacagaaagctagaatacccccagggagacagggatgccaagagtagaccagagctgggacccacagacagaacctccacctgcctgctgcccactgagctgggacctggtcaccttggattttagccggcctctttctggctataacaggcagagtcggagctgcctcccaccccagtcagaagcctggcaccccctctgcttcggccagatgtgctggctgactccgacttccgaccagcactcagctggcctctggggattctagctccacaaccaggccgtgaggctggagaaactggcagttattgctgtcaaaagcctgttctctcaactgctgtcaataaaattaaagatacagatttgctgcc

SEQ ID NO: 144127 - DNA, 993 bp, Artificial Sequence
  derived and/or modified sequence
atgcccaggagcttcctggtgaagagcaagaaggcccacacctaccaccagccccgggtgcaggaggatgagcccctgtggcccccagccctgacccctgtgccccgggaccaggcccccagcaacagccctgtgctgagcaccctcttccccaaccagtgcctggactggaccaacctgaagcgggagcctgagctggagcaggaccagaacctggccaggatggccccagcccctgagggccccatcgtgctgagccggccccaggatggagacagccccctgagtgacagcccccccttctacaagcccagcttctcctgggacaccctggccaccacctacggccacagctaccggcaggcccccagcaccatgcagagcgccttcctggagcacagcgtgtccctgtatggcagccccctggtgcccagcacagagcccgccctggacttcagcctgcgctacagccctggcatggatgcctaccactgtgtgaagtgcaacaaggtgttcagcaccccccacggcctggaggtgcacgtgagaagaagccacagcggcacccggccctttgcctgtgacatctgtgggaagacctttggacatgctgtgtccctggagcagcacacccacgtgcacagccaggagaggagctttgaatgtaggatgtgtgggaaggccttcaagaggagcagcaccctgagcacccacctgctgatccacagcgacacccggccctacccctgccagttctgtgggaagcgcttccaccagaagagtgacatgaagaagcacacctacatccacactggagagaagccccacaagtgccaggtgtgtgggaaggccttcagccagagcagcaacctgatcacccacagcaggaagcacacaggcttcaagcccttcagctgtgagctgtgcaccaagggcttccagaggaaggtggacctgcggcggcaccgggagagccagcacaacctgaagtag

SEQ ID NO: 144128 - DNA, 993 bp, Artificial Sequence
  derived and/or modified sequence
atgccccggagcttcctggtgaagagcaagaaggcccacacctaccaccagccacgcgtgcaagaagatgagcccctctggcctcctgcccttacacccgtcccgcgcgaccaggctcctagtaattctccagtcctgtccacactgttcccaaatcagtgccttgattggacgaacttgaagcgggagcctgaacttgagcaggatcaaaacttggctcggatggccccagcacccgaggggcccattgtactaagtcgccctcaggacggggactcccctctgtctgattctccccccttttataagccctcattcagctgggacacactggccactacctacgggcattcttatcggcaggccccatccacaatgcagtcggccttcctcgaacactcagtatctttatatggtagtccacttgttcctagcacagagccagcactggattttagcctgcgatatagtcccggcatggatgcctatcattgtgtgaagtgcaataaggttttctcaacaccccacggcttggaggttcacgttcgaagaagccactccggcactcggccctttgcctgtgatatctgcggcaaaacgttcggacatgctgtgagtctggagcagcacacacatgttcacagtcaagaacgaagctttgagtgccggatgtgcggcaaggcattcaaacgctcctctacactgagtacacacttgcttattcatagcgacacaaggccgtatccatgccagttctgtggtaaacggttccatcagaaaagcgatatgaagaagcatacctatatacacactggggagaagccccacaaatgtcaagtgtgcgggaaagcttttagtcagtcctctaacttgatcactcattctcggaaacacaccggattcaaaccctttagctgtgagctctgcacaaagggtttccagcggaaggtggatctccggcgccatagagagtcacaacataatttaaaatag

SEQ ID NO: 144129 - DNA, 993 bp, Artificial Sequence
  derived and/or modified sequence
atgccccggagcttcctggtgaagagcaagaaggcccacacctaccatcaaccacgggtccaggaggacgaaccgctatggccccctgccctcactcccgtgccgagggaccaggccccttcaaattctccagtcctcagcacacttttcccaaaccaatgtctggactggacaaatctcaagagagaacccgaactggaacaggatcagaacctggcacgaatggctcccgcaccagaggggccaattgtgctctcccggccccaagatggggatagccccctatctgacagtcctccgttctacaaaccttcattcagctgggatactctggccacaacatacggacattcctacaggcaggcgccctccactatgcaatcagcgttccttgagcacagcgtaagtctctacggcagcccgcttgtaccttccactgagcccgccttggatttctccctcaggtatagcccaggcatggatgcttatcactgtgtcaaatgtaacaaggtcttctccaccccgcacggtctcgaggtgcacgttcgaagatcccacagcgggaccagaccttttgcttgcgatatttgcggtaagaccttcgggcatgcagtgagcctggaacagcacactcacgttcattctcaagaacgctcattcgaatgtaggatgtgcggcaaagcgttcaaaagaagctcaactctgagtacacatctgctcattcatagcgacactcgcccttatccctgccagttctgcggtaagcggtttcaccagaagtctgacatgaaaaagcatacctacatccatacaggagagaagccccacaagtgccaggtgtgcggcaaggcttttagccagagttcaaacctcatcactcattccagaaagcatacaggcttcaagccgttttcatgtgaactttgtacgaagggatttcagaggaaggtggacctgcgacgccaccgcgagagtcagcataacctgaaatag

SEQ ID NO: 144130 - DNA, 993 bp, Artificial Sequence
  derived and/or modified sequence
atgccccggagcttcctggtgaagagcaagaaggcccacacctaccatcagccacgggtccaggaggatgagccgctgtggcctcctgcgttaacccccgtgccacgggaccaggcgcccagcaactcacctgtgctctccaccttgttcccgaaccagtgtcttgattggaccaatctgaagagagagcctgaactggagcaggaccagaatttagccagaatggccccagctcctgagggccctatcgtgttatcgcgcccccaggatggggattcccctctgtctgactccccccccttctacaagccttcattttcctgggacacccttgcaaccacgtatggccactcctatcggcaggctcctagtacaatgcagtccgctttccttgagcactcagtgtcactttacggttctccccttgtaccaagcaccgagcccgctcttgacttcagtctgcgctattctccagggatggacgcgtaccattgcgtgaagtgtaacaaagtgttctcgacgccacatggactggaagttcacgtacgcagatcccatagcggcacgaggccatttgcatgtgacatttgtggaaagacttttgggcatgctgtgtctttagagcagcatactcatgtccacagtcaggaacgctccttcgagtgtaggatgtgtggtaaggcatttaagaggagtagtacacttagtacccacctgctgattcatagtgatacgcggccctacccctgccagttctgcgggaaacgcttccatcagaagagtgatatgaaaaagcatacttacattcacaccggggaaaaaccccacaagtgccaggtgtgcgggaaggccttcagccagagctctaatcttatcacgcatagccgcaagcataccgggttcaagccttttagttgcgaactctgtactaaaggattccaaagaaaggtggatctgagaaggcatagggaaagccagcacaacctcaagtag

SEQ ID NO: 144131 - DNA, 993 bp, Artificial Sequence
  derived and/or modified sequence
atgccaagaagcttcctcgtgaaaagcaaaaaggcgcatacatatcatcagccacgggtccaggaggatgagccattatggcctcctgcactcacacctgtcccgagagaccaagcccctagtaatagccctgtgctttcaacactctttcctaatcagtgcctggattggaccaacctcaagcgggagcccgagttggaacaagaccagaatcttgcccgaatggctcctgcccctgagggacccatcgtcctgtcaaggccacaggatggcgattctccccttagtgattcaccacccttttataaaccttcattttcttgggataccctggcaacgacatacggtcactcatatagacaggcaccttccacaatgcagtctgcttttctggagcactcggtgagcctctacggctctccgttggtgccttctacagagccagcactcgacttttcattgcgctactcccctggcatggacgcctatcattgtgtaaagtgtaacaaggtcttttccaccccacatggactcgaggtccacgtgagaaggtcgcattccggtactcgtcccttcgcatgtgatatttgcgggaagacgtttggacacgcggtaagtctcgaacaacacacgcacgtgcattctcaagaacgttctttcgagtgtaggatgtgtggcaaggccttcaagagaagcagtacactctctactcacctcctcattcatagcgacaccaggccatatccatgccagttctgcggcaaacgctttcaccagaagtcagatatgaaaaaacacacatacatacacacgggcgaaaaaccccacaagtgccaagtgtgtggaaaagcatttagccagagtagcaacctgattacacactccaggaagcacactggatttaaaccatttagctgcgagctctgtaccaaaggctttcaaagaaaggtggacctgcgtagacatagagaatcacagcataacctgaagtag

SEQ ID NO: 144132 - DNA, 993 bp, Artificial Sequence
  derived and/or modified sequence
atgccaaggagcttcctggtgaagtcaaagaaagctcacacgtaccatcagccccgagtgcaggaagacgagccgctttggcctcccgcattaacacccgtgccacgagaccaggcccctagtaattctccagtgctgtccactctattcccaaaccagtgcctcgattggacaaatctgaagagggagcccgaactggaacaggatcagaatctggccaggatggccccagcccctgaaggaccaatcgtgctgtctcggccacaggacggtgatagccccctgtcagattcccccccattctacaaaccatcgtttagctgggatacgttagctacaacttatgggcattcctatcgccaggcaccctccactatgcaatccgcatttctagagcatagtgttagtctgtacgggtccccgcttgtgccctcaacagaaccagcactcgattttagtctgagatattcccccggtatggatgcttaccactgtgtgaaatgcaacaaagtgttctccaccccacacgggctggaggtccacgtgcgaaggtcccatagcggaaccagacccttcgcgtgcgacatatgtggcaaaacctttggtcatgccgtctcacttgaacaacacacacatgtgcatagtcaggagagatcattcgaatgccgtatgtgtggcaaagcctttaaaagaagtagtacgttgtcaacacaccttctgatccactccgacacgaggccatacccatgtcagttctgcggcaaacgattccaccagaagtccgatatgaagaaacatacatatatccataccggtgagaagccgcacaaatgccaagtgtgcgggaaggcgttttcccagtcctctaatttgattacacactcccgtaagcacactggttttaagcccttctcctgcgaactgtgtacaaagggatttcagcggaaggttgatctgagacggcaccgcgaatcccagcacaacttgaaatag

SEQ ID NO: 144133 - DNA, 993 bp, Artificial Sequence
  derived and/or modified sequence
atgccacggagttttctcgtcaagtccaaaaaggcccacacttaccaccagcccagggtacaggaggacgaaccactgtggccccctgccttgacaccagtgccacgggatcaagcaccatcgaacagtcccgttttgtctacactttttcccaaccaatgcctggactggaccaacctaaaacgcgagcccgagctggagcaggaccagaaccttgccagaatggcgcctgctcctgagggacccatcgtcctgagcaggccccaggacggtgatagcccactcagcgactctccccctttctacaagccttctttttcttgggacacattggccacgacgtatggccactcctataggcaggcaccgagcaccatgcagtccgcttttctggaacattctgtgtcactgtacggatccccattggtgccgtcaacagaacctgctctcgatttctcgttgcggtactccccaggcatggatgcctaccattgtgtgaagtgcaataaagtgtttagcacaccccacggtctggaagttcacgtgagacgctctcactctggaacaaggccctttgcctgcgatatctgtggcaaaacctttggacatgccgtaagtctcgagcagcacacacacgtgcattcacaggagcggtctttcgagtgcaggatgtgcggtaaagccttcaaaagatcttcaactctcagtacccaccttctcatccacagtgataccaggccttatccctgtcagttctgcgggaagaggtttcatcagaagtcggacatgaagaagcatacttatatccacaccggtgaaaagcctcacaaatgtcaggtttgcggaaaggccttctcacagtcctctaacttgatcacacatagccggaaacataccggattcaaacccttctcctgtgagttgtgtacgaaagggtttcaaaggaaggtggatctgcgcaggcatcgagagagtcagcacaatcttaagtag

SEQ ID NO: 144134 - DNA, 993 bp, Artificial Sequence
  derived and/or modified sequence
atgcccagaagcttcctggtgaagagcaagaaggcccacacctaccaccagcccagagtgcaggaggacgagcccctgtggccccccgccctgacccccgtgcccagagaccaggcccccagcaacagccccgtgctgagcaccctgttccccaaccagtgcctggactggaccaacctgaagagagagcccgagctggagcaggaccagaacctggccagaatggcccccgcccccgagggccccatcgtgctgagcagaccccaggacggcgacagccccctgagcgacagcccccccttctacaagcccagcttcagctgggacaccctggccaccacctacggccacagctacagacaggcccccagcaccatgcagagcgccttcctggagcacagcgtgagcctgtacggcagccccctggtgcccagcaccgagcccgccctggacttcagcctgagatacagccccggcatggacgcctaccactgcgtgaagtgcaacaaggtgttcagcaccccccacggcctggaggtgcacgtgagaagaagccacagcggcaccagacccttcgcctgcgacatctgcggcaagaccttcggccacgccgtgagcctggagcagcacacccacgtgcacagccaggagagaagcttcgagtgcagaatgtgcggcaaggccttcaagagaagcagcaccctgagcacccacctgctgatccacagcgacaccagaccctacccctgccagttctgcggcaagagattccaccagaagagcgacatgaagaagcacacctacatccacaccggcgagaagccccacaagtgccaggtgtgcggcaaggccttcagccagagcagcaacctgatcacccacagcagaaagcacaccggcttcaagcccttcagctgcgagctgtgcaccaagggcttccagagaaaggtggacctgagaagacacagagagagccagcacaacctgaagtag

SEQ ID NO: 144135 - protein, 240 aa, Artificial Sequence
  derived and/or modified sequence
MSKPSDHIKRPMNAFMVWSRGQRRKMAQENPKMHNSEISKRLGAEWKLLSEAEKRPYIDEAKRLRAQHMKEHPDYKYRPRRKPKNLLKKDRYVFPLPYLGDTDPLKAAGLPVGASDGLLSAPEKARAFLPPASAPYSLLDPAQFSSSAIQKMGEVPHTLATGALPYASTLGYQNGAFGSLSCPSQHTHTHPSPTNPGYVVPCNCTAWSASTLQPPVAYILFPGMTKTGIDPYSSAHATAM

SEQ ID NO: 144136 - DNA, 723 bp, Artificial Sequence
  derived and/or modified sequence
atgagcaagcccagcgaccacatcaagagacccatgaacgccttcatggtgtggagcagaggccagagaagaaagatggcccaggagaaccccaagatgcacaacagcgagatcagcaagagactgggcgccgagtggaagctgctgagcgaggccgagaagagaccctacatcgacgaggccaagagactgagagcccagcacatgaaggagcaccccgactacaagtacagacccagaagaaagcccaagaacctgctgaagaaggacagatacgtgttccccctgccctacctgggcgacaccgaccccctgaaggccgccggcctgcccgtgggcgccagcgacggcctgctgagcgcccccgagaaggccagagccttcctgccccccgccagcgccccctacagcctgctggaccccgcccagttcagcagcagcgccatccagaagatgggcgaggtgccccacaccctggccaccggcgccctgccctacgccagcaccctgggctaccagaacggcgccttcggcagcctgagctgccccagccagcacacccacacccaccccagccccaccaaccccggctacgtggtgccctgcaactgcaccgcctggagcgccagcaccctgcagccccccgtggcctacatcctgttccccggcatgaccaagaccggcatcgacccctacagcagcgcccacgccaccgccatgtag

SEQ ID NO: 144137 - DNA, 723 bp, Artificial Sequence
  derived and/or modified sequence
atgtcaaaacctagtgaccacatcaaaaggccaatgaacgcttttatggtatggtccagaggccagaggagaaagatggcccaagaaaaccctaaaatgcacaattcagagatttccaaacgtctgggagcagaatggaaactactgtcagaagctgaaaagagaccatacatcgacgaagcgaagagacttagggcccagcatatgaaagaacatcctgattacaaatatcggccccgtaggaaaccaaagaatctgctgaagaaggacaggtacgtgttccccctgccctacttgggagacacagatccactgaaagcagctgggctgccggttggcgccagcgacggactgttatccgccccggaaaaagcccgcgcgttcctcccccccgcttccgccccgtattctttactcgaccctgctcagttttctagcagcgctatacaaaaaatgggagaggtgcctcacacactagccacaggcgcactgccctatgctagcaccctcgggtatcagaacggtgcttttggttccctttcctgtcctagtcaacacacccacacgcacccatctccaaccaaccctggttacgtggtaccatgtaactgtactgcttggtcagcaagcaccctgcaaccacccgtagcttatatcctgtttcctggcatgactaagacaggcattgacccatacagctctgcacacgccacggcaatgtag

SEQ ID NO: 144138 - DNA, 723 bp, Artificial Sequence
  derived and/or modified sequence
atgagcaagcccagcgaccacatcaagaggcccatgaatgccttcatggtgtggagccggggccagaggaggaagatggcccaggagaaccccaagatgcacaacagcgagatcagcaagaggctgggcgctgagtggaagctgctgtctgaggccgagaagaggccctacattgatgaggccaagaggctgcgggcccagcacatgaaggagcacccagactacaagtaccggcccaggaggaagcccaagaacctgctgaagaaggaccgctacgtgttccccctgccctacctgggggacacagaccccctgaaggccgccggcctgcctgtgggcgccagtgatggcctgctgagcgcccctgagaaggcccgggccttcctgcccccagccagcgccccctacagcctgctggaccctgcccagttcagcagcagcgccatccagaagatgggagaggtgccccacaccctggccactggagccctgccctatgccagcaccctgggctaccagaatggagccttcggcagcctgagctgccccagccagcacacccacacccaccccagccccaccaaccctggctacgtggtgccctgcaactgcacagcctggagcgccagcaccctgcagccccctgtggcctacatcctcttccctggcatgaccaagacaggaattgacccctacagcagcgcccacgccacagccatgtag

SEQ ID NO: 144139 - DNA, 723 bp, Artificial Sequence
  derived and/or modified sequence
atgagcaagcccagcgaccacatcaagcggcccatgaacgccttcatggtatggtcacgcggccagcggcgtaaaatggctcaggaaaatcctaaaatgcataactccgaaatcagtaagagattaggtgcggaatggaagctgttgtcagaggccgagaagcgtccctatattgatgaggccaaaagacttagagcccagcatatgaaagagcaccccgattacaagtacagaccccgaagaaaaccaaaaaatctgctgaagaaagatagatacgtttttccactaccttatctcggggacaccgaccctttgaaggccgccggacttcctgtcggtgcttctgacggactacttagcgcaccagagaaggcgcgcgcattcctgccgcctgcctcagcaccctactccctgcttgatcccgcacagttcagctcatccgccatacaaaagatgggagaggtaccccacacactggccaccggcgccctcccctatgcctctactttaggatatcagaacggcgcctttggtagtttgtcatgtccgtctcagcacacgcatactcatccttctccaacaaacccaggttacgtcgtcccatgtaattgtacggcgtggtccgcaagcacgttgcagcctccggtggcttatatactcttccctgggatgacaaaaacaggcattgatccctactcaagcgcccatgctacagccatgtag

SEQ ID NO: 144140 - DNA, 723 bp, Artificial Sequence
  derived and/or modified sequence
atgagcaagcctagcgatcacataaagcggccaatgaatgcatttatggtatggtcccgcggtcaacgaagaaagatggcccaggagaaccctaagatgcacaattctgaaatcagtaagaggcttggggctgaatggaagctgcttagcgaggcagagaagcggccatacattgacgaggcaaagaggctccgagctcagcacatgaaggaacacccagattataagtaccgccctcgcaggaagccaaagaacctgctgaaaaaggaccgctacgtgtttcccctgccttacctcggcgataccgatccactgaaggctgctgggctgcccgtgggcgcaagtgatggtctcctgagtgcaccagagaaggctcgtgccttcctgcccccagctagcgctccatactccctcctggatcctgctcagtttagctcctccgccatacagaaaatgggcgaagtgccccacacactcgccaccggcgctctgccttatgcatctaccctggggtaccagaatggagcatttggttccctgtcctgcccatctcagcacacccatacacacccatcacctacaaacccgggttacgtggtcccatgtaactgcactgcttggtctgcgagtacactgcagccccctgtcgcgtatatcctgttccctggaatgacgaagaccggaatcgacccttatagctctgcccacgccaccgccatgtag

SEQ ID NO: 144141 - DNA, 818 bp, Artificial Sequence
  derived and/or modified sequence
tgcagaacccttgcactccctacccccacccacctagccgccgggaccatgtccaaaccttcagaccacatcaagcggcccatgaacgccttcatggtatggtcccggggccagcggcgcaagatggcccaggaaaaccccaagatgcacaactcggagatcagcaaacgcctaggtgccgaatggaagcttctgtccgaggcagagaagcggccatacatcgatgaagccaagcggctacgcgcccagcacatgaaggagcaccctgactacaagtaccgacctcggcgcaagcccaagaacctgctcaagaaggacaggtatgtcttccccttgccctacctgggcgacacggacccgctcaaggcggctggcctgcccgtgggggcctccgacggcctcctgagcgcgcccgagaaagcccgggccttcttgccgccggcctcggcgccctactccctgctggaccccgcgcagtttagctcgagcgccatccagaagatgggcgaagtgccccacaccttggctaccggcgctctgccctacgcgtccaccctgggctaccagaacggcgccttcggcagcctcagctgccccagccagcacacgcacacgcacccgtcccccaccaaccctggctacgtggtgccctgtaactgtaccgcctggtctgcctccaccctgcagccccccgtcgcctacatcctcttcccaggcatgaccaagactggcatagacccttattcgtcagcccacgctacggccatgtaacccccagcccggcccggacctgaggcgtggtctgaaagccgggtctg

SEQ ID NO: 144142 - protein, 621 aa, Artificial Sequence
  derived and/or modified sequence
MVLCPVIGKLLHKRVVLASASPRRQEILSNAGLRFEVVPSKFKEKLDKASFATPYGYAMETAKQKALEVANRLYQKDLRAPDVVIGADTIVTVGGLILEKPVDKQDAYRMLSRLSGREHSVFTGVAIVHCSSKDHQLDTRVSEFYEETKVKFSELSEELLWEYVHSGEPMDKAGGYGIQALGGMLVESVHGDFLNVVGFPLNHFCKQLVKLYYPPRPEDLRRSVKHDSIPAADTFEDLSDVEGGGSEPTQRDAGSRDEKAEAGEAGQATAEAECHRTRETLPPFPTRLLELIEGFMLSKGLLTACKLKVFDLLKDEAPQKAADIASKVDASACGMERLLDICAAMGLLEKTEQGYSNTETANVYLASDGEYSLHGFIMHNNDLTWNLFTYLEFAIREGTNQHHRALGKKAEDLFQDAYYQSPETRLRFMRAMHGMTKLTACQVATAFNLSRFSSACDVGGCTGALARELAREYPRMQVTVFDLPDIIELAAHFQPPGPQAVQIHFAAGDFFRDPLPSAELYVLCRILHDWPDDKVHKLLSRVAESCKPGAGLLLVETLLDEEKRVAQRALMQSLNMLVQTEGKERSLGEYQCLLELHGFHQVQVVHLGGVLDAILATKVAP

SEQ ID NO: 144143 - protein, 545 aa, Artificial Sequence
  derived and/or modified sequence
MGTPWRPPSRRPWRWPTGCTRKTCGPPTWSLERTRSWLSGREHSVFTGVAIVHCSSKDHQLDTRVSEFYEETKVKFSELSEELLWEYVHSGEPMDKAGGYGIQALGGMLVESVHGDFLNVVGFPLNHFCKQLVKLYYPPRPEDLRRSVKHDSIPAADTFEDLSDVEGGGSEPTQRDAGSRDEKAEAGEAGQATAEAECHRTRETLPPFPTRLLELIEGFMLSKGLLTACKLKVFDLLKDEAPQKAADIASKVDASACGMERLLDICAAMGLLEKTEQGYSNTETANVYLASDGEYSLHGFIMHNNDLTWNLFTYLEFAIREGTNQHHRALGKKAEDLFQDAYYQSPETRLRFMRAMHGMTKLTACQVATAFNLSRFSSACDVGGCTGALARELAREYPRMQVTVFDLPDIIELAAHFQPPGPQAVQIHFAAGDFFRDPLPSAELYVLCRILHDWPDDKVHKLLSRVAESCKPGAGLLLVETLLDEEKRVAQRALMQSLNMLVQTEGKERSLGEYQCLLELHGFHQVQVVHLGGVLDAILATKVAP

SEQ ID NO: 144144 - protein, 563 aa, Artificial Sequence
  derived and/or modified sequence
METAKQKALEVANRLYQKDLRAPDVVIGADTIVTVGGLILEKPVDKQDAYRMLSRLSGREHSVFTGVAIVHCSSKDHQLDTRVSEFYEETKVKFSELSEELLWEYVHSGEPMDKAGGYGIQALGGMLVESVHGDFLNVVGFPLNHFCKQLVKLYYPPRPEDLRRSVKHDSIPAADTFEDLSDVEGGGSEPTQRDAGSRDEKAEAGEAGQATAEAECHRTRETLPPFPTRLLELIEGFMLSKGLLTACKLKVFDLLKDEAPQKAADIASKVDASACGMERLLDICAAMGLLEKTEQGYSNTETANVYLASDGEYSLHGFIMHNNDLTWNLFTYLEFAIREGTNQHHRALGKKAEDLFQDAYYQSPETRLRFMRAMHGMTKLTACQVATAFNLSRFSSACDVGGCTGALARELAREYPRMQVTVFDLPDIIELAAHFQPPGPQAVQIHFAAGDFFRDPLPSAELYVLCRILHDWPDDKVHKLLSRVAESCKPGAGLLLVETLLDEEKRVAQRALMQSLNMLVQTEGKERSLGEYQCLLELHGFHQVQVVHLGGVLDAILATKVAP

SEQ ID NO: 144145 - DNA, 1866 bp, Artificial Sequence
  derived and/or modified sequence
atggtgctgtgccccgtgatcggcaagctgctgcacaagagagtggtgctggccagcgccagccccagaagacaggagatcctgagcaacgccggcctgagattcgaggtggtgcccagcaagttcaaggagaagctggacaaggccagcttcgccaccccctacggctacgccatggagaccgccaagcagaaggccctggaggtggccaacagactgtaccagaaggacctgagagcccccgacgtggtgatcggcgccgacaccatcgtgaccgtgggcggcctgatcctggagaagcccgtggacaagcaggacgcctacagaatgctgagcagactgagcggcagagagcacagcgtgttcaccggcgtggccatcgtgcactgcagcagcaaggaccaccagctggacaccagagtgagcgagttctacgaggagaccaaggtgaagttcagcgagctgagcgaggagctgctgtgggagtacgtgcacagcggcgagcccatggacaaggccggcggctacggcatccaggccctgggcggcatgctggtggagagcgtgcacggcgacttcctgaacgtggtgggcttccccctgaaccacttctgcaagcagctggtgaagctgtactacccccccagacccgaggacctgagaagaagcgtgaagcacgacagcatccccgccgccgacaccttcgaggacctgagcgacgtggagggcggcggcagcgagcccacccagagagacgccggcagcagagacgagaaggccgaggccggcgaggccggccaggccaccgccgaggccgagtgccacagaaccagagagaccctgccccccttccccaccagactgctggagctgatcgagggcttcatgctgagcaagggcctgctgaccgcctgcaagctgaaggtgttcgacctgctgaaggacgaggccccccagaaggccgccgacatcgccagcaaggtggacgccagcgcctgcggcatggagagactgctggacatctgcgccgccatgggcctgctggagaagaccgagcagggctacagcaacaccgagaccgccaacgtgtacctggccagcgacggcgagtacagcctgcacggcttcatcatgcacaacaacgacctgacctggaacctgttcacctacctggagttcgccatcagagagggcaccaaccagcaccacagagccctgggcaagaaggccgaggacctgttccaggacgcctactaccagagccccgagaccagactgagattcatgagagccatgcacggcatgaccaagctgaccgcctgccaggtggccaccgccttcaacctgagcagattcagcagcgcctgcgacgtgggcggctgcaccggcgccctggccagagagctggccagagagtaccccagaatgcaggtgaccgtgttcgacctgcccgacatcatcgagctggccgcccacttccagccccccggcccccaggccgtgcagatccacttcgccgccggcgacttcttcagagaccccctgcccagcgccgagctgtacgtgctgtgcagaatcctgcacgactggcccgacgacaaggtgcacaagctgctgagcagagtggccgagagctgcaagcccggcgccggcctgctgctggtggagaccctgctggacgaggagaagagagtggcccagagagccctgatgcagagcctgaacatgctggtgcagaccgagggcaaggagagaagcctgggcgagtaccagtgcctgctggagctgcacggcttccaccaggtgcaggtggtgcacctgggcggcgtgctggacgccatcctggccaccaaggtggccccctag

SEQ ID NO: 144146 - DNA, 1638 bp, Artificial Sequence
  derived and/or modified sequence
atgggcaccccctggagaccccccagcagaagaccctggagatggcccaccggctgcaccagaaagacctgcggcccccccacctggagcctggagagaaccagaagctggctgagcggcagagagcacagcgtgttcaccggcgtggccatcgtgcactgcagcagcaaggaccaccagctggacaccagagtgagcgagttctacgaggagaccaaggtgaagttcagcgagctgagcgaggagctgctgtgggagtacgtgcacagcggcgagcccatggacaaggccggcggctacggcatccaggccctgggcggcatgctggtggagagcgtgcacggcgacttcctgaacgtggtgggcttccccctgaaccacttctgcaagcagctggtgaagctgtactacccccccagacccgaggacctgagaagaagcgtgaagcacgacagcatccccgccgccgacaccttcgaggacctgagcgacgtggagggcggcggcagcgagcccacccagagagacgccggcagcagagacgagaaggccgaggccggcgaggccggccaggccaccgccgaggccgagtgccacagaaccagagagaccctgccccccttccccaccagactgctggagctgatcgagggcttcatgctgagcaagggcctgctgaccgcctgcaagctgaaggtgttcgacctgctgaaggacgaggccccccagaaggccgccgacatcgccagcaaggtggacgccagcgcctgcggcatggagagactgctggacatctgcgccgccatgggcctgctggagaagaccgagcagggctacagcaacaccgagaccgccaacgtgtacctggccagcgacggcgagtacagcctgcacggcttcatcatgcacaacaacgacctgacctggaacctgttcacctacctggagttcgccatcagagagggcaccaaccagcaccacagagccctgggcaagaaggccgaggacctgttccaggacgcctactaccagagccccgagaccagactgagattcatgagagccatgcacggcatgaccaagctgaccgcctgccaggtggccaccgccttcaacctgagcagattcagcagcgcctgcgacgtgggcggctgcaccggcgccctggccagagagctggccagagagtaccccagaatgcaggtgaccgtgttcgacctgcccgacatcatcgagctggccgcccacttccagccccccggcccccaggccgtgcagatccacttcgccgccggcgacttcttcagagaccccctgcccagcgccgagctgtacgtgctgtgcagaatcctgcacgactggcccgacgacaaggtgcacaagctgctgagcagagtggccgagagctgcaagcccggcgccggcctgctgctggtggagaccctgctggacgaggagaagagagtggcccagagagccctgatgcagagcctgaacatgctggtgcagaccgagggcaaggagagaagcctgggcgagtaccagtgcctgctggagctgcacggcttccaccaggtgcaggtggtgcacctgggcggcgtgctggacgccatcctggccaccaaggtggccccctag

SEQ ID NO: 144147 - DNA, 1692 bp, Artificial Sequence
  derived and/or modified sequence
atggagaccgccaagcagaaggccctggaggtggccaacagactgtaccagaaggacctgagagcccccgacgtggtgatcggcgccgacaccatcgtgaccgtgggcggcctgatcctggagaagcccgtggacaagcaggacgcctacagaatgctgagcagactgagcggcagagagcacagcgtgttcaccggcgtggccatcgtgcactgcagcagcaaggaccaccagctggacaccagagtgagcgagttctacgaggagaccaaggtgaagttcagcgagctgagcgaggagctgctgtgggagtacgtgcacagcggcgagcccatggacaaggccggcggctacggcatccaggccctgggcggcatgctggtggagagcgtgcacggcgacttcctgaacgtggtgggcttccccctgaaccacttctgcaagcagctggtgaagctgtactacccccccagacccgaggacctgagaagaagcgtgaagcacgacagcatccccgccgccgacaccttcgaggacctgagcgacgtggagggcggcggcagcgagcccacccagagagacgccggcagcagagacgagaaggccgaggccggcgaggccggccaggccaccgccgaggccgagtgccacagaaccagagagaccctgccccccttccccaccagactgctggagctgatcgagggcttcatgctgagcaagggcctgctgaccgcctgcaagctgaaggtgttcgacctgctgaaggacgaggccccccagaaggccgccgacatcgccagcaaggtggacgccagcgcctgcggcatggagagactgctggacatctgcgccgccatgggcctgctggagaagaccgagcagggctacagcaacaccgagaccgccaacgtgtacctggccagcgacggcgagtacagcctgcacggcttcatcatgcacaacaacgacctgacctggaacctgttcacctacctggagttcgccatcagagagggcaccaaccagcaccacagagccctgggcaagaaggccgaggacctgttccaggacgcctactaccagagccccgagaccagactgagattcatgagagccatgcacggcatgaccaagctgaccgcctgccaggtggccaccgccttcaacctgagcagattcagcagcgcctgcgacgtgggcggctgcaccggcgccctggccagagagctggccagagagtaccccagaatgcaggtgaccgtgttcgacctgcccgacatcatcgagctggccgcccacttccagccccccggcccccaggccgtgcagatccacttcgccgccggcgacttcttcagagaccccctgcccagcgccgagctgtacgtgctgtgcagaatcctgcacgactggcccgacgacaaggtgcacaagctgctgagcagagtggccgagagctgcaagcccggcgccggcctgctgctggtggagaccctgctggacgaggagaagagagtggcccagagagccctgatgcagagcctgaacatgctggtgcagaccgagggcaaggagagaagcctgggcgagtaccagtgcctgctggagctgcacggcttccaccaggtgcaggtggtgcacctgggcggcgtgctggacgccatcctggccaccaaggtggccccctag

SEQ ID NO: 144148 - DNA, 1866 bp, Artificial Sequence
  derived and/or modified sequence
atggtactgtgccccgttatcggaaagctgctgcacaaacgggtggtcctcgccagcgcatccccgagaaggcaggagatcctttccaatgcaggactgaggtttgaggtggtcccctcgaagtttaaagaaaaactcgacaaggcgagctttgccaccccctatgggtatgctatggaaaccgcgaagcaaaaggctttggaggtggccaataggctataccagaaggacctgcgcgcacccgacgttgtgatcggagccgacacaattgtaacggtcggagggctcatcctagagaagccagtggacaagcaggatgcatataggatgctctcaaggttatcaggacgtgagcactcagtgtttaccggggtcgccattgtccattgctccagcaaggaccaccagcttgataccagggtttctgagttctatgaagaaacaaaggttaaattctctgaacttagtgaggagctcctgtgggagtacgtacattccggcgaacctatggacaaagccggagggtacggcattcaggcactgggtggcatgcttgtcgaatcagtgcacggggacttcctgaacgtggtgggtttcccattaaatcacttctgcaagcaattagtgaaattgtattacccaccaagaccggaggatttacggagatccgtaaagcacgactccatacctgccgcggatacttttgaagacctttcagacgtggaaggcggcggctcggaacctacacaacgcgatgcaggcagtcgggacgagaaggcagaagctggggaggccgggcaggctactgctgaagccgagtgtcatcggaccagagagactctgcctccctttcctacaaggctgctcgaactgatcgagggatttatgctgtcaaaaggattgctcaccgcttgcaagctgaaggtgtttgatctcctgaaggatgaggccccgcagaaggcagcagatatcgcatctaaagttgatgcaagcgcatgcggcatggaaagactgctcgatatatgtgcagcaatgggattgcttgagaaaacagaacagggctatagcaacaccgaaacagccaacgtctatctcgcatcagacggcgagtattccttacatggatttattatgcataacaacgatctcacttggaatctgttcacatacttagagtttgctattcgggaggggacaaatcagcaccatagagccttgggcaaaaaggccgaggaccttttccaggacgcatactaccagtctcccgaaacacgtctgaggttcatgcgagccatgcatgggatgacaaaactgactgcctgtcaggtggcgaccgcctttaacctttctcgcttttcttccgcttgtgatgtgggggggtgtactggagccctggcgagagaacttgcccgagagtacccccgcatgcaggtcaccgtcttcgacctcccggacataatagagctcgccgcacatttccagccaccagggccccaggctgtgcagattcattttgccgctggggatttcttcagggatccactcccatctgccgagctatatgtactgtgtcggatcctccacgactggcctgacgataaggtgcacaagcttctgagccgggttgccgagtcatgtaaacccggggccggcctgttgcttgtggaaacacttctggatgaggaaaagagagtggctcagagggccctaatgcaatccctgaatatgctggttcaaaccgaaggcaaggaaagatcactgggggagtaccagtgcctgcttgagctgcatggattccaccaagtgcaggtcgtccacctcggcggcgtgctggacgccatactggccaccaaagtcgccccctag

SEQ ID NO: 144149 - DNA, 1638 bp, Artificial Sequence
  derived and/or modified sequence
atggggactccctggcggcctccctcccggcgcccttggcggtggcctacaggctgtacaaggaagacatgtggccccccaacctggtccctcgagcgaaccaggagctggctgtctggcagggagcactcagtattcaccggagtggctattgtccactgtagctcaaaggaccatcagctagacacaagggtgtccgagttctacgaagagacaaaggtcaaattctctgaactctcagaggaactgctgtgggagtacgtgcactctggagagcctatggataaggcagggggatatggtatccaagctttgggcggtatgttggtggaaagtgtgcacggtgactttctcaatgtcgtcgggttccccttgaatcacttctgcaagcagctcgtgaaactctattatcccccgcgccccgaagatctgagaagatcagtaaaacatgattcaattccagcggcagacaccttcgaagacctgagtgatgtcgaaggcggtggctctgaaccaacgcaaagagacgctgggtctagagatgagaaggcagaagccggagaggcagggcaggcaaccgctgaggctgagtgccatcgtaccagggaaaccctgcctcctttcccaacaagattgttggagcttatcgaaggattcatgctctccaaaggcctcttaacagcctgcaagctgaaagtattcgatctccttaaagacgaggccccccaaaaggcggctgacatcgcgagtaaagtggatgcatccgcctgcggaatggagagacttttagatatctgcgctgctatggggctcctggagaagacagagcaagggtatagtaacactgaaacagccaatgtttatctcgcttctgacggggaatatagccttcacggcttcatcatgcataacaatgatttaacgtggaacctgtttacttacctggagttcgcgatccgcgagggtacgaatcagcaccatcgcgctctgggaaagaaagccgaggatctgtttcaagatgcctactaccaaagcccggaaactcggctccggtttatgcgggcaatgcacgggatgaccaagctgactgcctgtcaggtggccactgcgtttaacctttctcgctttagctcagcatgcgatgtaggcgggtgtacaggtgctctcgcacgggagcttgcccgtgaatatccaagaatgcaggtcactgttttcgatctgcccgatattatcgagctggcggcgcatttccagccgcctggaccccaggctgtgcaaatccactttgcagccggcgattttttccgcgacccattaccaagtgctgaactctatgtcctctgtaggattcttcacgattggcccgatgacaaagtgcataagctgcttagtcgggtggcagagagctgcaaacccggggccggattgctcctcgtggagacactgctggatgaagagaaaagggtagcacagcgagcactgatgcagtcactcaatatgctcgtgcagacagaaggaaaggagcgctccctgggcgagtatcaatgcttgctggagttacacggttttcatcaggtgcaggtggtgcacctcggaggggtcctcgacgccatcctggccacaaaagtggctccctag

SEQ ID NO: 144150 - DNA, 1692 bp, Artificial Sequence
  derived and/or modified sequence
atggagacggctaaacagaaagcgttggaggtcgctaaccgactgtaccaaaaagaccttcgagcgcctgatgtggttatcggggccgataccatcgtgaccgtaggggggctgatcctggaaaagcctgtggacaaacaagacgcttatagaatgctctctagactgtcaggaagggaacattcggtctttacaggggtggccatcgttcattgctcctccaaggaccatcagcttgacacacgagtcagcgaattttacgaggaaactaaggtgaagttttccgagttatcagaggaactgttatgggaatacgttcactccggggaacccatggacaaagccggtggttacgggattcaggctctgggcgggatgctggtagaaagcgtgcacggagacttcttgaatgtggtgggctttcctctgaaccatttctgtaagcaactagtcaaactgtactacccccctagacccgaagacctgcggcgctctgttaagcacgacagcattccggctgctgacacattcgaggacctttccgacgtcgagggaggaggtagcgaaccaacgcaacgagacgctgggtcacgcgacgaaaaggcagaagccggggaagcaggccaggcaacagccgaggcggaatgccacagaacgcgcgagactctccctccttttcccaccaggcttttggaacttatcgagggcttcatgttgtctaagggcctcctgactgcttgtaagctgaaagtgttcgacctcctaaaggatgaggcaccccaaaaggctgcagatattgcttctaaggtggatgcttccgcgtgcggaatggagagactcctcgatatatgcgccgccatgggtttactggagaaaacagaacagggatactctaacacagaaaccgcaaacgtgtacctagctagtgatggggaatattccctgcacggcttcatcatgcataataacgatctaacctggaacctgttcacttacttggagtttgcaattcgagaaggcacaaatcagcaccaccgtgctttagggaaaaaagccgaggatctattccaggatgcctattaccagagtcccgagactcgacttcgcttcatgcgagccatgcatgggatgaccaaactgacagcctgtcaggtggcgacagcctttaatctgtctcgattcagtagcgcttgcgatgtggggggctgcaccggtgccctggcaagagaacttgcccgtgagtatcccagaatgcaagtaacggtgtttgacttgcccgatatcattgagctcgccgctcatttccagccccctggtccacaggctgtacagatccatttcgccgccggtgacttttttagagaccctctgccttctgcagagctttatgtcttatgcaggatccttcacgattggccagatgacaaggttcataaactcctgtctcgcgtcgctgagtcttgtaaaccaggggccgggttactcctggtcgaaaccctccttgacgaggaaaagcgcgtggcacaacgggcactaatgcaatctttgaacatgctggtccaaacggaaggaaaagagcgatctctgggggagtaccaatgtttgcttgagttacacggctttcaccaggtacaggtggtgcatctgggcggagtactggacgctattctggcaaccaaagtggcgccctag

SEQ ID NO: 144151 - DNA, 1866 bp, Artificial Sequence
  derived and/or modified sequence
atggtgctgtgccctgtgattggcaagctgctgcacaagagggtggtgctggccagcgccagcccccggcggcaggagatcctgagcaatgccggcctgcgctttgaggtggtgcccagcaagttcaaggagaagctggacaaggccagctttgccaccccctacggctacgccatggagacagccaagcagaaggccctggaggtggccaacagactctaccagaaggacctgcgggccccagatgtggtgattggagctgacaccatcgtgacagtgggcggcctcatcctggagaagcctgtggacaagcaggatgcctacaggatgctgagccggctgagcggccgggagcacagcgtcttcaccggggtggccatcgtgcactgcagcagcaaggaccaccagctggacaccagggtgtctgagttctatgaggagaccaaggtgaagttcagcgagctgtctgaggagctgctgtgggagtatgtgcacagcggggagcccatggacaaggccggcggctacggcatccaggccctgggcggcatgctggtggagagcgtgcacggggacttcctgaatgtggtgggcttccccctgaaccacttctgcaagcagctggtgaagctgtactacccacccaggcctgaggacctgcggcgctctgtgaagcatgacagcatcccagctgctgacacctttgaggacctgagtgatgtggagggcggcggcagcgagcccacccagagagatgctggcagcagagatgagaaggccgaggccggggaggccggccaggccacagctgaggccgagtgccacaggacccgggagaccctgccccccttccccacccggctgctggagctgattgagggcttcatgctgagcaagggcctgctgacagcctgcaagctgaaggtgtttgacctgctgaaggatgaggccccccagaaggctgctgacatcgccagcaaggtggatgccagcgcctgtggcatggagcggctgctggacatctgtgccgccatgggcctgctggagaagacagagcagggctacagcaacacagaaacagccaacgtgtacctggccagtgatggagagtacagcctgcacggcttcatcatgcacaacaatgacctgacctggaacctcttcacctacctggagtttgccatccgggagggcaccaaccagcaccaccgggccctgggcaagaaggcagaagatctcttccaggatgcctactaccagagccctgagacccggctgcgcttcatgagggccatgcacggcatgaccaagctgacagcctgccaggtggccacagccttcaacctgagccgcttcagcagcgcctgtgatgtgggcggctgcaccggggccctggcccgggagctggcccgggagtaccccaggatgcaggtgacagtgtttgacctgcctgacatcatcgagctggccgcccacttccagcccccaggcccccaggccgtgcagatccactttgctgctggggacttcttccgggaccccctgcccagcgctgagctgtatgtgctgtgccgcatcctgcatgactggccagatgacaaggtgcacaagctgctgagccgggtggccgagagctgcaagccaggggccggcctgctgctggtggagaccctgctggatgaggagaagagggtggcccagagggccctgatgcagagcctgaacatgctggtgcagacagagggcaaggagaggagcctgggggagtaccagtgcctgctggagctgcacggcttccaccaggtgcaggtggtgcacctgggcggcgtgctggatgccatcctggccaccaaggtggccccctag

SEQ ID NO: 144152 - DNA, 1638 bp, Artificial Sequence
  derived and/or modified sequence
atgggcaccccctggaggcctcccagccggcggccctggcgctggcccaccggctgcaccaggaagacctgtggcccccccacctggagcctggagaggaccaggtcctggctgagcggccgggagcacagcgtcttcaccggggtggccatcgtgcactgcagcagcaaggaccaccagctggacaccagggtgtctgagttctatgaggagaccaaggtgaagttcagcgagctgtctgaggagctgctgtgggagtatgtgcacagcggggagcccatggacaaggccggcggctacggcatccaggccctgggcggcatgctggtggagagcgtgcacggggacttcctgaatgtggtgggcttccccctgaaccacttctgcaagcagctggtgaagctgtactacccacccaggcctgaggacctgcggcgctctgtgaagcatgacagcatcccagctgctgacacctttgaggacctgagtgatgtggagggcggcggcagcgagcccacccagagagatgctggcagcagagatgagaaggccgaggccggggaggccggccaggccacagctgaggccgagtgccacaggacccgggagaccctgccccccttccccacccggctgctggagctgattgagggcttcatgctgagcaagggcctgctgacagcctgcaagctgaaggtgtttgacctgctgaaggatgaggccccccagaaggctgctgacatcgccagcaaggtggatgccagcgcctgtggcatggagcggctgctggacatctgtgccgccatgggcctgctggagaagacagagcagggctacagcaacacagaaacagccaacgtgtacctggccagtgatggagagtacagcctgcacggcttcatcatgcacaacaatgacctgacctggaacctcttcacctacctggagtttgccatccgggagggcaccaaccagcaccaccgggccctgggcaagaaggcagaagatctcttccaggatgcctactaccagagccctgagacccggctgcgcttcatgagggccatgcacggcatgaccaagctgacagcctgccaggtggccacagccttcaacctgagccgcttcagcagcgcctgtgatgtgggcggctgcaccggggccctggcccgggagctggcccgggagtaccccaggatgcaggtgacagtgtttgacctgcctgacatcatcgagctggccgcccacttccagcccccaggcccccaggccgtgcagatccactttgctgctggggacttcttccgggaccccctgcccagcgctgagctgtatgtgctgtgccgcatcctgcatgactggccagatgacaaggtgcacaagctgctgagccgggtggccgagagctgcaagccaggggccggcctgctgctggtggagaccctgctggatgaggagaagagggtggcccagagggccctgatgcagagcctgaacatgctggtgcagacagagggcaaggagaggagcctgggggagtaccagtgcctgctggagctgcacggcttccaccaggtgcaggtggtgcacctgggcggcgtgctggatgccatcctggccaccaaggtggccccctag

SEQ ID NO: 144153 - DNA, 2027 bp, Artificial Sequence
  derived and/or modified sequence
aagtgcggacgcccggctcccggcgtggacgccatggtgctgtgcccggtgattgggaagctgctgcacaagcgcgtggtgctggccagcgcctccccacgccgtcaggagatcctcagcaacgcgggtctcaggtttgaggtggtcccctccaagtttaaagagaagctggacaaagcctccttcgctactccgtatgggtacgccatggagaccgccaagcagaaggccctggaggtggccaaccggctgtaccagaaagacctgcgggcccccgacgtggtcattggagcggacacgatcgtgacagtcggggggctgattctggagaagccggtggacaagcaggacgcctacaggatgctgtcccggttgagtgggagagaacacagcgtgttcacaggtgtcgcgatcgtccactgctccagcaaagaccatcagctggacaccagggtctcggaattctacgaggaaacgaaggtgaagttctcggagctgtccgaggagctgctctgggaatacgtccacagcggggagcccatggacaaagctggcggctacgggatccaggccctgggcggcatgctggtggagtccgtacacggggactttctgaacgtggtgggattcccgctgaaccacttctgcaagcagctggtgaagctctactacccgccccgtccggaggacctgcggcggagtgtcaagcacgactccatcccggccgcggacaccttcgaagacctcagtgacgtggaggggggcggctcggagcccactcagagggacgcgggcagccgcgatgagaaggccgaggcgggagaggcgggacaggccacggcagaggctgagtgtcacaggactcgggagaccctgcctccgttcccgacacgcctcctggagctgattgagggctttatgctatccaagggcctgctcaccgcttgcaaactgaaggtgttcgatttgttaaaagatgaagcaccccagaaggctgcggatattgccagcaaagtggacgcctctgcgtgtggaatggagaggcttctggacatctgtgctgccatggggctcctggagaagacagagcaaggttacagtaacacagagacagcgaacgtctacctggcatcggatggcgaatactctctgcacggcttcatcatgcacaataatgacctcacatggaacctctttacatacctggagtttgccatccgagagggaacaaaccagcaccacagggcgttggggaagaaggcggaagatctgttccaggatgcgtactaccagagcccggagacgcggctgaggttcatgcgggccatgcacggcatgacgaagctgactgcgtgccaggtggccacggccttcaatctgtcccgcttctcctccgcctgcgacgtgggaggctgcacgggtgcactggcccgagagctggcccgtgagtaccctcgtatgcaggtgactgtgtttgacctcccagacattatcgagctggccgcccacttccaaccccccggaccgcaggcagtgcagatccacttcgcagcaggtgactttttcagggaccccctccccagcgctgagctgtacgtcctgtgccggatcctgcatgactggccagacgacaaagtccacaagttactcagcagggtcgccgagagctgcaagccaggggccggcctgctgctggtggagacgctcctggatgaggagaagagggtggcgcagcgcgccctgatgcagtcactgaacatgctggtgcagactgaaggcaaggagcggagcctgggcgagtatcagtgcttgctggagctgcacggcttccaccaggtgcaggtggtgcacttggggggtgtcctggatgccatcttggccaccaaagtggccccctgaagcccaggcagcatgttcattatagggatgtcctcccccaggctgcaggtggaccgcccggtccccaagtaccataggacagtcacataggagcgtgtagtcgtgactgaataaagaaagcaaaagcc

SEQ ID NO: 144154 - DNA, 1692 bp, Artificial Sequence
  derived and/or modified sequence
atggagacagccaagcagaaggccctggaggtggccaacagactctaccagaaggacctgcgggccccagatgtggtgattggagctgacaccatcgtgacagtgggcggcctcatcctggagaagcctgtggacaagcaggatgcctacaggatgctgagccggctgagcggccgggagcacagcgtcttcaccggggtggccatcgtgcactgcagcagcaaggaccaccagctggacaccagggtgtctgagttctatgaggagaccaaggtgaagttcagcgagctgtctgaggagctgctgtgggagtatgtgcacagcggggagcccatggacaaggccggcggctacggcatccaggccctgggcggcatgctggtggagagcgtgcacggggacttcctgaatgtggtgggcttccccctgaaccacttctgcaagcagctggtgaagctgtactacccacccaggcctgaggacctgcggcgctctgtgaagcatgacagcatcccagctgctgacacctttgaggacctgagtgatgtggagggcggcggcagcgagcccacccagagagatgctggcagcagagatgagaaggccgaggccggggaggccggccaggccacagctgaggccgagtgccacaggacccgggagaccctgccccccttccccacccggctgctggagctgattgagggcttcatgctgagcaagggcctgctgacagcctgcaagctgaaggtgtttgacctgctgaaggatgaggccccccagaaggctgctgacatcgccagcaaggtggatgccagcgcctgtggcatggagcggctgctggacatctgtgccgccatgggcctgctggagaagacagagcagggctacagcaacacagaaacagccaacgtgtacctggccagtgatggagagtacagcctgcacggcttcatcatgcacaacaatgacctgacctggaacctcttcacctacctggagtttgccatccgggagggcaccaaccagcaccaccgggccctgggcaagaaggcagaagatctcttccaggatgcctactaccagagccctgagacccggctgcgcttcatgagggccatgcacggcatgaccaagctgacagcctgccaggtggccacagccttcaacctgagccgcttcagcagcgcctgtgatgtgggcggctgcaccggggccctggcccgggagctggcccgggagtaccccaggatgcaggtgacagtgtttgacctgcctgacatcatcgagctggccgcccacttccagcccccaggcccccaggccgtgcagatccactttgctgctggggacttcttccgggaccccctgcccagcgctgagctgtatgtgctgtgccgcatcctgcatgactggccagatgacaaggtgcacaagctgctgagccgggtggccgagagctgcaagccaggggccggcctgctgctggtggagaccctgctggatgaggagaagagggtggcccagagggccctgatgcagagcctgaacatgctggtgcagacagagggcaaggagaggagcctgggggagtaccagtgcctgctggagctgcacggcttccaccaggtgcaggtggtgcacctgggcggcgtgctggatgccatcctggccaccaaggtggccccctag

SEQ ID NO: 144155 - DNA, 1866 bp, Artificial Sequence
  derived and/or modified sequence
atggtgctgtgccccgtgatcggcaagctgctgcacaagcgggtggtcctcgcatccgccagccccaggagacaggagattctgtctaacgctggcctgaggttcgaagtggttccatccaaattcaaagaaaagttagacaaggcaagctttgctacaccttatggatacgccatggagaccgcaaagcaaaaggcgctggaagtcgctaaccggctctaccagaaggacctgcgggcacccgacgtggtcatcggtgcggacaccatagtcactgtgggcggattgatcctggaaaagccagtagacaaacaagatgcttacagaatgctttcacgactgagcggccgagagcattctgtgtttaccggcgtcgctatcgtgcattgcagctccaaggatcaccagttggacacccgggtgtccgagttctatgaggaaaccaaggtgaagttctcagaactgtctgaggagctgctttgggaatacgtacactcaggtgaacccatggacaaagctggcggctacggaatccaggccctcgggggaatgctagtcgaatcagttcatggtgacttcttaaacgtcgtgggctttcccctcaaccatttttgtaaacagctggtgaagctgtactaccctccaaggcccgaggatctacggcggtctgtaaagcacgattccatccctgcggccgatacattcgaagatctgtcagatgtggaaggaggcgggtctgaacccacgcagagagacgctggttctagggacgagaaagcggaagccggggaggcaggccaagccaccgccgaggcggaatgccaccgcacgcgagagaccctgcctccttttccaacccggctcttggaattgattgagggttttatgctgtctaagggactgttgacagcttgtaagttaaaggtgttcgatctgctgaaggacgaggctccacagaaagctgccgacattgcatctaaggtggacgcttccgcttgtgggatggagcgcctactggacatctgtgccgccatgggattgctggaaaaaacggagcagggctactctaacacggaaacggctaatgtctacctcgcaagcgatggcgaatattccctgcacggtttcatcatgcataataatgacctcacctggaatctgtttacttaccttgaattcgccatccgcgaaggcactaatcagcatcaccgagctctggggaagaaagctgaggacctattccaggatgcctattatcagagcccagaaactagactgcgatttatgagggctatgcatggaatgactaagttaactgcatgccaagtggccactgcttttaacctatcccgattctccagtgcctgtgatgtgggcggctgtacaggggccctggccagagagctagctcgtgaatatccaaggatgcaagtaaccgtgtttgacctgccggatataattgagctcgctgcacattttcaaccgccaggacctcaagcggtgcagatccacttcgcggcaggtgattttttcagggaccccctgccatcagccgagctgtacgtgctgtgtcgaattcttcatgattggcccgacgacaaggtgcacaagcttcttagtcgtgtggccgaatcatgcaagcccggggctggtctcctgctcgttgagacacttctggatgaggaaaaacgggtggctcagagagcacttatgcagtctttaaatatgctggttcagacagagggaaaggagagatcacttggcgaataccaatgtcttctggaactccacggcttccatcaagtccaggtggttcatctgggcggtgttctggatgcgatcttagccacgaaggtggctccatag

SEQ ID NO: 144156 - DNA, 1638 bp, Artificial Sequence
  derived and/or modified sequence
atgggcaccccctggcggccccccagccggcggccctggcggtggcctaccggctgcactagaaagacctgtggtcctccgacgtggtcacttgagcgtactcgatcatggctttctggcagggagcattccgtcttcacgggcgttgccatagtccattgcagttcaaaggaccaccagcttgatactagggttagcgaattttatgaggaaaccaaggtgaagttttccgagctgtccgaagaactgctttgggaatacgtgcactctggggagccaatggataaggcgggcggttatggcatccaggccctgggaggcatgttggtggaatcagtccacggcgatttcctcaatgtggtgggctttcctctcaatcacttctgcaaacaactggttaaactttactaccccccaagaccagaggacctgcgtcgcagcgtgaaacacgacagcattcctgctgcagacaccttcgaggacctgtctgacgtggagggaggaggttcggagcctacacagagggacgctggaagtcgcgacgaaaaagctgaagctggagaggctggtcaggcgacagccgaagccgagtgccaccggaccagggagacactgcctccattcccgaccagactgcttgaacttattgaaggatttatgctgtctaagggcttgctgacggcatgcaaattgaaagtcttcgatcttctgaaagacgaggcaccccagaaggccgccgacatcgcaagtaaagtggatgcttccgcttgcgggatggaacgtttgctggacatttgtgcggccatgggcttgctggaaaaaactgaacagggctattcgaacacagagacagctaatgtgtacctggcctctgacggagaatacagcctgcacggctttattatgcacaacaatgacctgacctggaacctcttcacttacttggagtttgccatcagggagggaacgaatcagcatcatcgagcactcgggaagaaggctgaggaccttttccaggatgcttattaccagtctcccgaaacccgactgagatttatgagggcgatgcacggtatgacgaaactgacagcgtgtcaggttgctaccgctttcaacttgtctagattctcgtcagcgtgcgatgtaggtggatgtacaggggctctggcgagggagctggccagagagtatcccagaatgcaagttaccgtgtttgacctgcccgatattattgagctcgcggcccatttccaacccccaggaccgcaggccgtccagatccatttcgctgcaggagatttttttcgtgaccctctgccgtcagccgaactgtacgttttgtgtaggatactgcacgactggcccgatgataaggtccacaaacttctctcccgagtcgcggagtcctgtaagccaggagccggtttgcttctcgtcgaaacactgttggacgaggagaagagggtggcacagcgggcgttgatgcagtccttgaacatgctcgttcagactgaagggaaagagcgctctctcggcgaataccagtgcctacttgaattacacggttttcaccaggttcaggtagtgcacctcgggggcgtcttagatgcgattttggccaccaaagtggcgccatag

SEQ ID NO: 144157 - DNA, 1692 bp, Artificial Sequence
  derived and/or modified sequence
atggagaccgccaagcagaaggccctggaggtggccaaccggctgtaccaaaaagatttgcgcgccccggacgtcgttatcggcgcagacactatcgtcaccgtcgggggactaatactggagaagccagtggacaagcaggatgcttacagaatgctatcccggctctccggaagggaacattccgtgttcaccggtgtggctatagttcactgttccagcaaggaccaccagctcgataccagagtcagtgagttttacgaggaaaccaaagtcaagttctccgagttatctgaggagctgctctgggaatacgtgcacagtggcgaacccatggataaagcgggtggatacggtatacaggcactgggaggaatgttggtggaatcagtgcacggagactttcttaacgtagtaggtttccccctgaaccacttttgcaagcagctcgtcaagctgtattatcctcctcgccctgaagatctgcggaggagtgttaaacatgattccatccctgccgctgacactttcgaagatctgagcgacgtggagggcggaggctccgaacccacacagcgggacgcaggatcgcgggacgagaaggctgaagcaggggaagctggacaagcaacggccgaggcggagtgccatcgcactcgtgagacacttccaccttttccaacccgactgctggagctgatcgagggtttcatgcttagcaaaggtcttttaacagcttgtaagctgaaagtctttgacttactgaaggacgaggccccacagaaggctgccgatatagcctctaaggtggatgcatccgcctgtggaatggaaaggctgcttgatatctgtgctgccatggggttgttggaaaaaaccgagcaaggatactcgaacacagaaacagctaatgtatacctcgccagtgatggtgaatacagtctacacgggttcatcatgcacaacaacgacctcacttggaacttattcacctacctggagtttgccattagggagggcaccaatcagcaccacagagccctggggaaaaaggccgaggacctgtttcaggatgcatactaccagtctcctgaaaccagactcagattcatgagagccatgcacgggatgactaaactgacggcctgtcaagttgccaccgcattcaacctttcccgattcagctctgcatgcgacgtcggtggatgtaccggcgccctagcaagggagctggctagggaataccccaggatgcaggtaaccgtgttcgatctccctgacattatagaactcgccgcccattttcaaccaccaggcccccaggccgtccagattcactttgctgcaggcgattttttcagggatcctcttccctctgcggaactgtacgtcctgtgccgaattctacatgactggccagacgacaaggtgcataaactcctttcaagggtcgctgaaagctgtaagcccggtgctggtcttctgttggtggagaccttgttggacgaggaaaaacgcgttgcacaaagagccctgatgcagagtttaaatatgcttgtccaaaccgaggggaaagagcggagtctgggtgaataccagtgcctccttgagttgcatggtttccatcaggtgcaggtggtacacttaggaggcgtgctggatgccatactggcaactaaggtggcaccctag

SEQ ID NO: 144158 - DNA, 1966 bp, Artificial Sequence
  derived and/or modified sequence
agaagtgcggacgcccggctcccggcgtggacgccatggtgctgtgcccggtgattgggaagctgctgcacaagcgcgtggtgctggccagcgcctccccacgccgtcaggagatcctcagcaacgcgggtctcaggtttgaggtggtcccctccaagtttaaagagaagctggacaaagcctccttcgctactccgtatgggtacgccatggagaccgccaagcagaaggccctggaggtggccaaccggctgtaccagaaagacctgcgggcccccgacgtggtcattggagcggacacgatcgtggttgagtgggagagaacacagcgtgttcacaggtgtcgcgatcgtccactgctccagcaaagaccatcagctggacaccagggtctcggaattctacgaggaaacgaaggtgaagttctcggagctgtccgaggagctgctctgggaatacgtccacagcggggagcccatggacaaagctggcggctacgggatccaggccctgggcggcatgctggtggagtccgtacacggggactttctgaacgtggtgggattcccgctgaaccacttctgcaagcagctggtgaagctctactacccgccccgtccggaggacctgcggcggagtgtcaagcacgactccatcccggccgcggacaccttcgaagacctcagtgacgtggaggggggcggctcggagcccactcagagggacgcgggcagccgcgatgagaaggccgaggcgggagaggcgggacaggccacggcagaggctgagtgtcacaggactcgggagaccctgcctccgttcccgacacgcctcctggagctgattgagggctttatgctatccaagggcctgctcaccgcttgcaaactgaaggtgttcgatttgttaaaagatgaagcaccccagaaggctgcggatattgccagcaaagtggacgcctctgcgtgtggaatggagaggcttctggacatctgtgctgccatggggctcctggagaagacagagcaaggttacagtaacacagagacagcgaacgtctacctggcatcggatggcgaatactctctgcacggcttcatcatgcacaataatgacctcacatggaacctctttacatacctggagtttgccatccgagagggaacaaaccagcaccacagggcgttggggaagaaggcggaagatctgttccaggatgcgtactaccagagcccggagacgcggctgaggttcatgcgggccatgcacggcatgacgaagctgactgcgtgccaggtggccacggccttcaatctgtcccgcttctcctccgcctgcgacgtgggaggctgcacgggtgcactggcccgagagctggcccgtgagtaccctcgtatgcaggtgactgtgtttgacctcccagacattatcgagctggccgcccacttccaaccccccggaccgcaggcagtgcagatccacttcgcagcaggtgactttttcagggaccccctccccagcgctgagctgtacgtcctgtgccggatcctgcatgactggccagacgacaaagtccacaagttactcagcagggtcgccgagagctgcaagccaggggccggcctgctgctggtggagacgctcctggatgaggagaagagggtggcgcagcgcgccctgatgcagtcactgaacatgctggtgcagactgaaggcaaggagcggagcctgggcgagtatcagtgcttgctggagctgcacggcttccaccaggtgcaggtggtgcacttggggggtgtcctggatgccatcttggccaccaaagtggccccctgaagcccaggcagcatgttcattatagggatgtcctcccccaggctgcaggtggaccgcccggtccccaagtaccataggacagtcacataggagcgtgtagtcgtgactgaataaagaaagcaaaagcctg

SEQ ID NO: 144159 - DNA, 1866 bp, Artificial Sequence
  derived and/or modified sequence
atggtcttatgtcccgtcattggcaagctgctacacaaacgggtggtgttggccagcgcttctccgcgtagacaggagattctgagcaatgcgggactcaggttcgaagttgtgccatcaaagtttaaggaaaaactagataaagccagcttcgccaccccctatggctatgcgatggagacagctaagcaaaaagcacttgaagttgccaataggctgtatcagaaggatctcagagctccagacgtcgtgatcggcgctgacacaatcgtgaccgttgggggacttatccttgaaaaaccagttgacaagcaggatgcctatagaatgctgtcccgtctgagtgggagagagcacagcgtgtttactggggtggccatcgtgcactgttctagcaaagatcatcagcttgatacgcgcgtttccgaattttacgaggaaacgaaggtcaagtttagcgagctctcggaggaattgctgtgggaatatgtccattctggtgagcccatggataaggccggtggctatgggatacaagcgctgggaggcatgttggtggaatccgtccatggagactttctgaacgttgtgggtttccccctcaaccacttttgcaagcagctggttaagctctattaccccccacgccctgaggatctccgaagatctgtaaagcacgacagtattccagccgctgacacttttgaggacctgtctgacgtggagggcggaggttcagagcctactcagcgcgatgcgggtagtagagatgaaaaagccgaggccggtgaggcaggtcaggctactgctgaggctgaatgtcaccgtactagagagaccctcccccctttccccactcgactcctcgagctgatcgagggcttcatgttgagtaagggactcctgactgcttgcaaactaaaagtcttcgatcttcttaaagatgaagccccacaaaaggccgctgacatcgcttcgaaggtggacgctagcgcgtgcggcatggagcgccttctcgatatctgtgctgcaatgggactcctggaaaaaaccgaacagggctacagcaatactgaaactgcgaacgtgtatctggcctcagatggcgagtattcactgcatggcttcataatgcataataatgatcttacatggaacttgttcacttacctggaattcgcaatccgggaagggacaaatcagcaccaccgagcacttggcaaaaaggctgaggacctgttccaagatgcttattaccagtctcccgaaacacggttgcgttttatgcgcgcaatgcacgggatgaccaagcttacagcctgccaggttgccaccgcctttaatctgtcccgtttctctagcgcatgcgatgtgggcggttgtacgggcgctctggcccgagaactcgcaagggaatatcccaggatgcaagtgactgttttcgaccttccagacatcatcgagttggccgctcattttcaacctccaggccctcaggcagtccagatccacttcgccgcaggtgattttttccgggatcctctgccctccgctgagctgtatgtcctgtgcaggatcctccacgactggccagacgataaggtccacaagctgctgtctcgtgtggccgaaagctgcaagccaggagctgggctgctcctggtggagaccctcctcgacgaggaaaaaagagtggctcaaagagccctcatgcaatccctgaacatgctggtccagacagaaggtaaagaacgttctctgggtgagtatcagtgtttacttgaacttcatggtttccatcaggtgcaggtcgtccatctgggcggagtactggacgccatactggcaaccaaagtggcgccatag

SEQ ID NO: 144160 - DNA, 1638 bp, Artificial Sequence
  derived and/or modified sequence
atgggcaccccttggcgtcccccaagccggcgaccctggcgctggcccaccgggtgcacacgcaagacctgtggtccacccacttggtctttggaaagaacccggtcatggttgtcgggcagggagcatagtgtgttcacaggcgtggccatcgtgcactgttccagtaaagatcaccagctggatacacgggtgagcgaattttacgaagagacaaaggtgaagttttctgagctctcagaagaactgttgtgggagtacgtgcattccggggaaccgatggacaaggccggaggctacgggatccaggctctcggaggaatgctggtggagtccgtccacggtgatttcctgaacgtagttggcttccctctcaaccacttttgcaagcagttggttaaactctattatccgcctagacctgaggacctgcgcagatccgttaaacacgacagcatccctgcggctgatactttcgaggacctgtctgacgtcgagggtggtggttcagagcccacacagagggacgcgggttctcgggatgagaaggccgaagcaggggaggctggccaggcaacagccgaggccgagtgtcatcggacccgtgagacccttccccctttccccactcggcttctggagctaatcgagggctttatgctcagcaagggtcttctcacggcatgtaaactgaaagtttttgatctgctgaaggacgaggccccacagaaggctgccgacatcgcatccaaagttgatgccagtgcttgcggtatggaaaggttgctggacatctgtgcagctatgggactgttagaaaagacagagcagggatattccaatacagaaaccgcaaacgtttacctggccagtgatggcgagtacagccttcatgggtttatcatgcacaacaatgacctgacttggaacctgtttacatatctggagttcgcaatcagggaaggcaccaaccagcatcacagggccctgggtaagaaagcagaagatttgtttcaggatgcatattaccagagccccgagacaagattgcggttcatgcgggcaatgcacgggatgacgaaactcacggcttgtcaggtagccacagccttcaatctgtccaggttctctagcgcttgcgatgtcgggggttgcaccggtgctcttgccagggagctcgccagggagtatcccaggatgcaggtgaccgtctttgatctgcctgacattatagagctggctgcccacttccagcctcctggccctcaggccgtgcagatccacttcgctgcaggggacttcttccgcgaccctctgccaagcgcggaactgtacgttctctgtaggatccttcacgattggccagacgataaagtgcacaaactcctgagccgcgtggccgaatcttgcaagcctggcgcaggcctgctgctggtggagacactgctagacgaagaaaaaagggtggctcagagggctctcatgcagtctttgaacatgttggtacagacagaaggtaaagaacgatcactgggcgaatatcaatgccttctggagctacatgggttccaccaagtccaagtcgtacatctgggaggcgtgctcgatgccatactggctacaaaggtcgctccatag

SEQ ID NO: 144161 - DNA, 1692 bp, Artificial Sequence
  derived and/or modified sequence
atggagaccgcgaaacagaaggccctcgaggtcgctaatagactttaccaaaaggatctgcgcgcaccagacgtggtcattggcgctgacaccatcgtgacagtcggaggactcatcctggaaaaacccgtggacaagcaggacgcctaccgtatgttatcccggctgagtgggagagagcactcagtgttcaccggggtcgcaatagttcattgcagttctaaggatcaccagttggatactagggtaagcgaattttatgaggagaccaaagtgaaattcagcgagctgagtgaagagctgctttgggagtatgtgcattcgggggaaccgatggataaggcaggtggctatggcattcaggcgttaggaggaatgcttgtcgagtcagtgcatggtgacttcctcaatgtggtgggctttccactaaaccacttctgcaagcaactggttaagctttattatccacccaggcccgaggacctgagacgtagcgtcaaacatgactccatcccagctgctgataccttcgaagacctgtcagatgtggagggaggtggctctgaacctacacagcgggatgcaggttcaagggatgaaaaggccgaggccggtgaggccggacaggccacggcagaggccgagtgccatcggactagggaaaccctccccccttttccgacccggctgctggagctcatcgaaggattcatgctgtcaaaggggctattgaccgcatgtaaactcaaggtctttgatctgctcaaggatgaagccccacaaaaggcagctgacatcgcctcgaaggtggacgcttcggcctgtgggatggagcgtctactggacatctgcgctgctatgggtctcttggagaagacggagcagggttacagtaacaccgagacggccaacgtttaccttgctagcgatggcgagtactctctacatggctttattatgcacaataacgatcttacctggaacctgttcacttaccttgagtttgccatacgagagggaactaaccagcaccacagggcactgggaaaaaaggcagaagatctctttcaagatgcatactaccagagccccgaaacccgcctgaggttcatgagagcaatgcacgggatgactaagctgactgcttgccaggtggcgacagcctttaacctgtcccggttctcttccgcctgcgacgtgggaggatgtacgggagctctcgcaagagaattggccagagagtacccaaggatgcaggtgacagtatttgatctccccgacatcatcgaacttgccgcacatttccaacctccaggcccacaagctgtgcagattcattttgccgcaggtgacttcttccgggaccccctgccctccgcagagctctatgtgctgtgcaggattctccatgattggccagacgataaagtgcacaaactcctgtcacgggtggcagaatcctgcaaaccgggagccggactcctgttagtcgagacactccttgacgaagaaaagcgggtggcacaacgggctctcatgcagtcactgaacatgctggtacagaccgaggggaaagagcgcagcctcggggaataccagtgcctgctagaactccacggtttccaccaggtccaggttgtgcatctgggtggggtgttggatgctatcttggcaaccaaggtcgccccttag

SEQ ID NO: 144162 - DNA, 2048 bp, Artificial Sequence
  derived and/or modified sequence
atctccactcccctcccaccaggcacgaggacatccccatccccacgccactcgcaccgggtccgcggggaaccccctatctctaccttccccgacgcggctcccacaagacccccatctctgcgccgggcccctccacgtgcggggtctcaggtttgaggtggtcccctccaagtttaaagagaagctggacaaagcctccttcgctactccgtatgggtacgccatggagaccgccaagcagaaggccctggaggtggccaaccggctgtaccagaaagacctgcgggcccccgacgtggtcattggagcggacacgatcgtgacagtcggggggctgattctggagaagccggtggacaagcaggacgcctacaggatgctgtcccggttgagtgggagagaacacagcgtgttcacaggtgtcgcgatcgtccactgctccagcaaagaccatcagctggacaccagggtctcggaattctacgaggaaacgaaggtgaagttctcggagctgtccgaggagctgctctgggaatacgtccacagcggggagcccatggacaaagctggcggctacgggatccaggccctgggcggcatgctggtggagtccgtacacggggactttctgaacgtggtgggattcccgctgaaccacttctgcaagcagctggtgaagctctactacccgccccgtccggaggacctgcggcggagtgtcaagcacgactccatcccggccgcggacaccttcgaagacctcagtgacgtggaggggggcggctcggagcccactcagagggacgcgggcagccgcgatgagaaggccgaggcgggagaggcgggacaggccacggcagaggctgagtgtcacaggactcgggagaccctgcctccgttcccgacacgcctcctggagctgattgagggctttatgctatccaagggcctgctcaccgcttgcaaactgaaggtgttcgatttgttaaaagatgaagcaccccagaaggctgcggatattgccagcaaagtggacgcctctgcgtgtggaatggagaggcttctggacatctgtgctgccatggggctcctggagaagacagagcaaggttacagtaacacagagacagcgaacgtctacctggcatcggatggcgaatactctctgcacggcttcatcatgcacaataatgacctcacatggaacctctttacatacctggagtttgccatccgagagggaacaaaccagcaccacagggcgttggggaagaaggcggaagatctgttccaggatgcgtactaccagagcccggagacgcggctgaggttcatgcgggccatgcacggcatgacgaagctgactgcgtgccaggtggccacggccttcaatctgtcccgcttctcctccgcctgcgacgtgggaggctgcacgggtgcactggcccgagagctggcccgtgagtaccctcgtatgcaggtgactgtgtttgacctcccagacattatcgagctggccgcccacttccaaccccccggaccgcaggcagtgcagatccacttcgcagcaggtgactttttcagggaccccctccccagcgctgagctgtacgtcctgtgccggatcctgcatgactggccagacgacaaagtccacaagttactcagcagggtcgccgagagctgcaagccaggggccggcctgctgctggtggagacgctcctggatgaggagaagagggtggcgcagcgcgccctgatgcagtcactgaacatgctggtgcagactgaaggcaaggagcggagcctgggcgagtatcagtgcttgctggagctgcacggcttccaccaggtgcaggtggtgcacttggggggtgtcctggatgccatcttggccaccaaagtggccccctgaagcccaggcagcatgttcattatagggatgtcctcccccaggctgcaggtggaccgcccggtccccaagtaccataggacagtcacataggagcgtgtagtcgtgactgaataaagaaagcaaaagcctg

SEQ ID NO: 144163 - protein, 1859 aa, Artificial Sequence
  derived and/or modified sequence
MVDKNIYIIQGEINIVVGAIKRNARWSTHTPLDEERDPLLHSFGHLKEVLNSITELSEIEPNVFLRPFLEVIRSEDTTGPITGLALTSVNKFLSYALIDPTHEGTAEGMENMADAVTHARFVGTDPASDEVVLMKILQVLRTLLLTPVGAHLTNESVCEIMQSCFRICFEMRLSELLRKSAEHTLVDMVQLLFTRLPQFKEEPKNYVGTNMKKLKMRAGGMSDSSKWKKQKRSPRPPRHMTKVTPGSELPTPNGTTLSSNLTGGMPFIDVPTPISSASSEAASAVVSPSTDSGLEFSSQTTSKEDLTDLEQPGSPGYSTATEPGSSELGVPEQPDLQEGTHVEKSQSASVESIPEVLEECTSPADHSDSASVHDMDYVNPRGVRFTQSSQKEGTALVPYGLPCIRELFRFLISLTNPHDRHNSEVMIHMGLHLLTVALESAPVAQCQTLLGLIKDEMCRHLFQLLSIERLNLYAASLRVCFLLFESMREHLKFQMEMYIKKLMEIITVENPKMPYEMKEMALEAIVQLWRIPSFVTELYINYDCDYYCSNLFEELTKLLSKNAFPVSGQLYTTHLLSLDALLTVIDSTEAHCQAKVLNSLTQQEKKETARPSCEIVDGTREASNTERTASDGKAVGMASDIPGLHLPGGGRLPPEHGKSGCSDLEEAVDSGADKKFARKPPRFSCLLPDPRELIEIKNKKKLLITGTEQFNQKPKKGIQFLQEKGLLTIPMDNTEVAQWLRENPRLDKKMIGEFVSDRKNIDLLESFVSTFSFQGLRLDEALRLYLEAFRLPGEAPVIQRLLEAFTERWMNCNGSPFANSDACFSLAYAVIMLNTDQHNHNVRKQNAPMTLEEFRKNLKGVNGGKDFEQDILEDMYHAIKNEEIVMPEEQTGLVRENYVWNVLLHRGATPEGIFLRVPTASYDLDLFTMTWGPTIAALSYVFDKSLEETIIQKAISGFRKCAMISAHYGLSDVFDNLIISLCKFTALSSESIENLPSVFGSNPKAHIAAKTVFHLAHRHGDILREGWKNIMEAMLQLFRAQLLPKAMIEVEDFVDPNGKISLQREETPSNRGESTVLSFVSWLTLSGPEQSSVRGPSTENQEAKRVALECIKQCDPEKMITESKFLQLESLQELMKALVSVTPDEETYDEEDAAFCLEMLLRIVLENRDRVGCVWQTVRDHLYHLCVQAQDFCFLVERAVVGLLRLAIRLLRREEISAQVLLSLRILLLMKPSVLSRVSHQVAYGLHELLKTNAANIHSGDDWATLFTLLECIGSGVKPPAALQATARADAPDAGAQSDSELPSYHQNDVSLDRGYTSDSEVYTDHGRPGKIHRSATDADVVNSGWLVVGKDDVDNSKPGPSRPGPSPLINQYSLTVGLDLGPHDTKSLLKCVESLSFIVRDAAHITPDNFELCVKTLRIFVEASLNGGCKSQEKRGKSHKYDSKGNRFKKKSKEGSMLRRPRTSSQHASRGGQSDDDEDEGVPASYHTVSLQVSQDLLDLMHTLHTRAASIYSSWAEEQRHLETGGQKIEADSRTLWAHCWCPLLQGIACLCCDARRQVRMQALTYLQRALLVHDLQKLDALEWESCFNKVLFPLLTKLLENISPADVGGMEETRMRASTLLSKVFLQHLSPLLSLSTFAALWLTILDFMDKYMHAGSSDLLSEAIPESLKNMLLVMDTAEIFHSADARGGGPSALWEITWERIDCFLPHLRDELFKQTVIQDPMPMEPQGQKPLASAHLTSAAGDTRTPGHPPPPEIPSELGACDFEKPESPRAASSSSPGSPVASSPSRLSPTPDGPPPLAQPPLILQPLASPLQVGVPPMTLPIILNPALIEATSPVPLLATPRPTDPIPTSEVN

SEQ ID NO: 144164 - DNA, 5580 bp, Artificial Sequence
  derived and/or modified sequence
atggttgataaaaacatttacatcattcaaggcgaaattaatatagtggtgggcgccattaaaagaaatgccagatggagcacacatacccctctggatgaggagagagacccactgctgcacagctttgggcacctcaaggaggtcctcaactccatcaccgagttgtccgagattgagccgaatgtttttcttcggccctttttggaagtgattcggagcgaggacaccacggggccaataactggactggctttaaccagcgtgaacaagtttctgtcatacgcactcattgatcccactcacgagggtacagcagagggcatggaaaatatggccgacgctgtgactcatgcaaggtttgtggggaccgatcccgcctcagatgaagtcgtcctgatgaagattcttcaggttttacgcactttactgctgactccagtcggagcacacctaacaaatgagagcgtgtgcgaaatcatgcagagctgtttcagaatctgttttgaaatgcgattatcagagctgctgcgcaaaagtgccgaacacaccttggttgacatggttcagctcctcttcaccagactaccccaattcaaggaagagcctaaaaactacgtgggcaccaacatgaaaaagctgaagatgcgagctggcggaatgtccgattccagcaaatggaaaaagcagaagaggtccccacgccccccccgccacatgacaaaggtgacccctggttcggaactcccaactcctaatgggacgaccctgagttccaacttgacagggggaatgccctttattgacgttcccactcctatctcgagcgcgtcctctgaggcagcttctgctgtcgtgagcccttctacggatagcgggttagagttttcatcacagacaacatctaaggaagacctgacagatctcgaacaaccggggagtccaggatacagcacagctacagaaccgggtagttctgaactgggtgtgcctgaacagcctgacctgcaggagggcacgcacgtggaaaagtctcagagcgcaagcgtggaaagcatccccgaagtgcttgaggaatgtacctcccccgctgaccactccgactccgctagcgtgcacgatatggactatgttaaccccagaggagtgcggttcacacagtccagccagaaggagggtaccgcgctcgttccctacgggctgccatgcattagggaactgttcagatttttaatctccctgactaatccccacgacaggcataacagtgaagtgatgattcatatggggctacatttactgaccgtggccctcgaaagtgcacccgtggcacagtgccagaccctgctgggactcataaaggacgagatgtgccggcacttatttcagctgttatccatcgaacggctgaatctctacgcagcatcgctgcgggtttgcttcctgctgttcgaatcaatgagagagcaccttaaatttcagatggagatgtatatcaaaaaattgatggagattatcaccgtggagaatcctaagatgccttatgagatgaaagagatggccctggaagctatcgtgcaactgtggagaatcccctcttttgttacagagctttatatcaactacgattgtgattactactgtagcaatctgttcgaggagctgactaagctgttatccaaaaacgcttttcctgtgagtgggcagctgtacactacacatttgctgtccctagatgcactgctgactgtgatcgactccactgaggcccactgccaggcaaaggtcctgaatagccttacccagcaggagaaaaaggagaccgcacgtccaagttgcgagatcgttgacggcactagagaggctagtaacaccgagaggaccgcaagtgacgggaaggccgttgggatggcaagcgatatcccgggtctgcatttgcctgggggaggccgtctgcccccggaacacgggaagagcggttgcagcgacttagaggaggctgttgattcgggcgcagacaaaaaattcgccagaaagcctcctcgtttctcatgcctcttgcctgatcctagggagctaatcgagataaagaacaaaaaaaagctcctcatcactggcaccgaacagtttaatcaaaagcccaaaaaagggatccagttcctgcaggagaaggggctgctgaccattccaatggataatacggaggtagcacagtggctcagagaaaatccgaggttggacaaaaagatgatcggcgaatttgtctccgatcgaaagaacatcgaccttcttgagtcctttgtgtctaccttctcgtttcagggcttgcggctggacgaggcactgaggctgtatctggaggcgttccgacttcctggggaggctccggttatccagagacttctcgaggcgtttactgaacgttggatgaattgcaacggctctccgtttgccaattccgatgcttgtttttcgctggcctatgctgtcataatgctgaataccgatcagcataaccataacgtgcgtaaacaaaatgccccaatgacactggaggagttcaggaaaaacctgaagggcgtaaatggtggtaaagactttgaacaggatattttggaggatatgtaccacgccatcaagaatgaggaaattgtgatgccagaggagcagacaggcctcgtccgcgaaaattacgtctggaacgtcctgctgcaccgcggcgcaacacctgagggcatcttcctccgcgtgcccacagcatcctacgacctagatctgtttactatgacctggggccccaccattgcagccctgagctacgtatttgataaatctttagaagaaacaattatccagaaagcaatctctggcttccggaaatgcgcaatgattagcgcccactacggcctgtcagacgtgttcgataaccttattatctccttatgcaaattcaccgccctaagcagtgaaagcatcgaaaatctgcctagtgtgttcggaagtaacccaaaggcccatatagccgcaaagacggtgtttcacctggcccatcgacacggcgatatacttcgagaggggtggaaaaatatcatggaagctatgttgcagcttttcagagcccagctgcttcccaaagccatgatagaagtggaagactttgtcgaccccaatggcaaaattagcctgcagcgcgaggagaccccgagcaaccgcggagagagtactgtcctgtctttcgttagttggttgaccctgtcgggacccgagcagagctcagtcagggggccctccactgagaaccaggaagccaaacgcgtggcattagaatgtatcaagcagtgcgaccctgagaaaatgatcacagaaagcaagttcctgcaattggaaagcctacaagagttgatgaaagctctggtaagcgtgactccagacgaggaaacatatgatgaggaggatgccgccttttgtctggagatgctgctgagaatcgtgcttgaaaacagggaccgagtgggatgcgtctggcagacagtacgcgatcacttgtatcacttatgcgtgcaggctcaagatttttgttttctggtcgaacgggccgtggttggtctgctcagacttgcgatcagactcctacgacgagaggagatctccgctcaagtgctcttgtcactgcggatcctcttactgatgaaaccatccgtcctctctcgggtctcgcatcaggttgcttatggattgcacgagcttttgaagacaaatgctgccaatatccattccggcgatgactgggcaactctatttactctcctcgaatgcataggaagtggggttaaaccacctgctgcacttcaggcaactgcccgagccgatgctcctgatgcaggggcccagtccgattccgaactgccttcctatcatcaaaacgacgtgtcccttgaccgcgggtatacctcagactcagaagtgtatactgaccatggacggcctggcaagatacacaggagtgccactgacgcagacgtggtaaatagcggatggcttgtggtcggtaaagatgatgtcgataacagcaagcctggaccttcgcgtcccggtccttcacccctaatcaaccagtactccctgaccgtgggactggacttgggtccccatgataccaagtctctcctcaagtgtgtggagtcgttaagtttcatcgtgagggacgctgcccacattacacccgacaactttgagctgtgcgttaaaacactccgaattttcgtggaggcttctctcaatggaggctgcaaaagccaagagaagcgaggaaaatctcataaatatgattccaagggaaatcggtttaagaagaagagtaaggaaggatctatgctccgacgccccagaactagttctcagcatgcgagccgcggaggacagtccgacgacgacgaggatgagggagtgccagcctcttatcacacggtctctttgcaggtgtcccaggacctcctggacctgatgcacacattgcatactcgcgccgcctccatttattccagctgggccgaagagcagagacacttagagaccggcggccaaaaaattgaggctgacagtcggacgctctgggcccactgctggtgtccactgctgcaggggatcgcttgtctctgctgtgacgcaagacgccaggtgcgaatgcaggcccttacctaccttcaacgcgccctgctggtccatgatctgcagaagctggacgccctggaatgggagagttgttttaacaaagtgctgttccctttgttgacaaagctactggagaacatttcgcccgctgacgtggggggtatggaggaaactagaatgagagcaagtacactcctgagtaaagtgttcttgcagcatcttagcccactcttgtctctgtccacttttgcagctttgtggctgaccattctggacttcatggacaaatacatgcacgcaggaagcagtgatcttctttctgaggcaatcccagagtctcttaagaatatgctgctggttatggatacagctgaaatctttcattctgccgatgcacgggggggcggtccctctgcactgtgggaaataacatgggagagaatcgactgttttctgcctcatctgcgcgacgagttgttcaagcagaccgtgattcaggatccgatgcccatggagccgcagggtcagaagccgctcgcaagcgcccacctgactagcgcggctggggacacccggactcccggccatccacccccacctgaaatcccttcagagttgggcgcttgcgactttgagaaacccgagtcgccgcgcgcggcttcttcttcttcacccggttctcctgtagcctcaagtcctagcagactgtcgcctacccctgacggacctcccccccttgcacagccgcccctaattctgcagcccctggctagtcctctccaggtgggcgtacctccgatgacactgccaattatcttgaatcctgctctgatcgaagccacatcaccagtgccactccttgccacaccacgccccaccgatcccatccctacaagcgaagttaactag

SEQ ID NO: 144165 - DNA, 6403 bp, Artificial Sequence
  derived and/or modified sequence
agttaccacgtcagtgagctgacagggaaggtacccggctctactgcccgtcccggacgactcatcctggcggactgtgcagtcccaccctgacttcggcctcaatttccaggaaacaggctccttctcttctcccatctgctaccagagccgggagagctgctcggagacgcctccggggtgcgggctggacatgagcagcggctgccggtcctgggactaggccccgccattttggatccgctgacaggtttgccaagatggtggataagaatatttacatcattcaaggggagattaacattgtggttggggccatcaaacgaaatgcccgatggagcacccatacaccactggatgaagaacgggatcctctgctgcatagtttcggtcatctaaaggaggttttaaacagtataacagaactctcagaaattgagcccaatgtattccttcgaccttttctggaagtgattcgctctgaagataccactggccctatcactggactggcactcacctctgtcaacaagttcctgtcctatgcactcatagatcccacccatgagggcacagcagagggcatggagaacatggcagatgctgtcacccatgctcgttttgtgggcacggatcctgccagtgatgaagttgtcctgatgaaaatccttcaggttctacggactctgctgctaaccccagtgggtgcccacctaaccaatgaatctgtgtgtgagattatgcagtcttgcttccggatctgctttgaaatgaggctcagtgagttattgagaaaatccgcagagcacactctcgtagacatggtgcagctgctcttcacaaggttacctcagtttaaagaagaacccaagaactatgtggggaccaacatgaagaagctgaaaatgagagccggaggcatgagtgattcatccaaatggaagaaacagaagagatcccctcggcccccacgccatatgaccaaagtcacaccaggttcagagctgcccactcccaatggaaccaccttatcatctaacctcactggtggcatgcccttcattgatgtgcccactcccatctcctctgcaagttcagaagctgcctcagcagtggtcagtccctctacagacagtggcctggaattctcctcccaaaccacttccaaggaagaccttactgatctagagcaacctggctctccagggtacagcacagctacagagcctggaagcagtgagctaggtgttcccgagcagcctgacctccaggaagggacccatgtggaaaagtcccagtcagcatctgtggagtccatccctgaagtgttagaggagtgcacgtcccctgccgaccactctgactctgcctctgtccatgacatggattacgtcaatccccggggcgtgcgctttacacagtcctcccagaaagaaggcacagctttggtcccctatggtcttccctgcatccgcgagctcttccgcttcctcatctccctcaccaatccacacgaccgccataactcagaggttatgattcacatgggactgcatttgctgacagtggcccttgagtcagcccctgtagcccagtgccagaccctcttgggcctcatcaaggatgagatgtgccgtcacttattccagctactcagcatagagcgactaaacctttatgctgcttccctgcgagtatgcttcctactgtttgagagcatgcgagagcacctcaagttccaaatggagatgtacatcaaaaagcttatggagatcatcactgtggagaaccccaagatgccttatgagatgaaggagatggcactggaggccattgtgcagctctggcgcatccccagctttgtcacagagctctacatcaactatgattgtgactactactgttccaacctctttgaggaactcacaaagctgctgtccaagaatgccttccctgtgtctggtcaactctatacaacacacctactatctcttgatgccctattgacagtgattgacagcaccgaggcccactgccaggctaaagtcctcaacagcctcacccagcaagagaagaaggagacagccagaccaagctgtgagatagtagatggcacccgagaagctagcaatactgagagaactgccagcgatgggaaagctgtaggcatggcctcagacatcccaggcctgcatctgccaggtggagggcggctgccaccagaacatgggaaatcaggatgcagtgatctggaggaagctgttgactctggggctgacaaaaagtttgcccggaagccaccccgattttcctgtctcctgccagatccacgggaactaattgaaattaaaaacaaaaagaagctgctaatcactggcacagagcagttcaatcagaaaccaaagaaggggattcagtttctgcaagagaaaggcctcctcaccatcccaatggacaacacagaggttgctcagtggctccgagagaaccctcggctggacaagaagatgattggagagtttgtgagtgaccgcaaaaacattgacctgttggagagctttgtgagcaccttcagttttcagggtctgcgactggacgaagccctccgcctctacctggaagccttccgtttgcctggggaagcaccagtcatccagaggttgctggaggcattcacagagcgttggatgaattgtaatggctccccatttgccaatagcgatgcctgcttttccctggcctatgctgtcatcatgcttaatactgaccagcacaaccacaatgttcgtaaacagaatgcacccatgaccctggaggagtttcgcaaaaatctgaaaggtgtgaatggaggcaaggactttgagcaagacatcctggaggacatgtaccatgccatcaagaatgaggaaattgtaatgcctgaggagcagacaggcttggttcgggagaactatgtgtggaatgtgctgcttcatcgaggtgccacccctgagggcatattcctgcgtgtgcctactgccagctatgatcttgacctcttcaccatgacctggggccccactattgctgctctctcttatgtctttgacaaaagccttgaggagacaatcatccagaaagccatctcaggcttcaggaagtgcgccatgatctccgcccactatggcctcagcgatgtgtttgacaatctcatcatctctctatgcaaattcacagctctcagcagtgagtctattgagaacctgcccagtgtatttggaagcaaccctaaagcccatattgcagccaagacagtattccatttggcccatcgtcatggtgacatcctgcgggagggctggaagaatatcatggaggccatgctgcagctcttccgagcccaactactgcccaaggctatgatagaggtagaagatttcgtggatcccaatggcaagatctctctacagcgggaagagacaccatcaaaccgaggagagtcaacagtgctgagctttgtgagctggctaacactgagtggtcctgagcagtctagtgttcggggcccatccactgaaaaccaagaggccaagagagtggccttagagtgtataaagcaatgtgacccagaaaaaatgatcacagaaagcaagttcctccagctggagtcactacaggagctcatgaaggctctggtctcagtgacaccagatgaagagacatatgatgaggaagatgctgctttctgcctagagatgctgctaaggattgtgttggagaacagggatcgtgtgggctgtgtgtggcagactgttcgagaccatctataccacctctgtgttcaggcacaagatttctgcttccttgtggagcgggcagtggtggggttgctacgcctggccattcggcttctccggagagaagagatcagtgctcaggtgctgctctccctgcgcattttgctactgatgaagcccagtgtgctatcccgagtcagccaccaggttgcgtatgggctccatgaactcctgaagaccaatgcagccaacatccactcaggtgatgactgggccacactcttcacactgctggagtgcatcggctcaggtgtgaagcctccagctgctctgcaggccacagccagggcagatgcacctgatgccggggcccagtcagatagtgagctcccatcctaccatcagaatgacgtgagcctggatcgagggtacacttccgactcagaggtctacactgaccatggcaggccgggcaagatacaccgatcagccacagatgccgatgtggtcaacagtggttggttagtggttgggaaggatgacgttgataactccaagccagggcccagccgcccaggcccttcacccctgatcaatcaatacagcctaacagtgggactggatttggggccacacgacactaagtctctgcttaagtgtgtggaatcgctgtccttcattgtgcgtgatgctgcccacatcacacctgacaactttgagctctgcgtcaagactctccggatctttgtggaggccagtctgaatggcggatgcaagtcccaggagaaacgtggcaagagtcacaaatatgacagcaaagggaaccgcttcaagaagaaatccaaagagggatcaatgcttcgccggcctcgaacctccagccaacatgcctctcggggcgggcagagtgatgatgatgaggacgaaggcgtgcctgccagctaccatacggtgtctttacaggtcagtcaggacttgctagacctgatgcacaccctgcacacgcgggcagcctctatctacagctcatgggcggaggagcaacgccacctggagacaggtggccagaagattgaagctgattctcgcaccctctgggcccactgctggtgccctttactgcagggtattgcctgcctgtgctgcgatgcccggcgccaggtacggatgcaggcactgacctatctgcagcgagcactacttgtacatgatctgcaaaagctagatgccctggaatgggagtcctgttttaacaaggtgctgtttcctctacttaccaagctcttggagaacatcagccctgcagatgtgggtgggatggaggagacccggatgagggcttccacattgctctctaaggtcttcctgcagcacctgtctccactgctgtcactctctacctttgcggccctctggctcaccatcttggacttcatggacaagtacatgcacgcaggctccagcgacttactgtcagaggcgatccctgagtctctgaagaacatgcttctggtgatggacacagcggagattttccacagtgcagatgcacggggaggcggcccctcggccctctgggagatcacctgggaacgcattgactgttttctccctcacctacgagatgaactcttcaagcagaccgtcatccaggaccccatgcccatggagcctcaaggccaaaagcctctcgcctcagcccacctgacttccgctgctggcgacactaggacacctggccatccaccgcccccagagattccatctgagctgggggcctgtgactttgagaagcccgagagcccccgagccgccagcagcagctccccaggatcaccagtggcctcaagccccagcaggctgagccccacccccgacgggcctccacccttggctcagcccccactgatcctgcagcccttggcctccccactgcaggtgggcgtgccacctatgactctgcccatcatcctcaaccctgcgctcatcgaggccacctcaccagtgcccctcctggccacaccccgccccacagatcccatacccacctctgaggtcaactaaggcaggtcactcagagatcaggaccagtgcttcccaccaggctttccttgaccccacttctggctgtcctgcgggccacaagctcttcaggccaagtcagagctgctgttgctgccacttggatggggacctgaaaaagagaatgttgatagccccagctaagacccccaatcagctgtgggacctttttcctcctctgcgctccattcctgggggttcagcctgagagtgaactcagctgtcatctgcagcctctgcctccagcccggcagctctggggaggcatccgtgtgccggccctgcagtgcctgcccacggtcaggcattgaaaactaagcccaaccactctgcactttgtttcccactcccattagccctgggccacctcctccagttcttcctcttttactaattagttggtcagtttggagagttgactggcaccatggagggtaggcaggtgggggctgggtgggggactgcccacaggagcatgtacatatggaaaaacagaacaacagtggactttttatgatataataaatgtcttagtaccagcatca

SEQ ID NO: 144166 - DNA, 5580 bp, Artificial Sequence
  derived and/or modified sequence
atggtggacaagaacatctacatcatccagggcgagatcaacatcgtggtgggcgccatcaagagaaatgcccgctggagcacccacacccccctggatgaggagcgggaccccctgctgcacagctttggccacctgaaggaggtgctgaacagcatcacagagctgtctgaaattgagcccaacgtgttcctgcggcccttcctggaggtgatccgctctgaggacaccaccggccccatcaccggcctggccctgacctctgtgaacaagttcctgtcctatgccctgattgaccccacccatgagggcacagctgagggcatggagaacatggctgatgctgtgacccacgccaggtttgtgggcacagatcctgccagtgatgaggtggtgctgatgaagatcctgcaggtgctgcggaccctgctgctgacccctgtgggcgcccacctgaccaatgaatctgtgtgtgagatcatgcagagctgcttccgcatctgctttgagatgaggctgtctgagctgctgaggaagtctgctgagcacaccctggtggacatggtgcagctgctcttcacccggctgccccagttcaaggaggagcccaagaactacgtgggcaccaacatgaagaagctgaagatgagagctgggggcatgtctgacagcagcaagtggaagaagcagaagaggagcccccggccccccaggcacatgaccaaggtgaccccaggcagcgagctgcccaccccaaatggcaccaccctgagcagcaacctgaccggcggcatgcccttcattgatgtgcccacccccatcagcagcgccagcagcgaggccgccagcgctgtggtgagccccagcacagacagcggcctggagttcagcagccagaccaccagcaaggaggacctgacagacctggagcagcccggcagccctggctacagcacagccacagagcccggcagcagcgagctgggcgtgcctgagcagcctgacctgcaggagggcacccacgtggagaagagccagagcgcctctgtggagagcatccctgaggtgctggaggagtgcaccagccctgctgaccacagcgacagcgcctctgtgcatgacatggactatgtgaacccccggggcgtgcgcttcacccagagcagccagaaggagggcacagccctggtgccctacggcctgccctgcatccgggagctgttccgcttcctgatcagcctgaccaacccccatgacagacacaacagcgaggtgatgatccacatgggcctgcacctgctgactgtggccctggagagcgcccctgtggcccagtgccagaccctgctgggcctcatcaaggatgagatgtgccgccacctgttccagctgctgagcattgagcggctgaacctgtatgctgccagcctgcgggtgtgcttcctgctgtttgagagcatgagggagcacctgaagttccagatggagatgtacatcaagaagctgatggagatcatcaccgtggagaaccccaagatgccctatgagatgaaggagatggccctggaggccatcgtgcagctgtggaggatccccagctttgtgacagagctgtacatcaactatgactgtgactactactgcagcaacctgtttgaggagctgaccaagctgctgagcaagaatgccttccctgtgtctggccagctgtacaccacccacctgctgagcctggatgccctgctgactgtgattgacagcacagaggcccactgccaggccaaggtgctgaacagcctgacccagcaggagaagaaggagacagcccggcccagctgtgaaattgtggatggcacccgggaggccagcaacacagagaggacagccagtgatggcaaggctgtgggcatggccagtgacatccctggcctgcacctgcccggcggcggccgcctgcccccagagcacggcaagagcggctgcagcgacctggaggaggccgtggacagcggggctgacaagaagtttgccaggaagccaccccgcttcagctgcctgctgcctgacccccgggagctgattgagatcaagaacaagaagaagctgctgatcactggaacagagcagttcaaccagaagcccaagaagggcatccagttcctgcaggagaagggcctgctgaccatccccatggacaacacagaggtggcccagtggctgcgggagaacccccggctggacaagaagatgattggagaatttgtgtctgacaggaagaacatcgacctgctggagagctttgtgtccaccttctccttccagggcctgcggctggatgaggccctgcggctgtacctggaggccttccggctgcccggggaggcccctgtgatccagaggctgctggaggccttcacagagcgctggatgaactgcaatggcagcccctttgccaacagtgatgcctgcttcagcctggcctatgctgtgatcatgctgaacacagaccagcacaaccacaacgtgaggaagcagaatgcccccatgaccctggaggagttcaggaagaacctgaagggcgtgaatggaggcaaggactttgagcaggacatcctggaggacatgtaccacgccatcaagaatgaggagatcgtgatgcctgaggagcagacaggcctggtgcgggagaactacgtgtggaatgtgctgctgcacagaggagccaccccagagggcatcttcctgcgggtgcccacagccagctatgacctggacctcttcaccatgacctggggccccaccatcgccgccctgtcctatgtgtttgacaagagcctggaggagaccatcatccagaaggccatcagcggcttcagaaaatgtgccatgatcagcgcccactacggcctgagtgatgtgtttgacaacctgatcatcagcctgtgcaagttcaccgccctgagcagcgagagcattgagaacctgcccagcgtgtttggcagcaaccccaaggcccacatcgccgccaagacagtgttccacctggcccacagacatggagacatcctgcgggagggctggaagaacatcatggaggccatgctgcagctgttccgggcccagctgctgcccaaggccatgattgaggtggaggactttgtggaccccaacgggaagatcagcctgcagcgggaggagacccccagcaacagaggagagagcacagtgctgagctttgtgtcctggctgaccctgagcggccctgagcagagctctgtgcggggccccagcacagagaaccaggaggccaagagggtggccctggagtgcatcaagcagtgtgaccctgagaagatgatcacagagagcaagttcctgcagctggagagcctgcaggagctgatgaaggccctggtgtctgtgaccccagatgaggagacctatgatgaagaagatgctgccttctgcctggagatgctgctgagaattgtgctggagaacagagacagagtgggctgtgtgtggcagacagtgcgggaccacctgtaccacctgtgtgtgcaggcccaggacttctgcttcctggtggagagagctgtggtgggcctgctgcggctggccatccggctgctgcggcgggaggagatcagcgcccaggtgctgctgagcctgcgcatcctgctgctgatgaagcccagcgtgctgagccgggtgagccaccaggtggcctacggcctgcacgagctgctgaagaccaatgctgccaacatccacagcggagatgactgggccaccctcttcaccctgctggagtgcatcggcagcggcgtgaagcccccagctgccctgcaggccacagcccgggcagatgccccagatgctggggcccagagcgacagcgagctgcccagctaccaccagaatgatgtgtccctggaccggggctacaccagtgacagcgaggtgtacacagaccacggccggcctgggaagatccacaggtctgccacagatgctgatgtggtgaacagcggctggctggtggtgggcaaggatgatgtggacaacagcaagccaggccccagccggcccggccccagccccctcatcaaccagtacagcctgactgtgggcctggacctgggcccccatgacaccaagagcctgctgaagtgtgtggagagcctgtccttcatcgtgagagatgctgcccacatcaccccagacaactttgagctgtgtgtgaagaccctgcgcatctttgtggaggccagcctgaatggaggctgcaagagccaggagaagaggggcaagagccacaagtatgacagcaaaggaaaccgcttcaagaagaagagcaaggagggctccatgctgcggcggcccaggaccagcagccagcacgccagccggggcggccagagtgatgatgatgaagatgagggcgtgcctgccagctaccacacagtgtccctgcaggtgtcccaggacctgctggacctgatgcacaccctgcacaccagggctgccagcatctacagctcctgggccgaggagcagaggcacctggagactggaggccagaagattgaggccgacagcaggaccctgtgggcccactgctggtgccccctgctgcagggcatcgcctgcctgtgctgtgatgcccggcggcaggtgaggatgcaggccctgacctacctgcagagggccctgctggtgcatgacctgcagaagctggatgccctggagtgggagagctgcttcaacaaggtgctcttccccctgctgaccaagctgctggagaacatcagccctgcagatgtgggcggcatggaggagaccaggatgagggccagcaccctgctgagcaaggtgttcctgcagcacctgagccccctgctgagcctgagcacctttgctgccctgtggctgaccatcctggacttcatggacaagtacatgcatgctggcagcagtgacctgctgtctgaggccatccctgagagcctgaagaacatgctgctggtgatggacacagctgagatcttccacagcgcagatgcccggggcggcggccccagcgccctgtgggagatcacctgggagagaattgactgcttcctgccccacctgagagatgagctgttcaagcagaccgtcatccaggaccccatgcccatggagccccagggccagaagcccctggccagcgcccacctgaccagcgctgctggggacaccaggaccccaggccaccccccacctcctgagatccccagcgagctgggcgcctgtgactttgagaagccagagagcccccgggccgccagcagcagcagccctggcagccctgtggccagcagccccagccggctgagccccaccccagatggccccccacccctggcccagcccccactcatcctgcagcccctggccagccccctgcaggtgggcgtgccccccatgaccctgcccatcatcctgaacccagccctgattgaggccaccagccctgtgcccctgctggccaccccccggcccacagaccccatccccaccagcgaggtgaactag

SEQ ID NO: 144167 - DNA, 5580 bp, Artificial Sequence
  derived and/or modified sequence
atggtggacaagaacatctacatcatccagggcgagatcaacatcgtcgtcggagccattaaacgaaacgctagatggtcaacacacactccactggacgaggaacgcgaccccctcctgcactcattcggacatctgaaagaggtcttgaatagcattactgagctctctgaaattgaacctaatgtgttcctgcgaccattcttggaggtgatccggtccgaagataccacaggtcccattaccggtctcgcgcttacaagcgtgaataagtttctgtcctatgccctcatcgacccaacccacgagggaactgccgaggggatggagaacatggctgacgccgtgactcacgcaagattcgtgggaacggaccctgcgtcagacgaggtcgttcttatgaaaatcctgcaagtacttcgcaccctcctactgacccctgtgggggcccacttgactaatgaatctgtgtgtgagataatgcaatcttgctttagaatctgttttgaaatgcggctgagtgagctactgaggaaaagcgctgaacatacgctggtggatatggtacagctgctgttcactcgcctgccccagttcaaagaagagcccaagaattacgtcgggacgaacatgaagaagttaaagatgcgggccggagggatgagtgacagtagcaaatggaaaaaacagaaaagatctcctagaccaccacggcacatgacaaaagtcacaccaggatccgagttacccactcctaacgggactacgttgtctagcaacctgactggtggaatgccctttatagatgtaccaactccaatcagcagcgcctcttcagaggccgcatcggccgtcgtgagtcctagcactgatagcgggctggagtttagttcacaaacaacttctaaggaagatctcacagatttggaacagcccggatcccctgggtattctactgcgacagagcctggttcatctgagttgggagtgccggagcagccggaccttcaagagggaacgcacgttgagaagtcccagtctgcctcagtggaaagcatccccgaagtgctagaggaatgtacaagccccgccgaccactccgattctgccagcgttcatgatatggattacgttaacccgaggggtgtgcgcttcacacagtcaagccagaaggagggaacggccctggtgccctatggcttgccttgcattcgtgagttgttccgctttcttatctctctcaccaacccccatgatcgacacaactctgaagtgatgatccatatgggactccatctgctgacggtcgcccttgaaagcgctccagtggcccaatgccagaccctccttggcctaataaaagacgaaatgtgtagacatttgttccaactgttaagtatcgaaaggctcaatttgtacgctgcatctcttagggtctgctttctgctttttgagagtatgagagagcatctcaaatttcagatggagatgtacatcaaaaagctgatggaaatcatcactgtcgagaatcccaagatgccatacgagatgaaggagatggctctagaggccatcgttcaactgtggagaattccatccttcgtcactgaactttatattaattacgattgcgattattattgttcaaacctcttcgaagagctaacgaagcttttgagcaagaatgcttttcctgtaagcgggcagctttataccacccatctgctaagcttggacgccttgcttactgtcattgattctaccgaagcccactgccaggcaaaggttttgaactcattgacccagcaggaaaagaaggagactgctcggccctcctgcgagattgttgatggcacaagggaggcatccaacacagaacgaactgctagtgatggaaaggcagtggggatggcctctgacattcccggactccacctacctggcgggggcaggctgccccctgagcatgggaaaagcggctgtagtgatttggaagaggcagttgatagcggcgcagataaaaaatttgcccgaaaacctcccagattttcgtgtctgttacccgaccctcgggaacttatcgaaattaagaataagaagaaacttctgatcactggcacagagcaattcaaccagaagcctaaaaaagggatccaattcctccaagaaaagggcttacttacgatccctatggacaatacggaggtcgcgcagtggcttcgagagaacccccggctggataagaagatgatcggtgaatttgtgtcagatagaaagaatatagatttactcgagtcctttgtttcaacttttagcttccagggcctgagattggatgaggccctccgcttgtaccttgaagcattcaggctgcccggagaggccccagttattcagcgacttctggaggctttcaccgaacgctggatgaattgtaatgggtcaccattcgcaaactccgacgcatgtttcagtctggcttatgcagtgattatgctcaatacggaccaacataaccataatgtaagaaagcaaaatgccccaatgactttagaagaattccgtaagaacctcaagggagtgaacggcggaaaagattttgaacaggacatactggaggatatgtaccatgctatcaagaacgaggagatcgtcatgccggaagagcaaaccgggctcgtgcgagagaactatgtgtggaacgtgttactccaccgcggggcaaccccggagggcatcttcctgcgtgttcctaccgcaagttacgatctcgacctgtttaccatgacgtggggaccaaccatagccgctctaagttatgtgtttgacaagagcttagaggagacaataatccagaaagcaattagcgggtttcgtaagtgtgctatgatatccgcccattacggactttctgacgtcttcgataatttaataatcagcctatgtaagttcaccgcccttagtagcgaatcaattgaaaacctaccatcagtctttggatctaatcctaaagctcatattgctgccaaaaccgtgtttcatctggcacatcggcacggagacatcctgcgggagggatggaaaaatattatggaggccatgcttcagctttttagagctcaactcctgccgaaagccatgattgaggtggaggactttgtggacccgaatggaaaaatctccttgcagagagaggagacgccgtctaacaggggcgaatctactgtgctgtctttcgtaagctggttgactctgagtggacctgaacaaagttcggtgcgcggacctagcaccgagaatcaggaggcgaagcgggtggctctcgaatgcattaaacagtgcgaccccgaaaagatgatcacagagtctaagttcctgcaactggagtctttgcaggagctgatgaaggctcttgtgagtgtaacccccgatgaagagacttacgatgaggaagacgcggccttctgcctagagatgttactgagaattgtgctggaaaatcgcgacagagtcgggtgcgtttggcaaaccgtgcgcgaccacctataccatttgtgcgtgcaagctcaagatttctgttttttggtagagcgcgcagtcgtgggcctcttgagattggctattcgcctgctccgtagggaagaaattagcgcgcaggtgttactttcgctgcggatcctgctgctgatgaaaccaagtgtcttgtcaagggtgtcccatcaagtggcttatggactgcacgagctacttaaaactaacgctgcaaatattcattccggagatgactgggccaccctctttactctgctcgagtgcatcggctctggggtgaagcctcctgccgctctgcaggctaccgcgcgcgctgacgctcctgatgctggcgctcaaagtgatagtgagcttccatcctatcaccaaaatgacgtttctttggatcgaggctatacctcagactccgaggtgtatactgatcacgggcgaccaggcaagatccacagatcggcaactgatgctgacgtggtgaattctggatggctcgtggtgggaaaggacgacgttgataactctaaacctggcccatccagacctggaccctcccccctcattaaccaatattctctcacagtaggactcgacttaggacctcatgataccaaaagcttacttaaatgtgttgagtctctgagctttatcgtgcgcgatgccgctcacatcacacccgataactttgagttgtgcgttaagacgctgcggatcttcgtggaagcgtctttgaatggcggctgtaagagtcaggaaaagcgtgggaagagccataagtacgacagtaaaggcaaccggtttaagaaaaaatcaaaggagggaagcatgttgcgacgccctcgcacgagctcccagcacgcatccaggggagggcagagtgacgacgacgaggatgagggggtccccgcatcctaccacaccgtgtccctgcaagtttctcaagacctgttggatctgatgcatacactgcataccagagccgcgtcaatttatagttcttgggccgaggagcaacgccatctggagaccggcgggcaaaagattgaagcagatagcaggacactctgggcccactgctggtgtcccctgctgcagggcatcgcatgtttgtgttgcgacgcaaggcgccaggtgcgcatgcaggcccttacatatttacagcgcgcacttctagtgcatgacttgcaaaagttagatgctctggaatgggaatcttgcttcaataaagtgttatttccccttctgacaaaattattagagaacatttcccccgccgacgtgggaggaatggaagagacacggatgcgggccagcactctgctgtcaaaagtgttcctccagcacctgagcccattgttgtctctgtcgaccttcgctgctttatggctgactatcctcgactttatggataagtacatgcacgccgggagtagcgaccttctatcagaggcgatcccagagtctctaaagaatatgctgctcgtaatggataccgccgagatcttccatagcgctgacgcccgaggtggtggaccctctgcgctttgggagatcacctgggaacggatcgattgttttctgcctcatcttcgagacgagctgtttaagcagactgtgatccaggacccaatgcccatggaaccacaaggtcagaaaccactggcatccgctcacctcacaagcgccgccggcgacacacggacacccggacacccccccccccccgagatcccctctgagttaggtgcctgtgacttcgaaaagcctgaatcaccgagagctgcctctagcagcagcccaggcagtcccgtggcctcttctccttcaagactgtctcctaccccggacgggcccccacctttggctcagccccctctcattctgcaacccctggccagcccactgcaggtgggtgtgccccccatgacactccctataatcttaaatcctgctctcatcgaggctacttctccagttccacttttagctaccccccgacctaccgatcccattcctaccagtgaggtgaactag

SEQ ID NO: 144168 - DNA, 5579 bp, Artificial Sequence
  derived and/or modified sequence
atggtggacaagaatatctatattattcagggtgagattaatattgtggtgggcgctatcaaaagaaatgcccgatggagtacccacactccactggacgaggagcgggatcctctcctccactcctttggacacctgaaagaggtgctgaacagcattaccgagctatccgaaatcgaaccaaacgtttttttgcgcccttttctcgaggtcattagaagcgaggacacaacaggacctatcaccggcttggctctaaccagtgtgaacaaattcctatcctacgctctcattgatccaacacatgagggtactgcagaaggcatggagaacatggccgacgctgtcacccatgcccgatttgtcggtactgaccctgcaagcgacgaggtcgtattgatgaagatcctgcaagttctgcggacactcctgctgacgcccgtcggcgcacacctcaccaatgaatccgtttgcgaaattatgcagagctgtttcagaatatgcttcgaaatgagactctctgaactactccgcaaatcagccgagcacacgctggtggacatggtgcagctcctttttaccaggctcccccagtttaaggaggagcctaaaaattacgtggggaccaacatgaaaaaactcaaaatgcgggctggaggcatgtctgatagctctaaatggaagaagcaaaagcgtagtcctcggcctcccaggcacatgacgaaggtgacccctggtagtgagttgcccaccccgaacgggacgaccctgtcatccaaccttactggaggaatgccatttatcgacgtgcccacccctatctccagcgcatcctccgaagccgcatccgccgtagtcagcccatccactgattcgggacttgaattctcatcacaaacgacctcgaaagaagacctgacagatctcgagcagccaggaagccccggatactccacagccactgagccgggatctagcgagctgggcgtgcccgaacagccggatctacaggaggggacccatgtagaaaagagccaatccgcatccgtggagagtatccccgaagtactggaagagtgtacctccccggcagaccactccgacagcgcatcggtgcatgatatggactatgtaaacccacgaggcgtccgtttcactcagtcctctcagaaggaggggacggctcttgtgccctatggcctgccctgtattcgcgaattgttcaggttcctgattagcctcaccaacccccacgatagacataactctgaagttatgatccacatgggcctccatctcttgacggtggctcttgaatccgcacctgttgcccagtgccagactctgctgggtcttatcaaggacgagatgtgtaggcacctgtttcagctcctgtcaattgagcggcttaacctctacgctgcatcattgcgtgtgtgcttccttctgtttgagtccatgcgagaacaccttaagttccagatggagatgtatatcaagaagctgatggagataattaccgtggaaaatccaaagatgccttatgaaatgaaagagatggctctggaggccatagtccagctgtggcggatcccatcattcgttactgaactctacataaattacgattgtgattactactgttctaatctctttgaagaactcaccaaactactgagcaagaacgcattccctgtttcaggacagctgtacaccactcacctcctgagtcttgacgcactcctcactgttatcgacagcacagaagcgcactgccaggccaaagtgctgaacagtctgacccaacaggagaagaaagagactgcgagaccatcatgtgagatcgttgacggtactcgcgaagcgtcaaatacggagagaacagcctctgatggcaaggcagttggaatggcatctgatatccccggacttcaccttcctggaggagggaggcttccccctgaacacggcaaatcggggtgtagcgacctggaagaggccgtcgactccggagctgacaagaagtttgctaggaaacctcccagatttagctgtcttctgcccgaccccagagaacttattgaaataaagaacaaaaaaaagctgctcataaccggaaccgagcagtttaaccaaaaacctaagaaagggatacaatttttacaggagaaaggcctgctgactattccgatggataataccgaggttgcccagtggctcagagaaaacccgcgactggataaaaaaatgatcggggagttcgtttctgatcgaaaaaacatcgacctcttagaaagctttgtaagtaccttcagtttccagggtctcagactcgacgaagccctacggttgtaccttgaagccttcagattgccaggcgaagcccctgtcattcaacgactgttagaggccttcactgagcgctggatgaactgcaatggttctccgttcgctaacagcgacgcctgcttcagccttgcctatgctgtaataatgctgaacacagatcagcacaaccacaatgtgaggaaacagaacgctccaatgacgcttgaggaatttaggaagaatctgaagggcgtaaatggtgggaaggacttcgagcaggatatcctcgaggatatgtaccatgcgataaagaacgaagagattgtaatgccggaagagcagaccggacttgttcgggagaattacgtgtggaacgtcctgctccacagaggggctacccctgagggaatatttctgagggtcccaaccgccagttatgacttagacttgtttaccatgacatggggacccactatcgctgccctctcttacgtattcgataaatccctggaagaaacaattatccagaaagcaatctccggctttcgcaagtgtgccatgattagtgcacactatgggctctctgatgtcttcgataacctgataatcagcctctgcaagtttactgctttatcaagcgagtcaattgaaaatctgccttccgtctttggtagcaaccccaaggcgcatattgccgctaaaactgtgttccacctggcgcacaggcatggagacattcttagagaagggtggaaaaatatcatggaggccatgctgcaactgtttcgggcacagcttcttccaaaggccatgatcgaagtggaggattttgttgatccaaatggcaagatttccttacagagagaggaaaccccatccaaccgcggtgaaagtacagtgttatcttttgtgagctggctcactttgagtggcccagaacagtcctcggtaaggggcccatcaaccgagaatcaggaggccaagagagtggcactagagtgcatcaagcagtgtgatcctgaaaagatgattactgagtctaaatttctccagttggaatccctgcaggaattgatgaaggcactggtgagcgtgacccctgatgaggaaacctatgatgaagaggatgcggcattctgcctggaaatgctactgcggatcgttcttgaaaatagggatcgcgtgggttgtgtctggcagactgtgcgcgaccatctgtaccacctatgcgtacaggcgcaggatttttgtttcttggtggaaagggccgtggtgggcctgctgcgtctggcaatcaggctgttgcggagagaagaaatcagcgcgcaggttcttctgagcttgcggattctgttactgatgaaacctagcgtgctatcccgggtatcgcatcaggtggcatacggactgcacgaactgctgaagaccaatgccgctaacattcactctggagacgactgggctacattattcacgttgttagaatgcataggatcgggcgtgaaaccaccagcggctctccaagccactgccagagctgacgctccagatgctggggctcagtcagattccgagttaccctcgtatcaccaaaatgatgtttctcttgaccgaggatatacatcagatagtgaggtttacacagatcacgggagacctggaaagattcatcggtccgcaacagacgccgatgtcgtgaatagtggttggcttgtagtgggtaaggacgatgtggacaactccaagcctgggccaagtagacccggtccttctcctctcatcaatcagtactctctgactgtcggcctggacttgggacctcacgatacaaaatctctgctgaagtgtgtagagtcactcagtttcattgtcagagatgcggcacatatcaccccggacaatttcgaattgtgcgtgaaaaccctgcgaatcttcgtagaagcaagtttaaacgggggttgcaagagtcaggagaaaagaggtaagtcccacaagtatgacagcaaagggaaccggttcaaaaaaaaatcaaaggaaggctctatgctgcgaaggccccgtacatccagtcagcacgccagcaggggcggacagtccgatgatgatgaagacgaaggggttcccgcatcttatcacactgtgtctcttcaggtgtcgcaagaccttctcgacctcatgcatacgttgcatacacgtgccgctagtatttactcttcctgggccgaggagcagaggcatctggagaccggcggacaaaagatagaagctgattctcgcactctgtgggctcattgttggtgccctctcttacaggggatcgcgtgcctatgctgtgacgcgcgaaggcaggttcgaatgcaagctctaacttacctgcagagagcactgttagtgcacgatctccagaagctcgacgcacttgaatgggagtcctgcttcaacaaggtactgtttcctcttttgaccaaactgttggagaacatttctcctgccgacgtgggtggcatggaggaaacacgtatgagggcatcaaccttgctgtccaaggtcttccttcagcacctgagccccctgctctccctctccacctttgctgctttgtggctgactattctcgatttcatggataaatacatgcacgctgggagctccgatctcctttctgaggccatacccgagtcgctgaagaacatgctgttggtcatggacactgctgaaatttttcattctgcagacgcccgtggaggaggaccttccgccctatgggaaattacctgggaaaggattgactgcttcctgccacacttgagagacgagctattcaagcagaccgtcatccaggaccctatgccaatggagccccagggtcagaagcccctggccagtgctcatctgacaagcgcggctggtgatacccgcacacctggacacccccctccacccgaaattccctctgaactaggtgcgtgtgatttcgagaaacctgaaagtcccagagcagccagcagctcatcacctggttctcccgttgcttctagtccttcgagacttagccccacacctgacggaccaccgccattagcacagccacccctgatcctgcagccgctggctagccctctgcaggttggtgtcccaccaatgactctccctatcatccttaaccccgcacttattgaagcaacttctccggtccctctcctcgccactcccaggcctacagacccaatccctactagcgaagtaaatta

SEQ ID NO: 144169 - DNA, 5580 bp, Artificial Sequence
  derived and/or modified sequence
atggtggacaagaacatctacatcatccagggcgagatcaacatcgtggtgggcgccatcaagagaaacgccagatggagcacccacacccccctggacgaggagagagaccccctgctgcacagcttcggccacctgaaggaggtgctgaacagcatcaccgagctgagcgagatcgagcccaacgtgttcctgagacccttcctggaggtgatcagaagcgaggacaccaccggccccatcaccggcctggccctgaccagcgtgaacaagttcctgagctacgccctgatcgaccccacccacgagggcaccgccgagggcatggagaacatggccgacgccgtgacccacgccagattcgtgggcaccgaccccgccagcgacgaggtggtgctgatgaagatcctgcaggtgctgagaaccctgctgctgacccccgtgggcgcccacctgaccaacgagagcgtgtgcgagatcatgcagagctgcttcagaatctgcttcgagatgagactgagcgagctgctgagaaagagcgccgagcacaccctggtggacatggtgcagctgctgttcaccagactgccccagttcaaggaggagcccaagaactacgtgggcaccaacatgaagaagctgaagatgagagccggcggcatgagcgacagcagcaagtggaagaagcagaagagaagccccagaccccccagacacatgaccaaggtgacccccggcagcgagctgcccacccccaacggcaccaccctgagcagcaacctgaccggcggcatgcccttcatcgacgtgcccacccccatcagcagcgccagcagcgaggccgccagcgccgtggtgagccccagcaccgacagcggcctggagttcagcagccagaccaccagcaaggaggacctgaccgacctggagcagcccggcagccccggctacagcaccgccaccgagcccggcagcagcgagctgggcgtgcccgagcagcccgacctgcaggagggcacccacgtggagaagagccagagcgccagcgtggagagcatccccgaggtgctggaggagtgcaccagccccgccgaccacagcgacagcgccagcgtgcacgacatggactacgtgaaccccagaggcgtgagattcacccagagcagccagaaggagggcaccgccctggtgccctacggcctgccctgcatcagagagctgttcagattcctgatcagcctgaccaacccccacgacagacacaacagcgaggtgatgatccacatgggcctgcacctgctgaccgtggccctggagagcgcccccgtggcccagtgccagaccctgctgggcctgatcaaggacgagatgtgcagacacctgttccagctgctgagcatcgagagactgaacctgtacgccgccagcctgagagtgtgcttcctgctgttcgagagcatgagagagcacctgaagttccagatggagatgtacatcaagaagctgatggagatcatcaccgtggagaaccccaagatgccctacgagatgaaggagatggccctggaggccatcgtgcagctgtggagaatccccagcttcgtgaccgagctgtacatcaactacgactgcgactactactgcagcaacctgttcgaggagctgaccaagctgctgagcaagaacgccttccccgtgagcggccagctgtacaccacccacctgctgagcctggacgccctgctgaccgtgatcgacagcaccgaggcccactgccaggccaaggtgctgaacagcctgacccagcaggagaagaaggagaccgccagacccagctgcgagatcgtggacggcaccagagaggccagcaacaccgagagaaccgccagcgacggcaaggccgtgggcatggccagcgacatccccggcctgcacctgcccggcggcggcagactgccccccgagcacggcaagagcggctgcagcgacctggaggaggccgtggacagcggcgccgacaagaagttcgccagaaagccccccagattcagctgcctgctgcccgaccccagagagctgatcgagatcaagaacaagaagaagctgctgatcaccggcaccgagcagttcaaccagaagcccaagaagggcatccagttcctgcaggagaagggcctgctgaccatccccatggacaacaccgaggtggcccagtggctgagagagaaccccagactggacaagaagatgatcggcgagttcgtgagcgacagaaagaacatcgacctgctggagagcttcgtgagcaccttcagcttccagggcctgagactggacgaggccctgagactgtacctggaggccttcagactgcccggcgaggcccccgtgatccagagactgctggaggccttcaccgagagatggatgaactgcaacggcagccccttcgccaacagcgacgcctgcttcagcctggcctacgccgtgatcatgctgaacaccgaccagcacaaccacaacgtgagaaagcagaacgcccccatgaccctggaggagttcagaaagaacctgaagggcgtgaacggcggcaaggacttcgagcaggacatcctggaggacatgtaccacgccatcaagaacgaggagatcgtgatgcccgaggagcagaccggcctggtgagagagaactacgtgtggaacgtgctgctgcacagaggcgccacccccgagggcatcttcctgagagtgcccaccgccagctacgacctggacctgttcaccatgacctggggccccaccatcgccgccctgagctacgtgttcgacaagagcctggaggagaccatcatccagaaggccatcagcggcttcagaaagtgcgccatgatcagcgcccactacggcctgagcgacgtgttcgacaacctgatcatcagcctgtgcaagttcaccgccctgagcagcgagagcatcgagaacctgcccagcgtgttcggcagcaaccccaaggcccacatcgccgccaagaccgtgttccacctggcccacagacacggcgacatcctgagagagggctggaagaacatcatggaggccatgctgcagctgttcagagcccagctgctgcccaaggccatgatcgaggtggaggacttcgtggaccccaacggcaagatcagcctgcagagagaggagacccccagcaacagaggcgagagcaccgtgctgagcttcgtgagctggctgaccctgagcggccccgagcagagcagcgtgagaggccccagcaccgagaaccaggaggccaagagagtggccctggagtgcatcaagcagtgcgaccccgagaagatgatcaccgagagcaagttcctgcagctggagagcctgcaggagctgatgaaggccctggtgagcgtgacccccgacgaggagacctacgacgaggaggacgccgccttctgcctggagatgctgctgagaatcgtgctggagaacagagacagagtgggctgcgtgtggcagaccgtgagagaccacctgtaccacctgtgcgtgcaggcccaggacttctgcttcctggtggagagagccgtggtgggcctgctgagactggccatcagactgctgagaagagaggagatcagcgcccaggtgctgctgagcctgagaatcctgctgctgatgaagcccagcgtgctgagcagagtgagccaccaggtggcctacggcctgcacgagctgctgaagaccaacgccgccaacatccacagcggcgacgactgggccaccctgttcaccctgctggagtgcatcggcagcggcgtgaagccccccgccgccctgcaggccaccgccagagccgacgcccccgacgccggcgcccagagcgacagcgagctgcccagctaccaccagaacgacgtgagcctggacagaggctacaccagcgacagcgaggtgtacaccgaccacggcagacccggcaagatccacagaagcgccaccgacgccgacgtggtgaacagcggctggctggtggtgggcaaggacgacgtggacaacagcaagcccggccccagcagacccggccccagccccctgatcaaccagtacagcctgaccgtgggcctggacctgggcccccacgacaccaagagcctgctgaagtgcgtggagagcctgagcttcatcgtgagagacgccgcccacatcacccccgacaacttcgagctgtgcgtgaagaccctgagaatcttcgtggaggccagcctgaacggcggctgcaagagccaggagaagagaggcaagagccacaagtacgacagcaagggcaacagattcaagaagaagagcaaggagggcagcatgctgagaagacccagaaccagcagccagcacgccagcagaggcggccagagcgacgacgacgaggacgagggcgtgcccgccagctaccacaccgtgagcctgcaggtgagccaggacctgctggacctgatgcacaccctgcacaccagagccgccagcatctacagcagctgggccgaggagcagagacacctggagaccggcggccagaagatcgaggccgacagcagaaccctgtgggcccactgctggtgccccctgctgcagggcatcgcctgcctgtgctgcgacgccagaagacaggtgagaatgcaggccctgacctacctgcagagagccctgctggtgcacgacctgcagaagctggacgccctggagtgggagagctgcttcaacaaggtgctgttccccctgctgaccaagctgctggagaacatcagccccgccgacgtgggcggcatggaggagaccagaatgagagccagcaccctgctgagcaaggtgttcctgcagcacctgagccccctgctgagcctgagcaccttcgccgccctgtggctgaccatcctggacttcatggacaagtacatgcacgccggcagcagcgacctgctgagcgaggccatccccgagagcctgaagaacatgctgctggtgatggacaccgccgagatcttccacagcgccgacgccagaggcggcggccccagcgccctgtgggagatcacctgggagagaatcgactgcttcctgccccacctgagagacgagctgttcaagcagaccgtgatccaggaccccatgcccatggagccccagggccagaagcccctggccagcgcccacctgaccagcgccgccggcgacaccagaacccccggccacccccccccccccgagatccccagcgagctgggcgcctgcgacttcgagaagcccgagagccccagagccgccagcagcagcagccccggcagccccgtggccagcagccccagcagactgagccccacccccgacggccccccccccctggcccagccccccctgatcctgcagcccctggccagccccctgcaggtgggcgtgccccccatgaccctgcccatcatcctgaaccccgccctgatcgaggccaccagccccgtgcccctgctggccacccccagacccaccgaccccatccccaccagcgaggtgaactag

SEQ ID NO: 144170 - protein, 358 aa, Artificial Sequence
  derived and/or modified sequence
MMEKYEKIGKIGEGSYGVVFKCRNRDTGQIVAIKKFLESEDDPVIKKIALREIRMLKQLKHPNLVNLLEVFRRKRRLHLVFEYCDHTVLHELDRYQRGVPEHLVKSITWQTLQAVNFCHKHNCIHRDVKPENILITKHSVIKLCDFGFARLLTGPSDYYTDYVATRWYRSPELLVGDTQYGPPVDVWAIGCVFAELLSGVPLWPGKSDVDQLYLIRKTLGDLIPRHQQVFSTNQYFSGVKIPDPEDMEPLELKFPNISYPALGLLKGCLHMDPTQRLTCEQLLHHPYFENIREIEDLAKEHNKPTRKTLRKSRKHHCFTETSKLQYLPQLTGSSILPALDNKKYYCDTKKLNYRFPNI

SEQ ID NO: 144171 - DNA, 1077 bp, Artificial Sequence
  derived and/or modified sequence
atgatggagaagtacgagaagatcggcaagatcggcgagggcagctacggcgtggtgttcaagtgcagaaacagagacaccggccagatcgtggccatcaagaagttcctggagagcgaggacgaccccgtgatcaagaagatcgccctgagagagatcagaatgctgaagcagctgaagcaccccaacctggtgaacctgctggaggtgttcagaagaaagagaagactgcacctggtgttcgagtactgcgaccacaccgtgctgcacgagctggacagataccagagaggcgtgcccgagcacctggtgaagagcatcacctggcagaccctgcaggccgtgaacttctgccacaagcacaactgcatccacagagacgtgaagcccgagaacatcctgatcaccaagcacagcgtgatcaagctgtgcgacttcggcttcgccagactgctgaccggccccagcgactactacaccgactacgtggccaccagatggtacagaagccccgagctgctggtgggcgacacccagtacggcccccccgtggacgtgtgggccatcggctgcgtgttcgccgagctgctgagcggcgtgcccctgtggcccggcaagagcgacgtggaccagctgtacctgatcagaaagaccctgggcgacctgatccccagacaccagcaggtgttcagcaccaaccagtacttcagcggcgtgaagatccccgaccccgaggacatggagcccctggagctgaagttccccaacatcagctaccccgccctgggcctgctgaagggctgcctgcacatggaccccacccagagactgacctgcgagcagctgctgcaccacccctacttcgagaacatcagagagatcgaggacctggccaaggagcacaacaagcccaccagaaagaccctgagaaagagcagaaagcaccactgcttcaccgagaccagcaagctgcagtacctgccccagctgaccggcagcagcatcctgcccgccctggacaacaagaagtactactgcgacaccaagaagctgaactacagattccccaacatctag

SEQ ID NO: 144172 - DNA, 1587 bp, Artificial Sequence
  derived and/or modified sequence
gatccattttaagaagatttattcctctatgatggagaagtatgaaaaaattgggaaaattggagaaggatcctatggagttgttttcaaatgtagaaacagggacacgggtcagattgtggccatcaagaagtttctggaatcagaagatgaccctgtcataaagaaaattgcccttcgggaaatccgaatgctcaagcaactcaagcatcccaaccttgttaacctcctggaagtcttcaggaggaaacggaggcttcacctggtgtttgaatattgtgaccacacagttctccatgagttggacagataccaaagaggggtaccagaacatctcgtgaagagcataacttggcagacactgcaagctgtaaatttttgccataaacacaattgcatacatagagacgtgaagccagaaaatatcctcatcacgaaacattccgtgattaagctttgtgactttggatttgctcggcttttgactggaccgagtgactactatacagactacgtggctaccaggtggtaccgctcccctgagctgctggtgggggacacgcagtacggccccccggtggatgtttgggcaattggctgtgtctttgctgagctgctgtcaggagtgcctctgtggccaggaaaatcggatgtggatcagctgtatctgattaggaagaccttgggggatctcattcctaggcaccagcaagtgtttagcacgaatcagtacttcagtggagtgaaaattccagaccctgaagatatggaaccacttgaattaaaattcccaaacatctcttatcctgccctggggctcctaaagggctgtctccacatggaccctactcaaaggctgacatgtgaacagctgttgcatcacccatattttgaaaacatcagagaaatagaggatttggcaaaagaacacaacaaaccaacaaggaagaccctaagaaagagccgaaagcaccactgctttacagaaacatccaagttgcagtacctaccccagctaactggcagcagcatccttccagctttggataataagaagtactactgtgataccaagaaacttaactaccgttttccaaacatttaaaggagctaggagacatgattttaaaaaaggaatcaatagatgctttgaagaaaataaaacttatacagttgattgaaaacaattacaatgttgaaaacacaccaggagaaaacataagcaagaaactgggaggccaactggcaagatatgaagggaaattccagatccagtcttccatgcttgatgatggtgtccagaaaagaaaaaacctgtttggagttgcacttgtatttcagtttatgtaagtagccgaacttatggacagaatatgaactgtcccatacctctggcaaaactagatgatatcaaaaagatttatgcttcagttgtaccacatgccacacaagaaaaatgaaccacaaaatgcccatatatatttcctcggatctctgttgcctgagtcctatctcctgcctctcagattgtttcagcatcatatttaagatagttctatttcttgaaatcaaaatgtttaaaatccc

SEQ ID NO: 144173 - DNA, 1077 bp, Artificial Sequence
  derived and/or modified sequence
atgatggaaaaatacgagaaaattggcaaaataggggagggaagttatggcgtcgtgtttaaatgccgcaacagggataccggtcaaatagttgctatcaagaagttcctggaatcagaggacgatcctgttatcaagaagattgcacttagagagatcaggatgctcaagcaacttaagcatccaaatctggtaaacctgctggaggtcttccgccgcaagcggcgccttcacttggtattcgagtattgtgatcacaccgttctgcatgagctggaccggtaccaacgaggagtcccagagcatctggtgaaatccataacctggcagactctgcaggcggtgaatttctgtcacaagcacaactgtatccacagagatgtgaaaccggaaaacatcctgattaccaaacatagtgtgattaagctgtgcgacttcggctttgcaagactacttactggccctagtgattactacacggactatgtagctacgaggtggtacagaagtccagaattgcttgtgggcgacacacaatacgggcctccagtcgacgtctgggctatcggatgcgttttcgccgagctcctgagcggggtgcccttgtggcctggaaaaagtgacgtcgaccaactgtatctgattcgtaaaaccctgggggatctgattccccgccaccaacaggtatttagcacaaaccaatacttctcaggtgtcaaaatcccagacccggaggatatggagccgctggaattgaagtttcctaatattagttacccagccctcgggctgctgaagggatgcctgcacatggaccctacccagcgtcttacctgtgagcagctactgcaccatccctactttgagaacatacgcgagatagaagatttagctaaggagcacaacaagcctaccagaaaaacactgagaaaatcccgtaaacaccactgtttcaccgagacgtccaaactacaatacctgccacagcttaccgggagttctattctcccggcgctcgataataagaaatattactgcgatactaaaaagctcaattacagatttccaaacatttag

SEQ ID NO: 144174 - DNA, 1077 bp, Artificial Sequence
  derived and/or modified sequence
atgatggagaagtatgagaagattggcaagattggagagggcagctatggagtggtgttcaagtgcaggaacagagacaccggccagatcgtggccatcaagaagttcctggagagtgaagatgatcctgtgatcaagaagatcgccctgcgggagatccgcatgctgaagcagctgaagcaccccaacctggtgaacctgctggaggtgttccggaggaagaggcggctgcacctggtgtttgagtactgtgaccacacagtgctgcacgagctggaccgctaccagaggggcgtgcctgagcacctggtgaagagcatcacctggcagaccctgcaggccgtgaacttctgccacaagcacaactgcatccacagagatgtgaagccagagaacatcctgatcaccaagcacagcgtcatcaagctgtgtgactttggatttgcccggctgctgaccggccccagcgactactacacagattatgtggccacccgctggtaccgcagccctgagctgctggtgggggacacccagtatggcccccctgtggatgtgtgggccatcggctgtgtgtttgctgagctgctgagcggcgtgcccctgtggccaggcaagagtgatgtggaccagctgtacctgatcaggaagaccctgggggacctgatccccaggcaccagcaggtgttcagcaccaaccagtacttctctggagtgaagatcccagaccctgaggacatggagcccctggagctgaagttccccaacatctcctacccagccctgggcctgctgaagggctgcctgcacatggaccccacccagaggctgacctgtgagcagctgctgcaccacccctactttgagaacatccgggagattgaggacctggccaaggagcacaacaagcccaccaggaagaccctgaggaagagcaggaagcaccactgcttcacagagaccagcaagctgcagtacctgccccagctgaccggcagcagcatcctgcctgccctggacaacaagaagtactactgtgacaccaagaagctgaactaccgcttccccaacatctag

SEQ ID NO: 144175 - DNA, 1077 bp, Artificial Sequence
  derived and/or modified sequence
atgatggagaagtacgagaagatcggcaagatcggcgagggcagctatggcgtggtgttcaaatgcagaaatagggacacggggcagattgtcgcaataaagaaatttctggaatcagaagatgacccagtgattaagaaaatcgctctcagggaaatcagaatgttgaaacagctcaagcaccctaatctggtgaacctcctggaggtgtttcgcagaaagcgtcggctgcacctggtttttgaatattgcgatcatactgtcctccacgagttagataggtatcagagaggcgtccccgaacaccttgttaagtctatcacctggcagacattgcaagctgtgaacttctgtcacaagcataattgcatccacagggacgttaaacccgagaacattctgattactaagcactcagtcatcaaattatgcgacttcggtttcgctcgattgctgactggaccttccgactattacacggattatgtggcaactaggtggtaccgttcacctgaactgctggtcggagacacacagtatgggcccccagtggacgtgtgggccattggatgtgtctttgccgagctcctgagtggagtgccactttggccaggtaaatctgacgtggaccagttatacctgattagaaagacgctgggggatttgataccacgccaccagcaggtgttcagcaccaatcagtatttctctggagtgaagattcccgacccagaggacatggagcccctagagctaaagttcccgaacattagctaccccgctttaggcctcttgaagggatgcctccatatggaccctacgcagagactaacctgcgagcagctactgcaccacccatactttgagaacatccgggaaatcgaagatctggcaaaagagcacaataagccaacccgcaagaccctgcggaagtctcgcaagcatcactgtttcactgagacctctaagctccaatatctgccccagcttactggcagcagtatacttcccgcccttgataataagaaatattactgcgacacgaagaagctgaattatcgattccccaatatatag

SEQ ID NO: 144176 - DNA, 1077 bp, Artificial Sequence
  derived and/or modified sequence
atgatggagaaatatgagaagattggcaaaattggggaaggctcatacggtgtggtattcaaatgtaggaatagagacaccggtcagatcgttgccatcaagaaattcctcgagtccgaagatgacccggtgataaagaaaatcgcccttcgcgagatacggatgctaaagcagctgaagcacccaaaccttgtgaacttattagaagtctttagacggaagcgacgattacacttagtgttcgagtactgcgatcacaccgttctgcatgaacttgaccggtatcaacgcggagtgcccgagcatctggtgaaatctataacctggcagaccttgcaggccgtgaacttctgccacaagcacaactgcatccaccgcgatgtgaagccggaaaatatccttatcacaaagcactccgtgataaaactgtgtgactttggcttcgcaaggctgttgaccggcccatcggattattataccgattacgttgctactcgttggtacaggtcaccagaacttttggtgggggacacgcagtacgggccaccagtggatgtctgggccataggctgtgtgttcgctgagctcctctccggcgtgccgctgtggcccggaaagagcgacgtggaccagctctatctgattcggaagacactgggcgatctcatccctcgtcaccaacaggtcttttcaaccaaccagtatttttctggtgtcaagatacctgatcctgaggatatggagccattggagcttaagttccccaatatcagctatcctgccctgggtcttcttaaaggatgcctccatatggacccgactcagcgccttacatgcgaacagctcttgcatcacccatactttgagaatattcgggaaattgaagacctagcaaaggagcacaataagccaacaaggaagacactccggaaaagccgtaagcatcattgcttcaccgagacctccaagctacaatacttgcctcagctcaccggaagctctatacttcctgccctggacaataaaaaatattactgcgacaccaagaaacttaactatcgttttccaaatatctag

SEQ ID NO: 144177 - protein, 364 aa, Artificial Sequence
  derived and/or modified sequence
MQKWFSAFDDAIIQRQWRANPSRGGGGVSFTKEVDTNVATGAPPRRQRVPGRACPWREPIRGRRGARPGGGDAGGTPGETVRHCSAPEDPIFRFSSLHSYPFPGTIKSRDMSWKRHHLIPETFGVKRRRKRGPVESDPLRGEPGSARAAVSELMQLFPRGLFEDALPPIVLRSQVYSLVPDRTVADRQLKELQEQGEIRIVQLGFDLDAHGIIFTEDYRTRVLKACDGRPYAGAVQKFLASVLPACGDLSFQQDQMTQTFGFRDSEITHLVNAGVLTVRDAGSWWLAVPGAGRFIKYFVKGRQAVLSMVRKAKYRELLLSELLGRRAPVVVRLGLTYHVHDLIGAQLVDCISTTSGTLLRLPET

SEQ ID NO: 144178 - protein, 364 aa, Artificial Sequence
  derived and/or modified sequence
MQKWFSAFDDAIIQRQWRANPSRGGGGVSFTKEVDTNVATGAPPRRQRVPGRACPWREPIRGRRGARPGGGDAGGTPGETVRHCSAPEDPIFRFSSLHSYPFPGTIKSRDMSWKRHHLIPETFGVKRRRKRGPVESDPLRGEPGSARAAVSELMQLFPRGLFEDALPPIVLRSQVYSLVPDRTVADRQLKELQEQGEIRIVQLGFDLDAHGIIFTEDYRTRVLKACDGRPYAGAVQKFLASVLPACGDLSFQQDQMTQTFGFRDSEITHLVNAGVLTVRDAGSWWLAVPGAGRFIKYFVKGRQAVLGMVRKAKYRELLLSELLGRRAPVVVRLGLTYHVHDLIGAQLVDCISTTSGTLLRLPET

SEQ ID NO: 144179 - protein, 112 aa, Artificial Sequence
  derived and/or modified sequence
MQKWFSAFDDAIIQRQWRANPSRGGGGVSFTKEVDTNVATGAPPRRQRVPGRACPWREPIRGRRGARPGGGDAGGTPGETVRHCSAPEDPIFRFSSLHSYPFPGTIKSRDMS

SEQ ID NO: 144180 - protein, 321 aa, Artificial Sequence
  derived and/or modified sequence
MLVCASPPPLPALTGLRDDKLTLLSSSPGLGGTPGETVRHCSAPEDPIFRFSSLHSYPFPGTIKSRDMSWKRHHLIPETFGVKRRRKRGPVESDPLRGEPGSARAAVSELMQLFPRGLFEDALPPIVLRSQVYSLVPDRTVADRQLKELQEQGEIRIVQLGFDLDAHGIIFTEDYRTRVLKACDGRPYAGAVQKFLASVLPACGDLSFQQDQMTQTFGFRDSEITHLVNAGVLTVRDAGSWWLAVPGAGRFIKYFVKGRQAVLGMVRKAKYRELLLSELLGRRAPVVVRLGLTYHVHDLIGAQLVDCISTTSGTLLRLPET

SEQ ID NO: 144181 - protein, 321 aa, Artificial Sequence
  derived and/or modified sequence
MLVCASPPPLPALTGLRDDKLTLLSSSPGLGGTPGETVRHCSAPEDPIFRFSSLHSYPFPGTIKSRDMSWKRHHLIPETFGVKRRRKRGPVESDPLRGEPGSARAAVSELMQLFPRGLFEDALPPIVLRSQVYSLVPDRTVADRQLKELQEQGEIRIVQLGFDLDAHGIIFTEDYRTRVLKACDGRPYAGAVQKFLASVLPACGDLSFQQDQMTQTFGFRDSEITHLVNAGVLTVRDAGSWWLAVPGAGRFIKYFVKGRQAVLSMVRKAKYRELLLSELLGRRAPVVVRLGLTYHVHDLIGAQLVDCISTTSGTLLRLPET

SEQ ID NO: 144182 - DNA, 1095 bp, Artificial Sequence
  derived and/or modified sequence
atgcagaaatggtttagcgccttcgatgacgccattattcagagacagtggcgcgccaaccccagtcgggggggtggaggggtatccttcaccaaggaggtagacactaatgtcgcgacaggagcaccccccaggcgtcagcgtgtacccggacgcgcttgcccgtggagggaacctatcaggggccgtaggggcgctcgccctggcgggggtgatgcgggcgggacgccgggcgagaccgtgagacattgctctgcacccgaggatcccatctttcggttcagtagtttgcactcataccctttccccggcactatcaaatcccgagatatgtcctggaagcgacaccacttgattccagagacctttggtgttaagaggcggaggaagaggggacccgtggagtccgaccctctgcggggagaacccggctcggctagagccgccgtctccgaactgatgcagctgtttcctaggggactctttgaggacgcgcttccacctatcgtcctgaggtcccaagtttatagcttggtgcctgatcggacagtggccgatcgtcaactgaaagagttacaggagcagggcgaaattagaatagtgcagctgggcttcgatttggacgcccacggcattatcttcactgaggattatcgtacacgcgtgctcaaggcctgcgacggtcgaccctatgctggggctgtccagaagtttctcgccagtgtgctccctgcctgcggagatctgagttttcagcaggatcagatgacccagaccttcggatttcgcgatagtgagattacccacctggtcaatgcgggagtcctgacagtgagagacgctggctcgtggtggctcgctgtgccgggggcaggccgattcattaaatactttgtaaaagggcgccaggcagtgctctccatggttcgtaaggccaaatatcgggagctcctgctttcagaactcttggggaggagagcaccagtggtggtaaggctaggtctgacctaccacgtgcacgatttaatcggtgctcaattagtggattgtatctctacgacctccggaacacttctgcgcctcccagagacttag

SEQ ID NO: 144183 - DNA, 1095 bp, Artificial Sequence
  derived and/or modified sequence
atgcagaagtggttttcagcttttgacgatgccatcatccagcgacagtggagagccaatccttccagaggtggaggcggcgtgagcttcaccaaagaggtggatactaatgttgcgaccggtgcaccgcctcgcaggcaacgggtgcctgggagggcctgtccttggagggaacctatcagaggtaggcgcggcgccaggcccggcggaggcgacgccggcggcactccaggcgaaacagtccgtcactgtagtgcccctgaagatcctattttccgcttctcttccctccacagctaccccttcccaggtaccattaaatccagggatatgtcctggaaacgccaccaccttattcctgaaactttcggagtgaaaaggaggcggaaaagaggccctgtggaaagcgatccgctccgtggagagcctgggtcagctagagcggcggtgtccgaacttatgcagctttttccacgcggcctttttgaagacgcactgccaccgatcgtcctgcggagccaggtttacagtcttgttcccgaccgtacagtagctgaccgccagcttaaggagctccaggaacaaggggaaattcgaattgtgcagcttgggtttgacctggacgcacacggcatcatcttcactgaggattaccgcacaagggtgcttaaagcgtgcgatgggcgcccgtacgccggggcagtccagaaattcctggcctccgtcctgccagcgtgtggcgatctgtcatttcagcaggaccaaatgacccagacattcggctttcgagacagcgagattacccatcttgtcaacgccggagtgctgacggtcagggacgctggctcttggtggttagccgtcccaggggctggcagatttatcaagtatttcgttaaaggaaggcaggccgtgctgggcatggtgcgtaaggctaaatatagagagctgctattgagcgagctgcttgggaggagagcacccgtggtggtgagactgggtcttacctaccacgtccacgatctcatcggtgcccagctggtggactgcatttctaccaccagcggcacacttctccgattaccagagacatag

SEQ ID NO: 144184 - DNA, 1095 bp, Artificial Sequence
  derived and/or modified sequence
atgcagaagtggttcagcgcgttcgatgacgccatcattcaaaggcagtggcgcgctaatccctctaggggcggaggaggggtgagcttcaccaaggaggtggacacgaacgttgccacgggggcacctccgaggcgtcagagagtgcctggtagagcgtgtccttggagagagcccattagagggcgccgcggtgcccgtccaggtggtggcgatgctgggggaacccctggtgaaacagttaggcattgcagcgctccagaagatcctatttttcgattcagttcattgcacagctacccctttccaggtacaataaagagcagggatatgagctggaaacgccatcacctcatcccagagaccttcggtgttaaacgaaggaggaaaaggggccctgtggagagcgatcctctgcggggcgaacccggaagcgcgagagcagctgtttccgaactaatgcagctgttcccgcgaggcctgtttgaagatgcgctgccccccatcgtactgagaagtcaagtgtactctctggtgccagatcgaacggtcgccgacagacaactgaaggagctccaggagcagggggagattcggatcgtgcagcttggattcgacctggatgcgcacgggattatttttaccgaggactatcgcacacgcgtgctgaaggcatgcgatggacgaccctatgccggagctgtccagaagttcctcgcctccgtgttacccgcctgtggcgatctgtcctttcaacaggaccagatgacacaaaccttcggcttccgggattccgagatcacacatctggttaacgcgggcgtattgacagtgcgcgacgccggaagctggtggctggccgtgcctggggcaggtcgatttatcaaatacttcgtcaaaggccgacaggctgtactatctatggtgcgcaaggctaagtaccgggagctcctcctttctgaactattgggccggcgcgcccccgtggtggtgcgtcttgggctgacctaccacgtgcacgatctgatcggcgcacagcttgtagattgcattagcactaccagcggtactctcttgaggctccccgaaacttag

SEQ ID NO: 144185 - DNA, 1095 bp, Artificial Sequence
  derived and/or modified sequence
atgcagaaatggttctccgctttcgacgatgccattatacagagacagtggcgggcgaatcccagtagggggggaggaggagtctcatttactaaggaagtagatacaaatgttgccacaggtgctccaccgcggcgccagcgggtccccggaagagcctgtccctggcgcgagccaattcgcgggaggcggggcgcaaggcctgggggaggggacgctggggggacccccggggagaccgtgcggcattgttcagcaccagaagaccccatcttccgcttctctagtctgcacagttatccctttccaggtacaattaagagtcgagatatgtcctggaagagacatcatcttatccccgagacctttggcgttaagcggcggcggaagagaggtccagtcgagtccgatccacttcgtggtgaaccaggtagcgcccgcgctgcagtgtccgagctgatgcagctatttccgaggggtctgttcgaggacgcactcccacccattgtcctgcggtcgcaagtgtattctctggtgcctgatcgtacggttgcggacagacaactgaaggaattacaggaacagggggagatccggatcgtgcagctcgggttcgacctggacgcacatggcatcatcttcaccgaagactataggacgagagttctgaaagcctgtgacggccgcccctacgccggtgcagttcagaaattcctggcttcagtgttacccgcttgtggggatctgagttttcagcaggaccagatgactcagacattcggcttcagggacagcgagatcacccacctcgtgaatgctggcgtgctcactgtcagagatgcggggtcatggtggttggccgtgcctggagccgggaggtttataaagtactttgtaaaaggaaggcaggcagtcctcagcatggtgcgtaaagccaaatatcgggaactcttgctgtcagagctgctcgggcggagagcacctgtggtggttaggcttggattaacatatcacgtgcacgacttgatcggggcccagctcgtagattgcatttcaacaacaagcggaactttgcttaggctgcccgaaacatag

SEQ ID NO: 144186 - DNA, 1095 bp, Artificial Sequence
  derived and/or modified sequence
atgcagaagtggtttagcgctttcgatgatgcaattatccagagacagtggagagccaacccgtccaggggcggaggcggtgtgagcttcaccaaggaagtggacactaacgttgctactggggcgccgcctcggagacagagggtcccaggacgcgcatgcccttggcgagagcctatacgcggtaggcgtggagctcggccgggaggaggagacgctggcgggactcccggagagaccgtcaggcattgctctgctccggaggatccgatcttccggttttcatccctacactcatacccctttcctggtactatcaaaagtagagacatgtcctggaaacgacatcacttaatcccagaaacatttggggttaagcgacgccggaagcgcgggcctgtggagtccgaccccttgagaggggaacctggctctgcacgggcggctgtctccgagctcatgcagctttttccaagaggactcttcgaggacgctctgcctcccattgtccttcgatcccaggtgtactccttggtccctgacagaacggtggctgacaggcagcttaaagaactccaggaacagggtgaaattcgaatcgtccagctcgggttcgatctcgacgcccatggcattatattcactgaggattataggacgcgggtgctgaaggcatgtgacgggcggccatacgctggagccgtgcagaagttcttggcgtccgtgttaccggcctgtggagatctgagtttccaacaggaccagatgactcagacgttcggtttcagggactccgagatcacccatctcgttaatgctggagtgctaacagtacgggacgccggctcttggtggctggccgtaccaggagcggggagatttatcaaatactttgtgaagggaagacaagccgtcctgagcatggtgcgcaaggccaagtatagagagctgctgttaagcgagctgctgggacgccgcgcccctgttgtggtccgccttggtcttacctatcacgtccacgacctgattggcgctcagctggtggactgcatttccaccacaagcgggaccttactacgtctgccggagacttag

SEQ ID NO: 144187 - DNA, 1095 bp, Artificial Sequence
  derived and/or modified sequence
atgcagaagtggtttagcgcttttgacgacgctataatacagagacaatggagggccaatccctctaggggcggtggcggggtcagtttcactaaggaggttgacaccaatgtagccaccggtgcgccccctcggaggcagcgagtccccgggcgcgcctgtccctggcgggagcccatacgcggtcgcagaggggcccggccaggcggaggtgacgctggcgggaccccaggcgaaacagttcggcactgcagcgcccctgaggaccccattttcagattctcttctctgcatagctatccgttccctggaactatcaagtcccgagacatgtcttggaaaagacatcatctcatacccgagactttcggcgtgaaacgccgccgcaagcgaggccctgtcgaaagcgatccattacggggggagcctggctctgcccgtgccgctgtgtcagagctgatgcagctatttccaaggggattgtttgaggacgccctgcccccaatcgttcttaggtctcaagtgtactccctggtccccgaccggacagttgccgacaggcagctgaaggaattacaggagcagggtgaaattagaatcgtacagctcggatttgatctggatgcacacggaattatttttaccgaggattaccggacgcgcgttttaaaagcatgtgatggccggccttacgcgggcgccgtccagaaatttctcgcttcggttcttccagcctgtggtgacttgagtttccagcaagaccagatgactcaaacgtttgggtttagggacagtgaaattacgcatctcgtgaatgcgggcgtgctgacggttcgagacgccggatcttggtggctggctgtgccaggggcaggtaggtttataaagtacttcgtgaaggggcgtcaagccgtcttgtccatggtgcggaaggccaaatacagagagttgctgttgtctgagctgctgggccgtcgagcccctgtagtggtgcgattaggtctaacataccacgtacatgacctgattggtgctcaactggtggactgtatcagcacgacttcaggcacacttctgaggctgcctgagacttag

SEQ ID NO: 144188 - DNA, 339 bp, Artificial Sequence
  derived and/or modified sequence
atgcagaagtggttcagcgcttttgatgacgccatcatccagagacagtggcgggcaaacccctcgcgcggcggtggcggagtgtcctttacaaaagaggtggacactaacgtggcaacaggagcaccacctaggcggcagcgtgtccccgggcgggcttgtccctggagagaaccaatccgtggaagaaggggagcaaggcctgggggaggcgacgcgggcgggacacctggcgagacagtgcgccattgctctgcccccgaagacccgatcttcaggttcagttctttgcattcttaccccttccctggaactattaagtcacgcgatatgtcctag

SEQ ID NO: 144189 - DNA, 966 bp, Artificial Sequence
  derived and/or modified sequence
atgttggtatgtgctagtcctccccccttgcccgcgttgaccggcttaagggatgacaaactcacactactttccagctctcccgggctgggcggtaccccgggtgagactgttcggcattgctccgctcctgaggaccccatattccgattcagttccctccatagctacccttttccaggaactatcaaaagtagagatatgagctggaagcgacaccatttgattcccgagacatttggagtcaagaggcggcgaaagcggggccccgtggagtctgatccactacgaggcgaacctggttccgcccgagctgctgtgtcagagctgatgcagctgttcccccgggggctattcgaggacgccttgccgcctatcgtgttacggtctcaggtgtacagcttagtccccgacagaactgttgccgataggcagttaaaggagctccaggaacaaggcgaaatccggatcgtccagctggggtttgacctggatgcgcatggtatcatattcacggaagattatcgcacaagggtcctgaaagcttgtgacggcagaccctatgcaggggctgtgcaaaagtttctggcgtctgtcctgcccgcttgcggcgacctcagctttcagcaggaccagatgacacaaacatttgggttccgcgatagcgagatcacgcacttggtgaatgctggcgtcttaacagtgcgagacgccggtagctggtggttggccgttcccggtgccggtaggttcataaaatactttgttaaaggcagacaagcggtgctcgggatggtgcgaaaagctaaatatcgcgaactgcttctaagtgaactccttggcagaagagccccggtggtcgttagactcgggctcacataccacgtccatgacctcatcggagcccaattggtggactgcatttctaccacttccgggacactgctgagactcccagaaacatag

SEQ ID NO: 144190 - DNA, 966 bp, Artificial Sequence
  derived and/or modified sequence
atgttggtgtgtgccagtcctccaccattgcccgctctgacgggcttgcgagacgataaacttactctgttatcatcttcccctgggctgggcggaacccctggagagaccgtgcggcattgttcagctcctgaggatccgatctttagattctcttcactgcactcttacccattcccaggcacaataaagagtcgggacatgtcatggaaaagacaccacctcatccctgaaacctttggagtcaagcggcgaagaaagcgcgggcctgtcgagagtgacccactgcggggggagcctggctcggctcgcgccgcagtgagcgagttgatgcagctgttccctaggggattgttcgaggacgctctcccgcctatcgtgctgaggtcccaagtttacagtctcgtgccagacagaaccgtagccgatagacagctaaaggagctgcaggaacaaggagagatccggatcgtgcagctaggtttcgacctcgacgcacacggtattatatttacagaagactatcgcaccagggttttgaaggcctgcgacggccgaccctatgcgggcgccgtgcaaaaatttcttgcaagcgtccttccagcgtgcggtgacctgagctttcaacaagaccagatgacccagacgtttggctttcgggactccgaaattactcaccttgtgaacgctggagtcctgacagttcgtgacgctgggtcctggtggttggctgttcctggtgcaggaagatttataaagtattttgttaaagggagacaggccgtcctatctatggtgagaaaggcaaaataccgagagttgctgctctcagagctcctgggacgccgagccccggtggtggtgagactaggcttaacgtatcacgttcacgatcttatcggagcccaactggtggactgtatctcaaccacatcaggcacactgctccgtctcccagagacgtag

SEQ ID NO: 144191 - DNA, 966 bp, Artificial Sequence
  derived and/or modified sequence
atgcttgtgtgtgcctctcccccacctctgcccgccctcacaggtctgagggacgataagttgactctactgtcttctagtcccgggctgggaggaacccctggcgagacagtgcgccactgctcggcacccgaggacccaatctttcgtttttccagtctccactcctatccctttccgggtacaataaagagcagggacatgagctggaagagacatcacctgataccagaaacctttggcgtgaagcggcggcgaaaaagagggccggttgagtctgatccactgcggggagagcccgggtcagcccgcgcggcggttagtgagctcatgcagttattccctcggggtctgttcgaggacgctcttcctcctattgtcttacgaagtcaggtgtatagtttggtccccgacagaacagtcgcagaccgtcagcttaaggagctgcaggagcagggtgagattaggatcgtgcagttgggattcgatttagacgcgcatggcattatcttcaccgaggattatcgtacacgcgtgctgaaggcttgtgacggtcgtccgtacgctggagccgtacagaaattcctggcgtctgtgctgcctgcctgtggcgatctgagttttcaacaggaccagatgacccagaccttcggattcagggacagcgagatcactcacctagtgaatgcgggggtccttacagtgcgggacgccggtagctggtggctggccgtacccggcgccggacgttttattaaatattttgtcaaagggcgacaggctgttctatctatggtcaggaaagccaagtatcgggagctcttgctgtctgagctgctgggaagaagagcccccgttgtggtgcggttgggccttacctaccatgtgcacgacctgatcggagcgcagcttgtggattgtatttctactacctcgggcacactgctcaggttgcctgaaacctag

SEQ ID NO: 144192 - DNA, 966 bp, Artificial Sequence
  derived and/or modified sequence
atgctggtgtgtgccagtcctccccccctgccagcgctgacagggttgcgggatgacaagctgactctgctctcttccagtccaggtcttggaggaacacctggggagaccgtgagacattgttcagcccccgaagatcctatattccggttttcgtcgctgcactcttatcccttcccgggcactatcaaatcacgggatatgagctggaaaaggcaccacctcatcccagagacattcggtgtcaaacgtcggcgaaaacgcggccccgttgagtcagatcctctgcgcggcgagcccggcagcgccagggctgccgtctccgagctgatgcagctgtttccacggggacttttcgaagacgctctgccacctatagtattgcggtcccaggtgtactcacttgttcctgaccggaccgtcgctgaccgtcaacttaaagagcttcaagagcaaggtgagattagaatcgtgcaactgggcttcgatttggacgctcacggcatcatctttacggaggactaccgaacacgtgttcttaaggcttgtgacggcaggccttacgccggagctgtccagaagttcctagcctctgtgctgcctgcctgcggcgatctatctttccaacaagaccagatgacacagacgtttggtttccgcgattcggagatcactcatctggtcaacgccggagtcctgacagtgagagacgcaggttcctggtggctggcagtaccaggagccgggcggtttatcaaatatttcgttaaaggcaggcaagccgtactgtctatggtgcgaaaagccaaatatagagaactgctcctcagtgaactccttgggcggcgggccccagtcgtagtccgactgggccttacataccacgtgcatgacttgatcggagcgcaacttgtcgactgtatctccacaacgtctggaactttattgcgcctacccgagacatag

SEQ ID NO: 144193 - DNA, 966 bp, Artificial Sequence
  derived and/or modified sequence
atgctcgtttgcgcctcccctccgccgctacccgcccttacaggattgcgggatgacaagctgaccctgctgagctcaagccccgggctcgggggaacccctggggagactgtgcgccattgcagcgctcccgaagatcccatttttagattcagttcccttcatagttatccttttccgggaactatcaagagtcgcgatatgtcatggaaaagacaccatctgatacccgagacatttggtgttaaacggagaagaaaaagaggaccggtcgagtccgatcctctccgcggcgaaccagggagcgcccgcgccgccgtgagtgaactgatgcagctgttcccgaggggtttatttgaggatgcactccccccaatagtgcttaggagtcaggtatactcacttgtgcccgacagaaccgtagctgatcgacaattgaaggaactgcaggagcagggggagatccgcatcgtccagttaggattcgacctagatgcacatgggatcatattcaccgaagattataggactcgcgtcctgaaggcatgcgacggccgcccctatgccggcgccgtccagaaattcttggcgagcgtcctcccagcttgtggcgacctcagttttcaacaagaccagatgactcagacctttggctttcgggattcagagataacacatctcgtaaatgccggcgtcctgactgtccgcgacgctgggagttggtggctggctgtaccaggtgctggccgatttatcaaatattttgtgaagggtagacaggcagtgctcagcatggtaaggaaagctaagtatcgcgagctgctgttgtcagagctgttgggaagacgggctcccgtcgtagtccgcttaggcctcacctaccacgtccacgaccttattggtgctcagcttgtcgactgtatcagcactacgtcagggacattgttgcggttacccgagacctag

SEQ ID NO: 144194 - DNA, 1095 bp, Artificial Sequence
  derived and/or modified sequence
atgcagaagtggttcagcgcctttgatgatgccatcatccagaggcagtggagggccaaccccagccggggcggcggcggcgtgtccttcaccaaggaggtggacaccaacgtggccaccggggccccaccccggcggcagagggtgcccggccgggcctgcccctggagggagcccatccggggcagaagaggagcccggcctggaggaggagatgctgggggcaccccaggagagaccgtgcgccactgcagcgcccctgaggaccccatcttccgcttcagcagcctgcacagctaccccttccctggcaccatcaagagccgggacatgtcctggaagaggcaccacctgatccctgagacctttggagtgaagagaagaaggaagaggggccctgtggagagtgaccccctgcggggggagcccggcagcgcccgggctgctgtgtctgagctgatgcagctgttcccccggggcctgtttgaagatgccctgccccccatcgtgctgcggagccaggtgtacagcctggtgcctgacagaacagtggccgaccggcagctgaaggagctgcaggagcagggcgagatccgcatcgtgcagctgggctttgacctggatgcccacggcatcatcttcacagaggactaccgcaccagggtgctgaaggcctgtgatggccggccctatgctggagctgtgcagaagttcctggcctctgtgctgcctgcctgtggggacctgtccttccagcaggaccagatgacccagaccttcggcttccgggacagcgagatcacccacctggtgaatgccggcgtgctgactgtgagagatgctggctcctggtggctggccgtgcctggagctggccgcttcatcaagtactttgtgaagggccggcaggccgtgctgtccatggtgaggaaggccaagtaccgggagctgctgctgtctgagctgctgggcagaagagcccctgtggtggtgcggctgggcctgacctaccacgtgcatgacctgattggagcccagctggtggactgcatcagcaccaccagcggcaccctgctgcggctgcctgagacctag

SEQ ID NO: 144195 - DNA, 1095 bp, Artificial Sequence
  derived and/or modified sequence
atgcagaagtggttcagcgcctttgatgatgccatcatccagaggcagtggagggccaaccccagccggggcggcggcggcgtgtccttcaccaaggaggtggacaccaacgtggccaccggggccccaccccggcggcagagggtgcccggccgggcctgcccctggagggagcccatccggggcagaagaggagcccggcctggaggaggagatgctgggggcaccccaggagagaccgtgcgccactgcagcgcccctgaggaccccatcttccgcttcagcagcctgcacagctaccccttccctggcaccatcaagagccgggacatgtcctggaagaggcaccacctgatccctgagacctttggagtgaagagaagaaggaagaggggccctgtggagagtgaccccctgcggggggagcccggcagcgcccgggctgctgtgtctgagctgatgcagctgttcccccggggcctgtttgaagatgccctgccccccatcgtgctgcggagccaggtgtacagcctggtgcctgacagaacagtggccgaccggcagctgaaggagctgcaggagcagggcgagatccgcatcgtgcagctgggctttgacctggatgcccacggcatcatcttcacagaggactaccgcaccagggtgctgaaggcctgtgatggccggccctatgctggagctgtgcagaagttcctggcctctgtgctgcctgcctgtggggacctgtccttccagcaggaccagatgacccagaccttcggcttccgggacagcgagatcacccacctggtgaatgccggcgtgctgactgtgagagatgctggctcctggtggctggccgtgcctggagctggccgcttcatcaagtactttgtgaagggccggcaggccgtgctgggcatggtgaggaaggccaagtaccgggagctgctgctgtctgagctgctgggcagaagagcccctgtggtggtgcggctgggcctgacctaccacgtgcatgacctgattggagcccagctggtggactgcatcagcaccaccagcggcaccctgctgcggctgcctgagacctag

SEQ ID NO: 144196 - DNA, 339 bp, Artificial Sequence
  derived and/or modified sequence
atgcagaagtggttcagcgcctttgatgatgccatcatccagaggcagtggagggccaaccccagccggggcggcggcggcgtgtccttcaccaaggaggtggacaccaacgtggccaccggggccccaccccggcggcagagggtgcccggccgggcctgcccctggagggagcccatccggggcagaagaggagcccggcctggaggaggagatgctgggggcaccccaggagagaccgtgcgccactgcagcgcccctgaggaccccatcttccgcttcagcagcctgcacagctaccccttccctggcaccatcaagagccgggacatgtcctag

SEQ ID NO: 144197 - DNA, 966 bp, Artificial Sequence
  derived and/or modified sequence
atgctggtgtgtgccagccccccacccctgcctgccctgaccggcctgagagatgacaagctgaccctgctgagcagcagccctggcctgggcggcaccccaggagaaacagtgcgccactgcagcgcccctgaggaccccatcttccgcttcagcagcctgcacagctaccccttccctggcaccatcaagagccgggacatgtcctggaagaggcaccacctgatccctgagaccttcggcgtgaagagaagaaggaagaggggccctgtggagagtgaccccctgcggggggagcccggcagcgcccgggctgctgtgtctgagctgatgcagctgttcccccggggcctgtttgaagatgccctgccccccatcgtgctgcggagccaggtgtacagcctggtgcctgacagaacagtggccgaccggcagctgaaggagctgcaggagcagggcgagatcagaattgtgcagctgggctttgacctggatgcccacggcatcatcttcacagaggactaccgcaccagggtgctgaaggcctgtgatggccggccctatgctggagctgtgcagaagttcctggcctctgtgctgcctgcctgtggggacctgtccttccagcaggaccagatgacccagaccttcggcttccgggacagcgagatcacccacctggtgaatgctggggtgctgactgtgagagatgctggctcctggtggctggccgtgcctggggccggccgcttcatcaagtactttgtgaagggccggcaggccgtgctgggcatggtgaggaaggccaagtaccgggagctgctgctgtctgagctgctgggccggcgggcccctgtggtggtgcggctgggcctgacctaccacgtgcatgacctgattggagcccagctggtggactgcatcagcaccaccagcggcaccctgctgcggctgcctgagacctag

SEQ ID NO: 144198 - DNA, 966 bp, Artificial Sequence
  derived and/or modified sequence
atgctggtgtgtgccagccccccacccctgcctgccctgaccggcctgagagatgacaagctgaccctgctgagcagcagccctggcctgggcggcaccccaggagaaacagtgcgccactgcagcgcccctgaggaccccatcttccgcttcagcagcctgcacagctaccccttccctggcaccatcaagagccgggacatgtcctggaagaggcaccacctgatccctgagaccttcggcgtgaagagaagaaggaagaggggccctgtggagagtgaccccctgcggggggagcccggcagcgcccgggctgctgtgtctgagctgatgcagctgttcccccggggcctgtttgaagatgccctgccccccatcgtgctgcggagccaggtgtacagcctggtgcctgacagaacagtggccgaccggcagctgaaggagctgcaggagcagggcgagatcagaattgtgcagctgggctttgacctggatgcccacggcatcatcttcacagaggactaccgcaccagggtgctgaaggcctgtgatggccggccctatgctggagctgtgcagaagttcctggcctctgtgctgcctgcctgtggggacctgtccttccagcaggaccagatgacccagaccttcggcttccgggacagcgagatcacccacctggtgaatgctggggtgctgactgtgagagatgctggctcctggtggctggccgtgcctggggccggccgcttcatcaagtactttgtgaagggccggcaggccgtgctgtccatggtgaggaaggccaagtaccgggagctgctgctgtctgagctgctgggccggcgggcccctgtggtggtgcggctgggcctgacctaccacgtgcatgacctgattggagcccagctggtggactgcatcagcaccaccagcggcaccctgctgcggctgcctgagacctag

SEQ ID NO: 144199 - DNA, 1095 bp, Artificial Sequence
  derived and/or modified sequence
atgcagaagtggttcagcgccttcgacgacgccatcatccagcggcagtggcgggcaaaccccagccgggggggcggcggcgtttctttcactaaagaggtggatacaaacgttgccactggcgccccaccccgtcgccagcgtgtaccaggacgggcctgtccctggagggaaccaattcggggtcgccgcggcgctaggccaggcggaggggacgctggcggcactccgggcgaaaccgttcgacattgctccgcacctgaggatccaatctttcggttttcctctctccacagttatccatttcctggtacgatcaagtcccgtgacatgtcgtggaagagacatcatctgatccccgaaacattcggtgtgaaaagacgtcgcaaaaggggtccagtggaatctgatcctctgcggggagagccaggctccgcaagagcagcagtatcggagttaatgcagctctttcccaggggcctcttcgaggatgctttgccgcctatcgttctgcgctcacaagtgtatagcctggtaccggacaggacggttgctgaccgacagctaaaggaactccaagagcagggtgagatccgaatcgttcagctcggattcgacctggacgctcatgggatcatttttacagaggactacagaactcgcgtgcttaaagcatgtgacggcagaccttatgctggagcagtacagaaatttttagcctccgtgttacccgcatgcggcgatttgtcgtttcaacaggaccaaatgacgcagacctttgggtttagagactccgaaattacacacttggtcaatgccggagtcctcaccgttagagatgccggcagctggtggctcgctgtgcccggcgccgggcgatttataaagtattttgtgaaggggagacaggccgtcctgagcatggtgagaaaagccaagtaccgtgagctgcttttatctgagctgttaggacgccgtgcacctgtggtggtgcggctggggcttacctatcatgtgcacgacctgatcggcgcacagctggtggattgtatctccacgacatcaggaaccctactgcggcttcccgagacatag

SEQ ID NO: 144200 - DNA, 1095 bp, Artificial Sequence
  derived and/or modified sequence
atgcagaagtggttcagcgccttcgacgacgccatcatccagcggcagtggcgcgccaatccctcacgcggaggtggcggtgtatcatttacgaaggaagtggacacaaatgtggcaacaggtgcacctccccgccgccagagagttcccggccgcgcctgtccttggcgagagccaatccgcggtaggcgcggtgcccgccctggggggggcgacgcaggagggaccccgggtgaaactgtgcggcactgctccgcccctgaggaccccatcttcagatttagcagcttgcactcttacccttttcccgggacaattaaatcaagagacatgagttggaaacgccatcatctaattccagagacattcggagtcaagaggagacgcaagagaggccccgtcgagagcgatcctcttagaggagagcccgggagcgcgcgggccgcggtatcagaactcatgcaattatttccaaggggtctcttcgaagatgcacttcccccaattgtgctcagaagccaggtctattccttggtgcctgaccgtactgtggccgataggcagctgaaggaactgcaagagcagggcgaaatcaggatcgttcagctaggatttgatctagacgctcacgggataatctttaccgaagactatagaacgcgtgtgctgaaagcttgtgatgggcggccctatgccggggccgtccaaaaattcttagcaagcgttcttccagcttgcggcgacctatcattccaacaggaccagatgacacagacgtttgggttccgagattcagagattactcatttggtaaacgcaggagttctgacagttagggacgcaggctcgtggtggctcgccgtcccaggcgcgggtcgcttcatcaaatatttcgtaaaagggagacaggcagtattggggatggtgcggaaagctaaataccgcgagcttttgctttccgagctgctgggtcgccgcgcacccgtcgtcgtacgactgggcctgacgtaccatgtgcacgatctgataggagcccagcttgtggattgcatcagcaccacctcgggtaccttgctcagactaccagagacttag

SEQ ID NO: 144201 - DNA, 1095 bp, Artificial Sequence
  derived and/or modified sequence
atgcagaagtggttcagcgccttcgacgacgccatcatccagcggcaatggagggccaacccttctcgcggcgggggcggggtgagcttcactaaggaggtagacaccaacgtcgccactggtgctcccccaaggcgccaacgggtgccaggacgcgcttgcccttggcgagaacctatccggggaaggcgtggagctcgccctgggggcggcgacgcaggcggtaccccaggcgagaccgtacgacattgcagtgctcccgaagatccaatctttaggttcagctctctacactcttatccattccccgggactatcaaaagtagggatatgagctggaagcggcaccatcttattccagagacatttggcgtcaaacgaaggcgcaaaagggggcctgtcgaatccgatcccctcaggggagagcccggatccgccagagctgctgtcagtgagctgatgcagcttttcccacgcgggctgttcgaagacgctctgccccccatcgtcctgaggagccaagtgtacagcctcgtgcccgaccggacagtggctgatagacagctgaaggaactgcaggaacagggggagattcgcatcgtccagctgggctttgacctcgacgctcatgggatcattttcaccgaggactacagaacacgtgttctcaaggcctgtgacgggcgcccttatgccggggctgtccagaaattcttagcctcggtattgccagcttgcggcgacctttcattccaacaggatcagatgacacaaacttttggtttccgggattctgaaataactcacctggtgaatgctggcgttcttacggttagagacgcagggtcctggtggctcgctgtgccgggagctggaagattcatcaagtattttgtgaaggggcggcaggccgtcctgtcgatggtgaggaaagccaaataccgcgagcttctcttaagtgaactcctcggcaggcgcgccccagtggtggttcggctcgggctcacgtaccacgtgcatgacctgatcggcgcacaattagtggactgcatttccactacttccggcacccttttgagacttccggagacctag

SEQ ID NO: 144202 - DNA, 1095 bp, Artificial Sequence
  derived and/or modified sequence
atgcagaagtggttcagcgccttcgacgacgccatcatccagcggcagtggagggctaaccctagccgcggcggaggcggcgtctcctttacaaaggaggtagacacaaacgtggctactggggccccccccagacgccagagagtgcctggaagggcatgtccatggcgagagccaatccggggaaggcggggcgcacgccctggtgggggagatgccggcggcactccaggagagaccgtgagacattgtagcgcccctgaggaccccattttccgtttcagttcccttcactcctaccccttcccaggtacaattaagtcgcgggacatgtcttggaaacgacaccacctcatccccgagacgtttggcgtcaagcggaggcgtaagcgtgggcccgtagaaagtgaccctctcaggggcgagccaggctccgctcgcgcggccgtgagcgaattaatgcagctctttccaaggggcctgttcgaagatgccttgccccctattgtcctccggagtcaggtctacagcttggtacccgaccggactgtggcggacaggcagctgaaggaactccaggagcagggcgagatcagaatagttcagctgggtttcgacctggacgctcatggaattatttttacagaggattaccgcacgcgagtccttaaggcatgcgacggacggccctacgccggcgccgtccagaagtttttggcctccgtcctgcccgcctgcggtgatctttcttttcagcaagatcaaatgacacaaacgtttggattcagagacagtgaaattacacatctcgtcaacgctggtgttctcaccgttagagacgcggggagctggtggctggccgtgcctggggccgggaggtttataaaatacttcgttaaggggagacaggcagtgctatccatggtccgcaaagccaagtacagggagctgttactgtccgagttgctgggacgtcgagctcctgtggtcgtaagattgggactaacctatcacgtgcatgacctcataggagctcagcttgttgactgcatcagtactacatctggaactctcctgagactgcccgaaacgtag

SEQ ID NO: 144203 - DNA, 1095 bp, Artificial Sequence
  derived and/or modified sequence
atgcagaagtggttcagcgccttcgacgacgccatcatccagcggcagtggagagctaaccctagtaggggcgggggtggcgtatccttcaccaaagaggtcgacactaacgtggccacaggcgctcctccccgcaggcagagggtgccagggagagcttgcccttggagggaaccaattcgcggccgtcggggcgccagacctggcggtggagatgccggcggtacacctggcgagaccgtcagacactgctccgcccctgaagatcctatcttccgcttcagcagcctccacagttatccattccccggcacgatcaagagtagggacatgagctggaaacgacaccacctcattccagagacctttggtgtcaaacgccggcgcaaaagaggcccagtcgaatcggaccccctacgcggggagcctggttccgcccgagcggcggtgagcgagttgatgcagctgttcccaagaggattattcgaggacgccctcccgcctatagtcctgagatcacaagtgtactccctcgtgcccgacagaacagtcgccgaccgtcagctgaaggagcttcaagagcaaggggaaattcgtatcgtccaactgggcttcgatctcgacgcgcatggtatcatattcacagaagattataggaccagagttttgaaggcgtgtgacggtaggccctacgctggcgctgtgcagaagtttttagcctcagtgttgccggcttgcggggatttatcttttcagcaagaccaaatgacacaaaccttcggcttccgggacagtgagattacccacttagtgaacgccggagtgctgacggtccgcgacgctgggagctggtggttagccgtccctggcgcaggaaggttcatcaagtatttcgtgaagggccgccaagcggtcctatctatggtgaggaaggccaagtatagagagctattgctttccgagttactgggcaggagggcgccagtggtagtccggctagggctgacctaccatgttcatgatctcatcggcgcgcagcttgttgactgtatctctaccacatctggaactctgctgcgcctgcctgagacctag

SEQ ID NO: 144204 - DNA, 1095 bp, Artificial Sequence
  derived and/or modified sequence
atgcagaagtggttcagcgccttcgacgacgccatcatccagcggcagtggcgggccaacccctcaagagggggagggggcgtctccttcacaaaagaggtggataccaacgtggcgaccggtgccccccctaggagacagagggtgcccggcagggcctgcccctggcgcgaacccataaggggccgcaggggagcacgacccgggggcggcgatgccggtgggaccccaggagaaactgtccgtcattgcagcgcgccggaggatcccattttccgcttcagctctctgcatagctacccctttcccggcactataaagagccgagacatgtcctggaaaaggcaccacttaattccagagaccttcggagtgaagcggagaaggaaacgtggacccgtcgaaagcgacccattgcgaggtgaacctgggtctgctagggccgccgtctcagaactgatgcaactgtttcctcggggtttgttcgaggacgcgctgcctccaatcgtgcttcggtcgcaggtctactccttggtgcctgacagaacggtcgctgaccgacagctcaaagaactgcaagaacagggagagatcagaatcgtacagttgggatttgatttggacgcccacgggatcatatttaccgaagattacagaacacgcgtgctcaaagcttgtgatggccgtccatatgccggcgccgtccagaaattcctagcctccgtgttgcctgcttgcggggacttgtccttccagcaagaccagatgacccagacttttgggtttcgggattccgaaattacacacttggtcaacgctggcgtgctgaccgtccgggatgctggcagttggtggctcgccgtgccaggcgcagggagattcatcaagtattttgtgaagggccgtcaagctgtccttagtatggtaaggaaagccaagtaccgcgaacttcttctctccgagctgctcggccgacgcgcgccagtggtcgttcggctgggcctgacttatcatgtacacgatctaataggcgctcagcttgtggactgcatatccacaacatcaggaacacttttacgattgcctgagacatag

SEQ ID NO: 144205 - DNA, 339 bp, Artificial Sequence
  derived and/or modified sequence
atgcagaagtggttcagcgccttcgacgacgccatcatccagcggcagtggagagccaacccttccaggggcggcggaggtgtgtcattcaccaaagaagttgataccaatgtggccacgggggctcctcctcgacgccagagagtcccgggcagagcttgcccttggcgggagcccattcgaggacgtagaggagcccggcccggaggcggcgatgcagggggaacgcccggagagacagtacgccattgttccgcgcctgaggatcctatcttccgtttttcttctctgcactcctatccttttccaggtaccatcaaatccagagacatgagctag

SEQ ID NO: 144206 - DNA, 966 bp, Artificial Sequence
  derived and/or modified sequence
atgctggtgtgcgccagccccccccccctgcccgccctgaccggcttgcgggacgataagctaacccttttgagttcttcaccaggactcggcggcactcctggggagactgtgcgccactgcagcgctccagaggatccaatcttccgatttagcagcctgcatagctatcctttccctggcacaattaagtctcgagatatgtcttggaagagacaccatcttattcctgagactttcggtgtaaaaagacggcgcaaacgcgggccggtggaaagtgatccactcagaggagaaccagggtccgctagggcggccgtcagcgagttaatgcagctctttccgcgtgggttgtttgaggatgcactgccacccattgtgctgaggagccaggtctactctctagtgcctgatcggaccgtcgccgacagacagctgaaggagctccaggaacagggcgagatcaggatcgtgcagctgggctttgacttagacgcccacgggattatttttactgaagactaccgcaccagagtcctcaaggcctgtgatgggagaccatacgcaggcgccgtccagaagttcctagcctccgtgctgcccgcctgcggcgatttgtcgtttcagcaggatcagatgactcagacatttgggttccgagattctgaaattactcacctcgtgaatgcgggagtactgactgtcagggacgccggctcctggtggttggctgtgcctggcgcgggacgatttataaaatacttcgtgaagggcaggcaagcggtgctcggtatggtgcggaaggcaaaatacagagagctcttgctctcagaacttttgggcagacgagctcctgtggtagtacgactgggcctgacctaccatgtacacgatctgattggagcccagttggtcgactgcatttctaccaccagtggcaccctcctccgactccccgagacgtag

SEQ ID NO: 144207 - DNA, 966 bp, Artificial Sequence
  derived and/or modified sequence
atgctggtgtgcgccagccccccccccctgcccgccctgaccggcctgcgcgatgataaattaactctgctaagttcctcaccaggcctcggcgggacacctggcgagacagtgcgccactgcagcgcaccggaggatcccatctttaggttcagcagcttgcattcttatccctttccagggaccattaagagtagggatatgtcttggaagaggcatcatctgatcccagagactttcggcgtgaaaaggaggcgaaagcgaggacctgttgagagtgaccctctgaggggagagccgggctcggcccgtgcggcagtgtcagaactgatgcagctgttccccagaggccttttcgaagacgctctgccaccgattgtcctgcggagtcaggtatatagcctggttccagaccgtaccgtggcagaccgacaactgaaagagctgcaagaacaaggcgaaattaggattgtccaactaggttttgacctggacgcccacgggatcatttttacagaggactatagaactcgcgtactgaaagcctgtgacggacgcccatatgcaggcgccgtgcaaaagttccttgccagtgtgctgcccgcatgtggtgatctcagtttccagcaggaccagatgacacagacttttggttttagggactccgaaatcacacatctggtcaatgctggcgtcctcactgtccgcgacgccggctcctggtggctggccgtgcctggagctggccgtttcatcaagtattttgtcaaaggcaggcaagccgtgctctctatggtgcgtaaggcaaaatatagagagctcctgctgtccgaattgttaggcagaagagcccccgttgtggtgcgcttaggcctaacataccacgtgcatgaccttattggggctcaacttgtagattgcattagtacaacaagcgggaccctgctgaggctcccggagacttag

SEQ ID NO: 144208 - DNA, 966 bp, Artificial Sequence
  derived and/or modified sequence
atgctggtgtgcgccagccccccccccctgcccgccctgaccggcctgcgggacgataagctgaccctgttaagctcaagccctggactggggggtacccctggggagactgtcaggcattgctcagccccagaggacccaatttttagattttccagccttcatagttacccatttccgggtaccattaagagtagagatatgtcatggaagcgccaccatctgatccctgagacctttggcgttaagagaaggcgcaagcgcgggcctgtggagagtgaccccctgagaggtgagcctgggagcgctagagctgccgtgagcgagctcatgcagctctttccaagggggttattcgaagacgccctgccacccatcgttttacgaagccaggtctacagtttggtgcctgatcgaaccgtagcagacaggcaactaaaagagctccaggagcagggagagatccgaatcgttcagctcggtttcgaccttgacgcccacggaatcatctttacggaagactatcgcactcgggtcctgaaagcctgcgatggtcgtccgtacgccggagcagtgcagaagttcctcgcatcggttctgcctgcctgcggagatctcagtttccagcaagatcagatgacgcagacttttggattccgggactccgaaataacccatctggtgaacgcaggagtcctcacagtacgcgatgccgggagttggtggctcgcagtgcccggagctgggaggttcatcaagtatttcgtcaagggccgacaggccgtgctgagcatggtgcgaaaagccaaataccgcgagctgttgttatctgaactactcggtagaagggccccagtggtggtccgactgggtctgacatatcatgtgcatgatcttatcggagcccagctagtcgactgcatctccacgactagcggcaccttattacgcctcccagaaacttag

SEQ ID NO: 144209 - DNA, 966 bp, Artificial Sequence
  derived and/or modified sequence
atgctggtgtgcgccagccccccccccctgcccgccctgaccggcctgagagatgataagctgacactcctgtctagttctcccgggctgggcggcacaccaggcgaaacagttcggcactgtagtgcgccagaggaccctatcttccgattcagctctcttcattcctatccctttcctggaactattaagagtcgagacatgtcgtggaaacgccaccatcttattcccgagacgttcggcgtgaaacggcgcagaaagcgcgggcccgtggagagtgaccccctgcggggcgaacccggtagcgcccgtgcggccgtgagtgagctcatgcagctttttccccggggactgtttgaggacgctttaccccccatcgtgctgcgctctcaggtttactcattagttcccgatagaacagttgcggaccggcagctgaaggagctccaagagcagggggaaattcggatagttcaacttggtttcgacctggacgcccatgggatcatctttaccgaggattaccgcaccagggtgctgaaggcttgcgatgggcggccatatgccggagccgtgcagaagttcctcgcttcagtgctccccgcatgcggagacctgagctttcagcaggaccagatgacccagacttttgggttcagggactcggaaataacacatctcgtcaacgctggagtgctgactgttcgagatgcaggaagttggtggctggctgtgccaggagccggtcggtttataaagtattttgtgaaaggtcgccaagccgtgttgagtatggtaaggaaagctaagtacagggaactgctgctgtctgaattgttagggcggagagcccccgtagtggttcgactgggcctcacctaccatgtgcacgatcttattggagcgcaattagttgactgcattagcactacctctgggactctactccgactgcctgagacttag

SEQ ID NO: 144210 - DNA, 966 bp, Artificial Sequence
  derived and/or modified sequence
atgctggtgtgcgccagccccccccccctgcccgccctgaccggcctcagagacgataagttgaccttactgagctcatctcctggcttgggtggaacacctggggagacagtccgacattgtagtgcacccgaggatcccatctttcgcttttcatccctgcattcttaccctttccctgggacgatcaagtcaagagatatgagctggaaaaggcaccatctgattccagagacattcggcgtgaagaggcggagaaagcgggggccagtcgaatcagaccctctccgaggcgaacccgggagtgcgcgggctgcagtttctgaattgatgcaactgttccctcgcggcttattcgaggacgcactaccaccaatcgtgctgaggtcccaagtgtactctttggtgcctgaccggaccgttgcagaccgccaactgaaggaactgcaggaacagggggagatcagaatcgtacagctgggattcgatctggatgcccacggcatcatattcacagaagattaccggactagggtgttgaaggcctgcgacggcaggccctacgccggggctgtgcagaaattccttgcgagcgtgttaccagcatgcggtgatctatcctttcaacaggatcagatgactcagacatttggctttagagatagcgaaataacacacctggtcaatgctggcgtattaacagtcagagatgcgggatcttggtggttggcggtgccaggtgctggccgctttattaagtacttcgtcaagggccgtcaggccgttctcagcatggtgcgaaaggccaagtaccgtgaactgctcctcagcgaactcctggggcgtcgggccccagttgtggttcgcctgggactgacctatcacgtccacgacctgatcggcgcccagttggttgactgtattagtacaacctctggaacactgttgcgccttccagaaacttag

SEQ ID NO: 144211 - DNA, 1095 bp, Artificial Sequence
  derived and/or modified sequence
atgcagaagtggttctccgcattcgacgatgctatcatccagcgacagtggagggctaacccttctcgtggagggggtggcgtatccttcacaaaggaggtcgatactaacgtcgccactggtgcccctccacggagacaaagggtcccgggacgggcatgcccatggagggaacccatccgcggacggaggggcgctcgccctggcggtggcgacgccggagggacgccgggtgaaactgtacgacattgttctgcaccagaagatcctatttttaggttcagctcacttcactcctatccttttcctggaactattaagtctagagatatgtcatggaaacggcatcacctcatcccagaaaccttcggggtcaaaaggcgacgcaagcgagggcctgttgaaagtgaccccctaaggggggagcctggatctgcccgagctgcagtctctgaacttatgcagctgtttcctcggggtttgttcgaagacgcactgccaccaatcgtcctcagatctcaggtctactctctcgttccagaccgcacagtggcagacaggcaactcaaggagctgcaggagcaaggggagatcagaatcgtgcaactgggcttcgacctcgatgcgcacggaatcatttttacagaggattatcggactcgcgtgctcaaggcctgcgacgggagaccctatgcgggagcagtgcagaagttcctggccagcgtgttgccagcgtgtggcgatctgtcctttcaacaagaccagatgacgcagacattcgggttccgggactctgagatcacgcacttggttaatgcaggggtcctcacggtgcgagatgctggcagctggtggctagccgtccccggtgcgggtcggttcatcaagtactttgtaaagggtcgccaggccgttctgagcatggtcagaaaggccaagtacagagaactcctgctgtcggaactgctggggcgaagagcacctgtcgtggttaggctgggcctgacataccatgtacatgatctgattggcgcacagctagtggactgcatctcaactacaagcggaaccctgctccgtcttccggaaacatag

SEQ ID NO: 144212 - DNA, 1095 bp, Artificial Sequence
  derived and/or modified sequence
atgcagaagtggttcagcgccttcgacgatgccataatccagcgccaatggcgtgccaatcccagtagagggggaggaggagtgtcattcacaaaggaggtggacacaaatgttgcgactggcgctccccctaggagacaaagggtgccagggagagcctgcccgtggagggaaccaatccggggaagaagaggcgctaggcccggtggtggggacgccggagggactcctggagaaacagtgagacattgcagcgctcctgaagatcccatctttaggttcagctcactgcactcgtaccctttcccagggactattaagagtcgagatatgtcctggaaacgccaccatttgatccccgaaacctttggtgttaaacggcgtcgcaagaggggccctgttgagagcgaccctcttagaggcgagccaggatccgccagagctgcagtgtccgagctgatgcagttgttcccacggggactgtttgaagatgcgctaccgcctatagtgttacgctcccaggtgtacagccttgtgcctgatcgcacggtggcagaccgtcaattaaaggagctgcaagagcagggcgagataaggattgtccagctgggcttcgatttggacgcccacggaattatcttcactgaggactatcgtacccgcgtgctaaaggcctgcgatggtagaccttatgccggagcagtgcagaaatttctggccagcgtcctgccggcttgtggtgacctgtcattccagcaggaccaaatgacgcaaacgttcggcttcagagatagtgaaatcactcatctcgttaacgcgggagtgctcactgtaagagacgccggtagttggtggctggctgtgcccggagccggtcgcttcatcaaatattttgttaagggacgccaggccgtgttaggcatggtgagaaaagcaaagtaccgcgagcttctgctgagcgagctgttgggaagaagagcaccagtggtggtgcgcctcggactgacctaccatgtgcacgaccttatcggagcccagctcgtggattgcattagtacaactagcgggacactactgagactgcctgaaacatag

SEQ ID NO: 144213 - DNA, 1095 bp, Artificial Sequence
  derived and/or modified sequence
atgcagaaatggttctcggctttcgatgacgcaataattcaacgtcagtggagggctaatccttcaaggggcggaggaggcgtgtcgtttacgaaggaggtcgatacaaatgtcgcgacaggcgcacccccaaggcgccagcgagttcccggtagggcctgtccctggcgtgaaccgattcgcggacgtcgaggggcacggccaggcggaggagacgctgggggaacacccggagagactgtaaggcattgctctgcccctgaggacccgatctttaggttttccagtcttcatagttacccatttccaggtaccatcaaaagtcgagatatgagctggaagcgccaccacctcatcccagaaacctttggtgtaaaacgtagacgcaagaggggccctgtggaatcggacccattgcgcggtgagcctggatccgcgagagccgctgtgtctgaactgatgcagctgtttccaaggggcctgttcgaagatgccctgccccctattgttctgcgcagccaggtctatagcctcgtacctgatcgcacagttgcggacagacagttgaaggagctccaggaacagggcgaaatacgcattgtgcaactcggattcgacctagacgcgcacgggatcatcttcaccgaggactacaggactcgcgttctcaaagcttgcgatggacgcccttacgctggagctgtgcagaaatttctggccagcgtacttcctgcatgcggggacttgagttttcagcaggatcagatgactcaaacctttgggttccgcgactcagagataactcacctggttaatgccggagtactgactgtccgcgacgccggttcctggtggttggccgtgccaggagccggaaggtttattaagtattttgtgaaaggccgacaggctgtgctgtctatggtcagaaaagccaaatacagagaacttctcctgagcgaactgcttggcagacgtgctccagtcgtagtccggctgggcctgacctatcatgtgcacgatctgatcggcgctcagttggtggattgtattagcacaacatcaggcaccctcctccggctccccgagacctag

SEQ ID NO: 144214 - DNA, 1095 bp, Artificial Sequence
  derived and/or modified sequence
atgcagaagtggtttagcgcattcgatgatgcaattattcaacgacagtggcgggcaaaccctagtcggggtgggggtggtgtgtcttttaccaaggaggtggacaccaatgtagcgaccggcgcaccacccaggagacaaagagtgcccggacgggcttgtccatggcgggagcctataagaggaagaaggggcgcacggcctggcggaggcgatgccggagggacccccggtgaaaccgtgcgacactgcagtgcccctgaagaccccatctttcgctttagctccctgcactcataccctttccctgggacgatcaaatcccgggatatgagctggaaaagacaccatctcattccagagacattcggcgtcaagcggcgaagaaagagaggtcctgtcgagagcgacccactcaggggcgagcctggtagtgccagggctgccgtatctgagcttatgcagctcttccccagagggctattcgaggatgcgctgcccccaatcgtgctacgctcccaggtttactctctggttccagatcgcaccgtggctgacaggcagctgaaggagttgcaggagcaaggggagatccggatcgttcaacttggctttgatctcgacgcccacgggatcatcttcaccgaagactatcgaactcgagtactgaaggcatgtgacggcagaccctatgcgggagcagttcagaagtttctagcatcggttttgcctgcttgtggggatttgagttttcaacaggaccagatgactcagacctttgggttcagagactcagaaatcactcatcttgtgaacgcaggggtgcttacggtgcgcgacgccggttcatggtggcttgcggtgcccggagcgggacgctttatcaagtatttcgttaaagggagacaggccgttctcagtatggtacggaaggctaagtatagagaattgcttttgtcggaattgttaggaagaagagcaccggtcgtcgtccgcttaggcctcacttaccatgtgcatgatcttatcggtgcccagctcgtagactgcatctcgactactagcggaaccttgctgcgtttacctgagacatag

SEQ ID NO: 144215 - DNA, 1095 bp, Artificial Sequence
  derived and/or modified sequence
atgcaaaaatggttcagtgcgttcgatgatgcgataatccagaggcagtggagagccaatccctccagaggtgggggaggcgtttcctttaccaaggaggtcgacactaacgtagccacgggagcgccaccgcgtcgccaacgtgttccagggcgagcctgtccttggcgcgagccgattcgagggagacgaggggcaagaccaggcggaggcgacgcagggggaacaccaggtgagaccgttaggcattgctcggctcctgaagaccctatcttcaggttcagctccctccattcctaccccttcccgggaactattaagagtcgggacatgagttggaaaagacatcatctgattcccgagactttcggtgtcaagcgcagacggaagagaggccctgtcgagtcggaccccctgcgaggagagcccggatccgccagagctgcagtgagcgaattaatgcagcttttcccacggggacttttcgaggatgcccttcctccaatagtgttgaggagtcaggtctattcgctagttccggatagaacagtggctgatcggcaattgaaagaacttcaagagcagggagagattcgaatcgtccagcttggtttcgacctggacgctcatgggatcatcttcactgaggactataggacgcgcgtacttaaggcctgcgacggccgaccttatgctggggctgtgcagaaattcctcgcatccgtgttgcccgcttgtggggacctctctttccagcaggaccagatgacgcaaacttttggattccgggactcagagattacccacttagtgaacgccggagttctgaccgtgagagacgccggatcatggtggctggctgtccctggcgctgggagatttatcaagtatttcgtgaaaggcagacaggcagtgcttagtatggttcgaaaggcgaaatatcgagagttgctgctctcagaactgctgggtcggagagcccctgtcgtcgtccgcctcggcctgacttaccatgtccacgacctgataggagcccagttggtggattgcataagcacaaccagtggaactctcctgcgactccccgagacctag

SEQ ID NO: 144216 - DNA, 1095 bp, Artificial Sequence
  derived and/or modified sequence
atgcaaaagtggttctcggctttcgatgacgctatcatccaacggcagtggagagcaaatccaagtagggggggaggaggcgtaagtttcaccaaagaggtggatactaacgtagccaccggcgctcctcctagacggcaacgggtcccaggcagggcctgcccatggcgcgagcctattcgcggaagaagaggcgctcggcctgggggaggagatgctgggggaacccccggagagacagtccgacattgttccgccccagaggatcccatctttagattcagttccttgcacagctacccatttccaggtaccattaaaagccgagacatgtcatggaagaggcatcacctgattcccgaaaccttcggtgtgaaacgcagacgtaaacgcggacctgtggagagcgaccctctcagaggggaaccagggtctgcaagggctgccgtgagcgagctgatgcagctatttcccaggggcctcttcgaagacgcgttgccaccgatcgtgctgcgctcacaggtgtattctctggtcccagatagaacagtggcagataggcagctgaaggaactccaggagcaaggcgagattagaattgtacaattgggctttgacttggacgcccatggcattatattcacagaggattaccgcacgagagtgttaaaagcttgtgatggtcgcccatatgcaggcgctgttcaaaagtttctggctagtgtgctccctgcctgtggcgacctgagcttccagcaagaccagatgacacagaccttcggcttccgcgactcagagatcacacacctggtcaatgctggggtcctgactgtgcgtgacgcaggtagctggtggctcgccgtgcctggcgcagggagatttattaagtacttcgttaaaggtaggcaagccgtactttctatggtgagaaaggccaagtaccgagagctcttgctttctgagcttctgggacggagagccccagtggtcgtgcggctgggactgacataccacgtgcacgatttgattggtgcccagctggtggactgcatcagcactacgtcaggcacccttctgcgactgccggagacttag

SEQ ID NO: 144217 - DNA, 339 bp, Artificial Sequence
  derived and/or modified sequence
atgcagaaatggttttcagcattcgacgatgccatcatccagcgtcagtggcgggcaaatccctctcgtggtggagggggagtgagttttacgaaggaagtggatacaaatgtcgccactggcgcacctcccaggaggcagagagtccccggtcgcgcttgcccttggcgggaacccatcaggggtcgtaggggagcgaggcccggagggggagatgcaggaggcacgccaggcgaaacagtgaggcattgcagcgctcccgaagatcctatcttcaggttctcttccttacatagttacccctttccgggaactattaaatctcgcgatatgtcctag

SEQ ID NO: 144218 - DNA, 966 bp, Artificial Sequence
  derived and/or modified sequence
atgcttgtttgtgcctcacctcctccccttcctgccttaaccggcctacgcgacgacaagctgactcttctcagcagctcacctggactgggtgggacacccggtgagaccgtccgacactgttcagccccagaagaccccatattcagattttcctctctgcacagctatcccttccctggaacgattaaaagcagagacatgagctggaagcgacaccatcttatcccggaaacattcggtgtgaagcggcgacgcaaaagaggccctgttgagagcgatccccttaggggagaacctggtagcgccagggcagctgtgagcgaacttatgcagctatttccacggggtttgtttgaggacgccttgcccccaattgtccttagaagccaggtctattccttggtacctgataggactgtcgccgacaggcagttaaaggagctacaggagcaaggcgaaatcaggattgtgcagcttggttttgacctggacgctcatggtattatcttcacggaagattatcggacccgcgtcctcaaagcatgcgacggcagaccttacgcaggagctgttcagaagtttttggcaagtgtgctgccagcctgcggcgacctaagcttccagcaagaccagatgacccaaactttcggcttccgggattcggagatcactcaccttgttaacgcaggcgttctgaccgtaagggatgctggttcatggtggctcgccgtcccaggggctggccgattcattaagtatttcgtcaagggcaggcaggccgtgctaggcatggtgaggaaggcgaaatatcgtgagttgctcctcagcgagctgctgggacggagggctcctgtcgtagtgagactgggactgacttatcacgtccacgacttaattggggctcagctggtagattgtattagtactacatcaggaaccctgctaagactccctgaaacatag

SEQ ID NO: 144219 - DNA, 966 bp, Artificial Sequence
  derived and/or modified sequence
atgctggtctgtgcctcccctcccccactgcctgcccttactggccttcgggatgataaactgaccctcctgtctagtagccctgggctgggcggaacccccggagaaactgtgcgacactgcagcgctccagaggaccccatttttcgcttcagctccttacattcctatccattccccggaactatcaaatccagggacatgtcttggaaacgccatcatcttatacctgagacatttggagtcaaacggaggaggaaaagaggacccgtcgagtcagatcccctgcggggtgagcccggttccgctagagctgctgtgtcagaactgatgcagctgtttccgaggggactatttgaggatgcactgcctccaattgtcctacgatcccaggtctacagtttagttcctgaccgtaccgttgccgaccgccagttaaaggagttgcaagagcagggcgagatacggatcgtgcagctgggctttgatctagatgctcatggcatcatcttcacggaagattaccgaaccagggtgctcaaggcttgtgatggcagaccttacgccggtgcagtgcagaagttcctcgcaagcgttctccccgcatgtggtgacttaagctttcagcaagaccagatgacccagacctttgggttcagagattccgagattacccatctggtgaacgcgggagtactgacggtgcgagacgctggctcctggtggcttgctgtgccaggagccggtcgctttataaaatactttgtaaagggacgacaggcggtccttagcatggttagaaaggctaaatacagagaacttctgttgtctgagcttttaggcagacgcgcacctgtggtcgtcagactaggcctcacttatcatgtgcatgacttgattggcgctcagctggtcgattgcattagcaccacttctggaacgctactccgcctgcccgagacctag

SEQ ID NO: 144220 - DNA, 966 bp, Artificial Sequence
  derived and/or modified sequence
atgctagtgtgtgcgtccccccctccccttccagccctcacaggcctaagggacgacaaactaacgctgctcagttcctcgcccggtctcggagggactcccggagagaccgttaggcactgctccgcccctgaggacccaatctttaggttctcttcactgcactcctatccattccctggaactatcaaatctagagacatgtcttggaagagacaccacttaattcctgagactttcggagtcaagcgcagacgcaagagggggccagttgaatccgatccactaaggggcgagccaggcagcgccagagcagctgtcagcgagctgatgcaattgttccctaggggactgtttgaagatgctctgccgccaatcgtcctacgaagtcaggtgtactcgctcgtgcctgatagaacggtggccgatcgccaattaaaggagctacaagaacagggagagatcaggatcgttcagctgggtttcgacctggatgcccacggcattatatttactgaggactatcgcaccagggtgctgaaggcttgtgacggcagaccttacgcaggagctgtgcagaagtttcttgccagtgttctgcccgcttgcggagatctctcttttcaacaggatcagatgactcagacctttggatttcgggacagtgagattacccacctggttaatgctggtgtgctgacagtgagagatgctgggagctggtggctggctgtgcctggcgctgggagatttatcaagtacttcgtgaaggggcgtcaggctgttcttagcatggtgcggaaagctaagtaccgggaactattgttgagcgagcttcttggtcgcagagctcccgtggtcgtgcggctgggcctaacctaccatgttcatgatttaatcggtgctcagctcgtcgactgcataagcaccacttcagggacattgctgcggctgccagagacctag

SEQ ID NO: 144221 - DNA, 966 bp, Artificial Sequence
  derived and/or modified sequence
atgcttgtctgtgcctcccctccacctctcccagctctgactggcttgcgtgatgacaaactgaccctactgagctcatcccccggtcttgggggtacacctggggagactgtacgacactgttcggcccctgaagacccaattttccgttttagcagccttcactcttacccctttcctggaaccattaagtcccgcgatatgagctggaagagacaccatttgatccccgagacgtttggagtcaaacgccgacgtaagcgtgggccagtggagtctgaccctttgaggggtgagcccggttctgccagggccgctgtgagcgagcttatgcaattatttcctcgtggcctgttcgaggacgccctccccccaatagttctgcgcagccaagtgtattccctggttccggatagaacagtggccgatcgccagttgaaggagctgcaggaacaaggggagatccggatcgttcagttggggttcgatctggatgcgcacgggatcatcttcaccgaggattatcgcaccagagtcttgaaagcctgtgacggacgcccatacgctggggcagtgcagaagtttttggcctccgtgctgcctgcctgcggtgatttaagtttccaacaggaccagatgacacaaactttcggcttccgggattccgagattacccacttggtgaatgcgggtgtcctgaccgtgcgcgacgcgggttcctggtggctggctgtcccaggggcagggcgttttatcaagtatttcgtgaaggggaggcaagccgttctgtccatggtgcgaaaggctaaatacagggagctactcctgagcgagctgctgggacggagagcccctgtggtggtgaggctagggcttacctatcacgtgcatgatctgattggagcccagcttgtcgattgtatatcaactacatcaggcacactcctccggctaccagagacctag

SEQ ID NO: 144222 - DNA, 966 bp, Artificial Sequence
  derived and/or modified sequence
atgctcgtttgtgcctcccctccacctctccctgccttgacaggattacgcgacgacaagctgaccctgctcagtagctcccccggtcttggagggactcctggagagacggtgaggcattgcagcgcacccgaagaccctatctttcgattctctagcctgcactcatatcccttccctggaaccattaagtcaagggacatgtcatggaaacgccatcacctgattcccgagacattcggagtcaagcggagaagaaagaggggcccagttgaatctgacccattaaggggggaacctggatcagccagagccgctgtctcagaactgatgcagctgtttccacgaggcctgttcgaggatgccctgccgcctattgtgttgcgctcccaggtttattctttagttccggacaggacagttgccgaccggcagctgaaggagcttcaagaacagggagagatccggattgtgcagttaggcttcgatctggacgcccatggcatcatcttcacggaggattacagaactcgggtcctgaaagcctgcgatggcagaccttatgcaggcgctgtccagaagtttctggcgtccgtgcttcctgcctgcggtgatctgtcctttcagcaggaccagatgacacagaccttcggtttcagagatagcgaaattacacaccttgtcaatgccggagtattaacagtgagggacgccggaagttggtggttggctgtccctggggcagggagattcataaagtacttcgttaaaggtcggcaagctgtgttgtcaatggtcaggaaagctaagtatagggaacttctgttatcagagctgctggggaggagagctcccgtggtagtaaggctaggcttaacatatcacgtgcatgatctgattggagcgcagctagtggattgtatatccacaacttccgggacgttgcttaggcttcctgagacttag

SEQ ID NO: 144223 - DNA, 1663 bp, Artificial Sequence
  derived and/or modified sequence
ctgcctctttccttgcccttcacccaccctccctccaggtcctccaaatgcagtgaggttaggaaggacgtctgcgctcagatcaagaatccagttacctcaaagctccccaacttccacctccgcagagctatgacgtcatggcaggcacgccagaggccgaaggatgcaaaagtggttttctgctttcgatgatgcaatcattcagcgacagtggcgggcaaacccctcccggggcgggggaggtgtgagcttcacgaaggaggttgacaccaacgtggccaccggcgcccctccacgccgccaacgagtccccgggcgtgcgtgcccttggagggagccaatccgcggccggcgtggggcccggcctggcggaggtgatgctggagggacgcccggggagaccgtacgtcactgctctgcgccggaagaccctattttcaggttctcttccctccattcctaccccttccccggtaccataaaatcccgggatatgagctggaagaggcatcacctgatcccggagacctttggagttaagaggcggcggaagcgagggcctgtggagtcggatcctcttcggggtgagccagggtcggcgcgcgcggctgtctcagaactcatgcagctgttcccgcgaggcctgtttgaggacgcgctgccgcccatcgtgctgaggagccaggtgtacagccttgtgcctgacaggaccgtggccgaccggcagctgaaggagcttcaagagcagggggagatcagaatcgtccagctgggcttcgacttggatgcccatggaattatcttcactgaggactacaggaccagagtcctcaaggcctgtgatggccgaccgtatgctggggcagtgcagaaatttctagcttcagtacttccagcctgtggggaccttagtttccagcaggaccaaatgacacagacctttggcttcagggactcagaaatcacgcatctggtgaatgctggagtcctcaccgtccgagatgctgggagctggtggctagctgtgcctggagctgggagattcatcaagtactttgttaaagggcgccaggctgtccttagcatggtccggaaggcaaagtaccgggaactgctcctatcagagctcctgggccggcgggcgcctgtcgtggtgcggcttggcctcacctaccatgtgcacgacctcattggggcccagctagtggactgcatctctaccacttcaggaaccctcctccgcctgccagagacatgaagattctgctcatcattgctcagctcctcagagtgggccgggaggggactagaagagctgcatgatggtggctgagacagggtcaccttgggaaggcttgggagccaggatgagtgtcgggctctcgtgtgtgcaaaaggtcagatgtgactgctgctgtttgcctggtttctgacccagtggtggggtttgagcaatgcttctctgcccttccatggaaagtggaaccagaaatggtgccaaggctgtggctgttccctttcgtgtaaaatggtgctgttattactctgtcttgaaataggaaggtgggatttctggggaggctggtgaaggagggcagggttcttttctctacgtgtcatgttaaaattgccaaataaagtacctctgcctgtgatattt

SEQ ID NO: 144224 - DNA, 1620 bp, Artificial Sequence
  derived and/or modified sequence
gtcctccaaatgcagtgaggttaggaaggacgtctgcgctcagatcaagaatccagttacctcaaagctccccaacttccacctccgcagagctatgacgtcatggcaggcacgccagaggccgaaggatgcaaaagtggttttctgctttcgatgatgcaatcattcagcgacagtggcgggcaaacccctcccggggcgggggaggtgtgagcttcacgaaggaggttgacaccaacgtggccaccggcgcccctccacgccgccaacgagtccccgggcgtgcgtgcccttggagggagccaatccgcggccggcgtggggcccggcctggcggaggtgatgctggagggacgcccggggagaccgtacgtcactgctctgcgccggaagaccctattttcaggttctcttccctccattcctaccccttccccggtaccataaaatcccgggatatgagctggaagaggcatcacctgatcccggagacctttggagttaagaggcggcggaagcgagggcctgtggagtcggatcctcttcggggtgagccagggtcggcgcgcgcggctgtctcagaactcatgcagctgttcccgcgaggcctgtttgaggacgcgctgccgcccatcgtgctgaggagccaggtgtacagccttgtgcctgacaggaccgtggccgaccggcagctgaaggagcttcaagagcagggggagatcagaatcgtccagctgggcttcgacttggatgcccatggaattatcttcactgaggactacaggaccagagtcctcaaggcctgtgatggccgaccgtatgctggggcagtgcagaaatttctagcttcagtacttccagcctgtggggaccttagtttccagcaggaccaaatgacacagacctttggcttcagggactcagaaatcacgcatctggtgaatgctggagtcctcaccgtccgagatgctgggagctggtggctagctgtgcctggagctgggagattcatcaagtactttgttaaagggcgccaggctgtccttggcatggtccggaaggcaaagtaccgggaactgctcctatcagagctcctgggccggcgggcgcctgtcgtggtgcggcttggcctcacctaccatgtgcacgacctcattggggcccagctagtggactgcatctctaccacttcaggaaccctcctccgcctgccagagacatgaagattctgctcatcattgctcagctcctcagagtgggccgggaggggactagaagagctgcatgatggtggctgagacagggtcaccttgggaaggcttgggagccaggatgagtgtcgggctctcgtgtgtgcaaaaggtcagatgtgactgctgctgtttgcctggtttctgacccagtggtggggtttgagcaatgcttctctgcccttccatggaaagtggaaccagaaatggtgccaaggctgtggctgttccctttcgtgtaaaatggtgctgttattactctgtcttgaaataggaaggtgggatttctggggaggctggtgaaggagggcagggttcttttctctacgtgtcatgttaaaattgccaaataaagtacctctgcctgtga

SEQ ID NO: 144225 - DNA, 1620 bp, Artificial Sequence
  derived and/or modified sequence
gtcctccaaatgcagtgaggttaggaaggacgtctgcgctcagatcaagaatccagttacctcaaagctccccaacttccacctccgcagagctatgacgtcatggcaggcacgccagaggccgaaggatgcaaaagtggttttctgctttcgatgatgcaatcattcagcgacagtggcgggcaaacccctcccggggcgggggaggtgtgagcttcacgaaggaggttgacaccaacgtggccaccggcgcccctccacgccgccaacgagtccccgggcgtgcgtgcccttggagggagccaatccgcggccggcgtggggcccggcctggcggaggtgatgctggagggacgcccggggagaccgtacgtcactgctctgcgccggaagaccctattttcaggttctcttccctccattcctaccccttccccggtaccataaaatcccgggatatgagctggaagaggcatcacctgatcccggagacctttggagttaagaggcggcggaagcgagggcctgtggagtcggatcctcttcggggtgagccagggtcggcgcgcgcggctgtctcagaactcatgcagctgttcccgcgaggcctgtttgaggacgcgctgccgcccatcgtgctgaggagccaggtgtacagccttgtgcctgacaggaccgtggccgaccggcagctgaaggagcttcaagagcagggggagatcagaatcgtccagctgggcttcgacttggatgcccatggaattatcttcactgaggactacaggaccagagtcctcaaggcctgtgatggccgaccgtatgctggggcagtgcagaaatttctagcttcagtacttccagcctgtggggaccttagtttccagcaggaccaaatgacacagacctttggcttcagggactcagaaatcacgcatctggtgaatgctggagtcctcaccgtccgagatgctgggagctggtggctagctgtgcctggagctgggagattcatcaagtactttgttaaagggcgccaggctgtccttagcatggtccggaaggcaaagtaccgggaactgctcctatcagagctcctgggccggcgggcgcctgtcgtggtgcggcttggcctcacctaccatgtgcacgacctcattggggcccagctagtggactgcatctctaccacttcaggaaccctcctccgcctgccagagacatgaagattctgctcatcattgctcagctcctcagagtgggccgggaggggactagaagagctgcatgatggtggctgagacagggtcaccttgggaaggcttgggagccaggatgagtgtcgggctctcgtgtgtgcaaaaggtcagatgtgactgctgctgtttgcctggtttctgacccagtggtggggtttgagcaatgcttctctgcccttccatggaaagtggaaccagaaatggtgccaaggctgtggctgttccctttcgtgtaaaatggtgctgttattactctgtcttgaaataggaaggtgggatttctggggaggctggtgaaggagggcagggttcttttctctacgtgtcatgttaaaattgccaaataaagtacctctgcctgtga

SEQ ID NO: 144226 - DNA, 575 bp, Artificial Sequence
  derived and/or modified sequence
aggctgaaggtctgacacaagcattagtgagatgctcccctcgaagaatagtcttgtttcttctaaggactgattctcaccccggctttggctctcctaattttagagggtcctccaaatgcagtgaggttaggaaggacgtctgcgctcagatcaagaatccagttacctcaaagctccccaacttccacctccgcagagctatgacgtcatggcaggcacgccagaggccgaaggatgcaaaagtggttttctgctttcgatgatgcaatcattcagcgacagtggcgggcaaacccctcccggggcgggggaggtgtgagcttcacgaaggaggttgacaccaacgtggccaccggcgcccctccacgccgccaacgagtccccgggcgtgcgtgcccttggagggagccaatccgcggccggcgtggggcccggcctggcggaggtgatgctggagggacgcccggggagaccgtacgtcactgctctgcgccggaagaccctattttcaggttctcttccctccattcctaccccttccccggtaccataaaatcccgggatatgagctg

SEQ ID NO: 144227 - DNA, 1804 bp, Artificial Sequence
  derived and/or modified sequence
gtctgacacaagcattagtgagatgctcccctcgaagaatagtcttgtttcttctaaggactgattctcaccccggctttggctctcctaattttagagggtcctccaaatgcagtgaggttaggaaggacgtctgcgctcagatcaagaatccagttacctcaaagctccccaacttccacctccgcagagctatgacgtcatggcaggcacgccagaggccgaaggatgcaaaagtggttttctgctttcgatgatgcaatcattcagcgacagtggcgggcaaacccctcccggggcgggggaggtgtgagcttcacgaaggaggttgacaccaacgtggccaccggcgcccctccacgccgccaacgagtccccgggcgtgcgtgcccttggagggagccaatccgcggccggcgtggggcccggcctggcggaggtgatgctggtatgtgcgtcgccaccgcccctcccagcactgacgggcctgagggacgacaagttgacgctcctttcgtcatcacctggtctaggagggacgcccggggagaccgtacgtcactgctctgcgccggaagaccctattttcaggttctcttccctccattcctaccccttccccggtaccataaaatcccgggatatgagctggaagaggcatcacctgatcccggagacctttggagttaagaggcggcggaagcgagggcctgtggagtcggatcctcttcggggtgagccagggtcggcgcgcgcggctgtctcagaactcatgcagctgttcccgcgaggcctgtttgaggacgcgctgccgcccatcgtgctgaggagccaggtgtacagccttgtgcctgacaggaccgtggccgaccggcagctgaaggagcttcaagagcagggggagatcagaatcgtccagctgggcttcgacttggatgcccatggaattatcttcactgaggactacaggaccagagtcctcaaggcctgtgatggccgaccgtatgctggggcagtgcagaaatttctagcttcagtacttccagcctgtggggaccttagtttccagcaggaccaaatgacacagacctttggcttcagggactcagaaatcacgcatctggtgaatgctggagtcctcaccgtccgagatgctgggagctggtggctagctgtgcctggagctgggagattcatcaagtactttgttaaagggcgccaggctgtccttggcatggtccggaaggcaaagtaccgggaactgctcctatcagagctcctgggccggcgggcgcctgtcgtggtgcggcttggcctcacctaccatgtgcacgacctcattggggcccagctagtggactgcatctctaccacttcaggaaccctcctccgcctgccagagacatgaagattctgctcatcattgctcagctcctcagagtgggccgggaggggactagaagagctgcatgatggtggctgagacagggtcaccttgggaaggcttgggagccaggatgagtgtcgggctctcgtgtgtgcaaaaggtcagatgtgactgctgctgtttgcctggtttctgacccagtggtggggtttgagcaatgcttctctgcccttccatggaaagtggaaccagaaatggtgccaaggctgtggctgttccctttcgtgtaaaatggtgctgttattactctgtcttgaaataggaaggtgggatttctggggaggctggtgaaggagggcagggttcttttctctacgtgtcatgttaaaattgccaaataaagtacctctgcctgtg

SEQ ID NO: 144228 - DNA, 1804 bp, Artificial Sequence
  derived and/or modified sequence
gtctgacacaagcattagtgagatgctcccctcgaagaatagtcttgtttcttctaaggactgattctcaccccggctttggctctcctaattttagagggtcctccaaatgcagtgaggttaggaaggacgtctgcgctcagatcaagaatccagttacctcaaagctccccaacttccacctccgcagagctatgacgtcatggcaggcacgccagaggccgaaggatgcaaaagtggttttctgctttcgatgatgcaatcattcagcgacagtggcgggcaaacccctcccggggcgggggaggtgtgagcttcacgaaggaggttgacaccaacgtggccaccggcgcccctccacgccgccaacgagtccccgggcgtgcgtgcccttggagggagccaatccgcggccggcgtggggcccggcctggcggaggtgatgctggtatgtgcgtcgccaccgcccctcccagcactgacgggcctgagggacgacaagttgacgctcctttcgtcatcacctggtctaggagggacgcccggggagaccgtacgtcactgctctgcgccggaagaccctattttcaggttctcttccctccattcctaccccttccccggtaccataaaatcccgggatatgagctggaagaggcatcacctgatcccggagacctttggagttaagaggcggcggaagcgagggcctgtggagtcggatcctcttcggggtgagccagggtcggcgcgcgcggctgtctcagaactcatgcagctgttcccgcgaggcctgtttgaggacgcgctgccgcccatcgtgctgaggagccaggtgtacagccttgtgcctgacaggaccgtggccgaccggcagctgaaggagcttcaagagcagggggagatcagaatcgtccagctgggcttcgacttggatgcccatggaattatcttcactgaggactacaggaccagagtcctcaaggcctgtgatggccgaccgtatgctggggcagtgcagaaatttctagcttcagtacttccagcctgtggggaccttagtttccagcaggaccaaatgacacagacctttggcttcagggactcagaaatcacgcatctggtgaatgctggagtcctcaccgtccgagatgctgggagctggtggctagctgtgcctggagctgggagattcatcaagtactttgttaaagggcgccaggctgtccttagcatggtccggaaggcaaagtaccgggaactgctcctatcagagctcctgggccggcgggcgcctgtcgtggtgcggcttggcctcacctaccatgtgcacgacctcattggggcccagctagtggactgcatctctaccacttcaggaaccctcctccgcctgccagagacatgaagattctgctcatcattgctcagctcctcagagtgggccgggaggggactagaagagctgcatgatggtggctgagacagggtcaccttgggaaggcttgggagccaggatgagtgtcgggctctcgtgtgtgcaaaaggtcagatgtgactgctgctgtttgcctggtttctgacccagtggtggggtttgagcaatgcttctctgcccttccatggaaagtggaaccagaaatggtgccaaggctgtggctgttccctttcgtgtaaaatggtgctgttattactctgtcttgaaataggaaggtgggatttctggggaggctggtgaaggagggcagggttcttttctctacgtgtcatgttaaaattgccaaataaagtacctctgcctgtg

SEQ ID NO: 144229 - DNA, 1095 bp, Artificial Sequence
  derived and/or modified sequence
atgcagaagtggttcagcgccttcgacgacgccatcatccagagacagtggagagccaaccccagcagaggcggcggcggcgtgagcttcaccaaggaggtggacaccaacgtggccaccggcgccccccccagaagacagagagtgcccggcagagcctgcccctggagagagcccatcagaggcagaagaggcgccagacccggcggcggcgacgccggcggcacccccggcgagaccgtgagacactgcagcgcccccgaggaccccatcttcagattcagcagcctgcacagctaccccttccccggcaccatcaagagcagagacatgagctggaagagacaccacctgatccccgagaccttcggcgtgaagagaagaagaaagagaggccccgtggagagcgaccccctgagaggcgagcccggcagcgccagagccgccgtgagcgagctgatgcagctgttccccagaggcctgttcgaggacgccctgccccccatcgtgctgagaagccaggtgtacagcctggtgcccgacagaaccgtggccgacagacagctgaaggagctgcaggagcagggcgagatcagaatcgtgcagctgggcttcgacctggacgcccacggcatcatcttcaccgaggactacagaaccagagtgctgaaggcctgcgacggcagaccctacgccggcgccgtgcagaagttcctggccagcgtgctgcccgcctgcggcgacctgagcttccagcaggaccagatgacccagaccttcggcttcagagacagcgagatcacccacctggtgaacgccggcgtgctgaccgtgagagacgccggcagctggtggctggccgtgcccggcgccggcagattcatcaagtacttcgtgaagggcagacaggccgtgctgagcatggtgagaaaggccaagtacagagagctgctgctgagcgagctgctgggcagaagagcccccgtggtggtgagactgggcctgacctaccacgtgcacgacctgatcggcgcccagctggtggactgcatcagcaccaccagcggcaccctgctgagactgcccgagacctag

SEQ ID NO: 144230 - DNA, 1095 bp, Artificial Sequence
  derived and/or modified sequence
atgcagaagtggttcagcgccttcgacgacgccatcatccagagacagtggagagccaaccccagcagaggcggcggcggcgtgagcttcaccaaggaggtggacaccaacgtggccaccggcgccccccccagaagacagagagtgcccggcagagcctgcccctggagagagcccatcagaggcagaagaggcgccagacccggcggcggcgacgccggcggcacccccggcgagaccgtgagacactgcagcgcccccgaggaccccatcttcagattcagcagcctgcacagctaccccttccccggcaccatcaagagcagagacatgagctggaagagacaccacctgatccccgagaccttcggcgtgaagagaagaagaaagagaggccccgtggagagcgaccccctgagaggcgagcccggcagcgccagagccgccgtgagcgagctgatgcagctgttccccagaggcctgttcgaggacgccctgccccccatcgtgctgagaagccaggtgtacagcctggtgcccgacagaaccgtggccgacagacagctgaaggagctgcaggagcagggcgagatcagaatcgtgcagctgggcttcgacctggacgcccacggcatcatcttcaccgaggactacagaaccagagtgctgaaggcctgcgacggcagaccctacgccggcgccgtgcagaagttcctggccagcgtgctgcccgcctgcggcgacctgagcttccagcaggaccagatgacccagaccttcggcttcagagacagcgagatcacccacctggtgaacgccggcgtgctgaccgtgagagacgccggcagctggtggctggccgtgcccggcgccggcagattcatcaagtacttcgtgaagggcagacaggccgtgctgggcatggtgagaaaggccaagtacagagagctgctgctgagcgagctgctgggcagaagagcccccgtggtggtgagactgggcctgacctaccacgtgcacgacctgatcggcgcccagctggtggactgcatcagcaccaccagcggcaccctgctgagactgcccgagacctag

SEQ ID NO: 144231 - DNA, 339 bp, Artificial Sequence
  derived and/or modified sequence
atgcagaagtggttcagcgccttcgacgacgccatcatccagagacagtggagagccaaccccagcagaggcggcggcggcgtgagcttcaccaaggaggtggacaccaacgtggccaccggcgccccccccagaagacagagagtgcccggcagagcctgcccctggagagagcccatcagaggcagaagaggcgccagacccggcggcggcgacgccggcggcacccccggcgagaccgtgagacactgcagcgcccccgaggaccccatcttcagattcagcagcctgcacagctaccccttccccggcaccatcaagagcagagacatgagctag

SEQ ID NO: 144232 - DNA, 966 bp, Artificial Sequence
  derived and/or modified sequence
atgctggtgtgcgccagccccccccccctgcccgccctgaccggcctgagagacgacaagctgaccctgctgagcagcagccccggcctgggcggcacccccggcgagaccgtgagacactgcagcgcccccgaggaccccatcttcagattcagcagcctgcacagctaccccttccccggcaccatcaagagcagagacatgagctggaagagacaccacctgatccccgagaccttcggcgtgaagagaagaagaaagagaggccccgtggagagcgaccccctgagaggcgagcccggcagcgccagagccgccgtgagcgagctgatgcagctgttccccagaggcctgttcgaggacgccctgccccccatcgtgctgagaagccaggtgtacagcctggtgcccgacagaaccgtggccgacagacagctgaaggagctgcaggagcagggcgagatcagaatcgtgcagctgggcttcgacctggacgcccacggcatcatcttcaccgaggactacagaaccagagtgctgaaggcctgcgacggcagaccctacgccggcgccgtgcagaagttcctggccagcgtgctgcccgcctgcggcgacctgagcttccagcaggaccagatgacccagaccttcggcttcagagacagcgagatcacccacctggtgaacgccggcgtgctgaccgtgagagacgccggcagctggtggctggccgtgcccggcgccggcagattcatcaagtacttcgtgaagggcagacaggccgtgctgggcatggtgagaaaggccaagtacagagagctgctgctgagcgagctgctgggcagaagagcccccgtggtggtgagactgggcctgacctaccacgtgcacgacctgatcggcgcccagctggtggactgcatcagcaccaccagcggcaccctgctgagactgcccgagacctag

SEQ ID NO: 144233 - DNA, 966 bp, Artificial Sequence
  derived and/or modified sequence
atgctggtgtgcgccagccccccccccctgcccgccctgaccggcctgagagacgacaagctgaccctgctgagcagcagccccggcctgggcggcacccccggcgagaccgtgagacactgcagcgcccccgaggaccccatcttcagattcagcagcctgcacagctaccccttccccggcaccatcaagagcagagacatgagctggaagagacaccacctgatccccgagaccttcggcgtgaagagaagaagaaagagaggccccgtggagagcgaccccctgagaggcgagcccggcagcgccagagccgccgtgagcgagctgatgcagctgttccccagaggcctgttcgaggacgccctgccccccatcgtgctgagaagccaggtgtacagcctggtgcccgacagaaccgtggccgacagacagctgaaggagctgcaggagcagggcgagatcagaatcgtgcagctgggcttcgacctggacgcccacggcatcatcttcaccgaggactacagaaccagagtgctgaaggcctgcgacggcagaccctacgccggcgccgtgcagaagttcctggccagcgtgctgcccgcctgcggcgacctgagcttccagcaggaccagatgacccagaccttcggcttcagagacagcgagatcacccacctggtgaacgccggcgtgctgaccgtgagagacgccggcagctggtggctggccgtgcccggcgccggcagattcatcaagtacttcgtgaagggcagacaggccgtgctgagcatggtgagaaaggccaagtacagagagctgctgctgagcgagctgctgggcagaagagcccccgtggtggtgagactgggcctgacctaccacgtgcacgacctgatcggcgcccagctggtggactgcatcagcaccaccagcggcaccctgctgagactgcccgagacctag

SEQ ID NO: 144234 - protein, 494 aa, Artificial Sequence
  derived and/or modified sequence
MLTSKGQGFLHGGLCLWLCVFTPFFKGCVGCATEERLFHKLFSHYNQFIRPVENVSDPVTVHFEVAITQLANVDEVNQIMETNLWLRHIWNDYKLRWDPMEYDGIETLRVPADKIWKPDIVLYNNAVGDFQVEGKTKALLKYNGMITWTPPAIFKSSCPMDITFFPFDHQNCSLKFGSWTYDKAEIDLLIIGSKVDMNDFWENSEWEIIDASGYKHDIKYNCCEEIYTDITYSFYIRRLPMFYTINLIIPCLFISFLTVLVFYLPSDCGEKVTLCISVLLSLTVFLLVITETIPSTSLVVPLVGEYLLFTMIFVTLSIVVTVFVLNIHYRTPTTHTMPRWVKTVFLKLLPQVLLMRWPLDKTRGTGSDAVPRGLARRPAKGKLASHGEPRHLKECFHCHKSNELATSKRRLSHQPLQWVVENSEHSPEVEDVINSVQFIAENMKSHNETKEVEDDWKYVAMVVDRVFLWVFIIVCVFGTAGLFLQPLLGNTGKS

SEQ ID NO: 144235 - DNA, 1485 bp, Artificial Sequence
  derived and/or modified sequence
atgctgacctctaagggtcaggggtttctccacggcggcctctgcttgtggctgtgcgtatttacacccttcttcaagggctgtgtcggttgcgctacagaggaacggctgttccacaaacttttctcccactataaccagttcatcagaccagtcgagaacgtttcagaccctgtgaccgtacattttgaagtggccatcacacagcttgccaacgttgatgaggtgaaccagattatggaaacaaatctatggctccgccatatctggaatgactataaacttcgatgggatcccatggagtatgacggcatcgagacccttcgtgtgccagccgataagatctggaagccagatattgttctttacaataatgctgtgggtgatttccaagttgaaggcaaaaccaaggcattgctgaagtacaatggcatgataacctggacacctccggcaatttttaaaagttcctgtcctatggatattaccttttttccgtttgatcaccagaattgctctctcaagtttggcagttggacttacgacaaggcagaaatagatctattaatcattgggagcaaagtggacatgaacgacttctgggagaactcggaatgggaaatcatcgatgcgagtggctataaacatgatataaaatacaattgctgcgaggagatatatactgatataacttattcattttatatccggcgcctaccgatgttttatacgattaacctgattatcccttgtctcttcatcagctttctgacggtgttggtcttctacctcccctctgattgtggagaaaaggtgactctgtgtatcagcgtgttgctgtctcttactgtgtttttgctggtaataaccgaaactatcccgagcacgtcgttggtcgtgcccctagtcggggagtatctcttgttcacaatgatcttcgtcaccctgtcaattgtggttactgtctttgtactcaatatccactaccgtacgccaactacccatactatgccacggtgggttaaaacggtctttctgaaattgctgccccaagttctacttatgcgctggcctctagacaagacccggggaaccgggtcagacgccgtgccacgtggcctggctagacgacctgctaaaggaaaactcgcgtcccatggggaacccaggcatctcaaagaatgctttcactgccataagtctaacgagctggcaacgtctaaacgcagattaagtcaccagccactacagtgggttgtcgagaattccgagcacagtccagaagtggaggatgtcattaattctgtgcagtttatagcggaaaacatgaagagccataatgaaaccaaggaagttgaagatgactggaagtatgtggcgatggtggtcgatagagtgttcctgtgggtctttatcatagtatgtgtgtttggaactgccggcctgtttctgcagcctctgttaggaaatacgggcaaatcttag

SEQ ID NO: 144236 - DNA, 1485 bp, Artificial Sequence
  derived and/or modified sequence
atgctgaccagcaagggccagggcttcctgcatggaggcctgtgcctgtggctgtgtgtgttcacccccttcttcaagggctgtgtgggctgtgccacagaggagcggctcttccacaagctgttcagccactacaaccagttcatccggcctgtggagaatgtgtctgaccctgtgacagtgcactttgaggtggccatcacccagctggccaacgtggatgaggtgaaccagatcatggagaccaacctgtggctgcggcacatctggaatgactacaagctgcgctgggaccccatggagtatgatggcatcgagaccctgcgggtgcctgctgacaagatctggaagccagacatcgtgctgtacaacaatgctgtgggggacttccaggtggagggcaagaccaaggccctgctgaagtacaacggcatgatcacctggaccccaccagccatcttcaagagcagctgccccatggacatcaccttcttcccctttgaccaccagaactgcagcctgaagtttggctcctggacctatgacaaggccgagattgacctgctgatcatcggcagcaaggtggacatgaatgacttctgggagaacagcgagtgggagatcattgatgccagcggctacaagcatgacatcaagtacaactgctgtgaggagatctacacagacatcacctacagcttctacatccggcggctgcccatgttctacaccatcaacctgatcatcccctgcctcttcatctccttcctgactgtgctggtgttctacctgcccagcgactgtggggagaaggtgaccctgtgcatctctgtgctgctgagcctgactgtgttcctgctggtgatcacagagaccatccccagcaccagcctggtggtgcccctggtgggggagtacctgctcttcaccatgatctttgtgaccctgagcatcgtggtgacagtgtttgtgctgaacatccactaccgcacccccaccacccacaccatgccccgctgggtgaagacagtgttcctgaagctgctgccccaggtgctgctgatgcgctggcccctggacaagacccggggcactggaagtgatgctgtgccccggggcctggcccggcggcctgccaagggcaagctggccagccacggggagcccaggcacctgaaggagtgcttccactgccacaagagcaatgagctggccaccagcaagaggcggctgagccaccagcccctgcagtgggtggtggagaacagcgagcacagccctgaggtggaggatgtgatcaacagcgtgcagttcatcgccgagaacatgaagagccacaatgagaccaaggaggtggaggatgactggaagtatgtggccatggtggtggacagagtcttcctgtgggtgttcatcatcgtgtgtgtgtttggaacagctggcctcttcctgcagcccctgctgggcaacacaggcaagagctag

SEQ ID NO: 144237 - DNA, 1485 bp, Artificial Sequence
  derived and/or modified sequence
atgctgaccagcaagggccagggcttcctgcacggcggcctgtgcctgtggctctgtgtttttacccccttctttaaaggctgtgtcggctgcgccaccgaggagaggttattccacaagctcttttctcactataatcaatttattcgtcctgtggagaatgtgtccgaccccgtgaccgtgcacttcgaggttgcaatcacacaattggcgaatgttgacgaggtgaatcagatcatggagacaaacctgtggctccgtcacatctggaacgattataaactgaggtgggaccctatggagtatgacggcattgaaactctgcgggtgccggccgacaaaatctggaaaccggatattgtgctgtacaacaatgccgtgggggatttccaggtggagggtaagaccaaggcactcctgaagtataatggcatgattacatggacccctccagcaattttcaagagttcctgccctatggacataactttcttccctttcgatcatcagaattgctcactgaaatttggatcctggacgtacgataaggcagagatcgaccttctgatcataggtagcaaggtcgatatgaacgatttttgggagaactcagaatgggaaattattgacgctagcggatacaagcacgatatcaaatataactgttgcgaagagatttatactgacatcacctattctttttatatccgcaggctaccgatgttttatacgataaatttgatcattccatgcctttttatcagttttctgacggtcctggtattttacctgccgagtgactgtggcgaaaaagtgacattgtgcatctccgtcctcctcagcctgacagtttttttgttggttatcactgaaacaattccctccacttccctcgtggttccactcgtgggggaatacttgctgtttaccatgattttcgttacgctgagcattgtcgtgactgtctttgtgctcaatatacattacagaacacctaccactcataccatgcccagatgggttaagacggtgttccttaaattactccctcaagtcctgctcatgcgatggcctctcgacaagactagaggcaccggtagcgacgcagtgccgcgaggactggcccgaagaccagctaagggaaagttagcatcacacggagaacccaggcacctgaaggagtgcttccactgccataaaagtaacgaactcgccacatcaaagagaaggctctcccaccagccactccagtgggtggtggagaacagcgaacacagtccggaggttgaagacgttattaatagcgtgcagttcatagccgagaatatgaaatcccacaatgagacaaaagaagtagaagacgactggaaatatgtggcaatggtcgtcgatcgtgtgttcctgtgggtgttcataatcgtgtgcgtatttggaactgctggcctcttcctgcagccattgttgggcaatacaggcaaatcttag

SEQ ID NO: 144238 - DNA, 1485 bp, Artificial Sequence
  derived and/or modified sequence
atgctgacatctaagggacagggatttctgcacggcggtctgtgtttgtggctgtgtgtgtttacgcccttcttcaagggctgcgtagggtgtgctacagaggaacgcttgttccataagctgttctcccattataaccagttcatcaggcccgtggaaaacgtctctgatccagtaacggttcactttgaggttgctattacccagctcgccaatgttgacgaagtcaatcagatcatggagaccaatctctggcttcgacacatttggaatgattacaagttgcgctgggacccaatggaatatgatggaatcgaaactctccgggttcccgctgacaaaatctggaaacctgacatcgtactatacaataatgcggtcggggactttcaggttgaagggaagactaaagccctgctgaagtacaacggtatgattacatggacccctcccgctatctttaaatccagctgtcccatggacatcactttctttccttttgatcaccagaattgtagtctgaaatttggttcctggacctacgacaaagccgagatagaccttttaataataggctccaaggtcgatatgaacgacttctgggagaacagtgagtgggaaatcatcgatgcgtccggctacaaacatgacattaaatacaattgttgcgaggagatttataccgacatcacttactctttctatatcagaaggctgcctatgttttacacaatcaatcttatcattccctgcttatttattagtttcctgacggtgctggtgttctacctgccaagcgattgtggggagaaagtcacgctgtgtattagtgtgctgcttagcctgactgtctttttgctagtcattacagaaacaatcccgagcacgagccttgtcgtcccactggtaggcgagtacctactgtttactatgatattcgtgaccctgtcaattgtggtgaccgtgttcgtgttaaacatccactatcgaaccccaaccacgcacacaatgcctcggtgggtgaagaccgtcttcctgaagcttcttcctcaggtgttgcttatgcgctggccactggacaaaacacggggtactggcagtgatgcagtgcctcgtggattggccaggagacccgctaaagggaaactggcttctcatggggagccaagacatcttaaagagtgtttccactgccataaatctaatgaattggcaacctccaaacgccgactgagccaccagccactgcaatgggtggtggagaattccgagcatagcccggaggtggaagatgttataaactcagttcagttcatcgccgaaaatatgaaatcccataacgaaaccaaggaagttgaagacgattggaaatacgtcgcaatggtagttgacagagttttcctgtgggttttcatcatcgtgtgcgtgtttgggactgctgggctgtttctgcagcccctgctcgggaatactgggaaaagttag

SEQ ID NO: 144239 - DNA, 2400 bp, Artificial Sequence
  derived and/or modified sequence
agaaagatctcagccactcacaggtgttcatcctcccggggtcctgtctgccccagcatttcttttctgcttttcttcccctttcttgcatgaagagacatctaggctgtcaggaaatgtgatgactcatctgacatcagatcgaatcttttttattcgcccttcatgtctgcctcagtctctgatcctggtaataaccgtgtgaagtcccggggatgttttgatttctgagaagacacacacggattgcagtgggcttctgatgatgtcaaggttggatgcatgtggctgactgatagctctttgttttccacaatcctttgcctaggaaaaaggaatccaagtgtgttttaaccatgctgaccagcaaggggcagggattccttcatgggggcttgtgtctctggctgtgtgtgttcacacctttctttaaaggctgtgtgggctgtgcaactgaggagaggctcttccacaaactgttttctcattacaaccagttcatcaggcctgtggaaaacgtttccgaccctgtcacggtacactttgaagtggccatcacccagctggccaacgtggatgaagtaaaccagatcatggaaaccaatttgtggctgcgtcacatctggaatgattataaattgcgctgggatccaatggaatatgatggcattgagactcttcgcgttcctgcagataagatttggaagcccgacattgttctctataacaatgctgttggtgacttccaagtagaaggcaaaacaaaagctcttcttaaatacaatggcatgataacctggactccaccagctatttttaagagttcctgccctatggatatcacctttttcccttttgatcatcaaaactgttccctaaaatttggttcctggacgtatgacaaagctgaaattgatcttctaatcattggatcaaaagtggatatgaatgatttttgggaaaacagtgaatgggaaatcattgatgcctctggctacaaacatgacatcaaatacaactgttgtgaagagatatacacagatataacctattctttctacattagaagattgccgatgttttacacgattaatctgatcatcccttgtctctttatttcatttctaaccgtgttggtcttttaccttccttcggactgtggtgaaaaagtgacgctttgtatttcagtcctgctttctctgactgtgtttttgctggtcatcacagaaaccatcccatccacatctctggtggtcccactggtgggtgagtacctgctgttcaccatgatctttgtcacactgtccatcgtggtgactgtgtttgtgttgaacatacactaccgcaccccaaccacgcacacaatgcccaggtgggtgaagacagttttcctgaagctgctgccccaggtcctgctgatgaggtggcctctggacaagacaaggggcacaggctctgatgcagtgcccagaggccttgccaggaggcctgccaaaggcaagcttgcaagccatggggaacccagacatcttaaagaatgcttccattgtcacaaatcaaatgagcttgccacaagcaagagaagattaagtcatcagccattacagtgggtggtggaaaattcggagcactcgcctgaagttgaagatgtgattaacagtgttcagttcatagcagaaaacatgaagagccacaatgaaaccaaggaggtagaagatgactggaaatacgtggccatggtggtggacagagtatttctttgggtatttataattgtctgtgtatttggaactgcagggctatttctacagccactacttgggaacacaggaaaatcttaaaatgtattttcttttatgttcagaaatttacagacaccatatttgttctgcattccctgccacaaggaaaggaaagcaaaggcttcccacccaagtcccccatctgctaaaactgatggctacatggaaaaagaggactttcttgcacattaggaagcagaatatcctccagtgtagcacagggggagaagtgagaagtgttatgacattagtgccctgattgggcagcacccacggctacagtatcaggtcaggtttctcgtgtctgtgtgtttggcttctaaagacaagaatgacttacaatacagcctaattatgtaattaacatcaagccacactaaaaagttctgctgtacctccagtggatgctgtttctcagtattatgacatgtgacaggtgaactctgggaattggaccatgcaacatttgtgaactgtttgcaacactttgtgaactattgcatccttgatttcttgtgcatgtctctgtaatgtaactcaccctcctcagcattatttgatacactgattgttagttttaaaaaaaaaaaaaaaaaaa

SEQ ID NO: 144240 - DNA, 1485 bp, Artificial Sequence
  derived and/or modified sequence
atgctgaccagcaagggccagggcttcctgcacggcggcctgtgcctgtggctgtgcgtgttcacccccttcttcaagggctgcgtgggctgcgccaccgaggagagactgttccacaagctgttcagccactacaaccagttcatcagacccgtggagaacgtgagcgaccccgtgaccgtgcacttcgaggtggccatcacccagctggccaacgtggacgaggtgaaccagatcatggagaccaacctgtggctgagacacatctggaacgactacaagctgagatgggaccccatggagtacgacggcatcgagaccctgagagtgcccgccgacaagatctggaagcccgacatcgtgctgtacaacaacgccgtgggcgacttccaggtggagggcaagaccaaggccctgctgaagtacaacggcatgatcacctggaccccccccgccatcttcaagagcagctgccccatggacatcaccttcttccccttcgaccaccagaactgcagcctgaagttcggcagctggacctacgacaaggccgagatcgacctgctgatcatcggcagcaaggtggacatgaacgacttctgggagaacagcgagtgggagatcatcgacgccagcggctacaagcacgacatcaagtacaactgctgcgaggagatctacaccgacatcacctacagcttctacatcagaagactgcccatgttctacaccatcaacctgatcatcccctgcctgttcatcagcttcctgaccgtgctggtgttctacctgcccagcgactgcggcgagaaggtgaccctgtgcatcagcgtgctgctgagcctgaccgtgttcctgctggtgatcaccgagaccatccccagcaccagcctggtggtgcccctggtgggcgagtacctgctgttcaccatgatcttcgtgaccctgagcatcgtggtgaccgtgttcgtgctgaacatccactacagaacccccaccacccacaccatgcccagatgggtgaagaccgtgttcctgaagctgctgccccaggtgctgctgatgagatggcccctggacaagaccagaggcaccggcagcgacgccgtgcccagaggcctggccagaagacccgccaagggcaagctggccagccacggcgagcccagacacctgaaggagtgcttccactgccacaagagcaacgagctggccaccagcaagagaagactgagccaccagcccctgcagtgggtggtggagaacagcgagcacagccccgaggtggaggacgtgatcaacagcgtgcagttcatcgccgagaacatgaagagccacaacgagaccaaggaggtggaggacgactggaagtacgtggccatggtggtggacagagtgttcctgtgggtgttcatcatcgtgtgcgtgttcggcaccgccggcctgttcctgcagcccctgctgggcaacaccggcaagagctag

SEQ ID NO: 144241 - protein, 148 aa, Artificial Sequence
  derived and/or modified sequence
MVLKAFFPTCCVSTDSGLLVGRWVPEQSSAVVLAVLHFPFIPIQVKQLLAQVRQASQVGVAVLGTWCHCRQEPEESLGRFLESLGAVFPHEPWLRLCRERGGTFWSCEATHRQAPTAPGAPGEDQVMLIFYDQRQVLLSQLHLPTVLP

SEQ ID NO: 144242 - protein, 581 aa, Artificial Sequence
  derived and/or modified sequence
MVLKAFFPTCCVSTDSGLLVGRWVPEQSSAVVLAVLHFPFIPIQVKQLLAQVRQASQVGVAVLGTWCHCRQEPEESLGRFLESLGAVFPHEPWLRLCRERGGTFWSCEATHRQAPTAPGAPGEDQVMLIFYDQRQVLLSQLHLPTVLPDRQAGATTASTGGLAAVFDTVARSEVLFRSDRFDEGPVRLSHWQSEGVEASILAELARRASGPICLLLASLLSLVSAVSACRVFKLWPLSFLGSKLSTCEQLRHRLEHLTLIFSTRKAENPAQLMRKANTVASVLLDVALGLMLLSWLHGRSRIGHLADALVPVADHVAEELQHLLQWLMGAPAGLKMNRALDQVLGRFFLYHIHLWISYIHLMSPFVEHILWHVGLSACLGLTVALSLLSDIIALLTFHIYCFYVYGARLYCLKIHGLSSLWRLFRGKKWNVLRQRVDSCSYDLDQLFIGTLLFTILLFLLPTTALYYLVFTLLRLLVVAVQGLIHLLVDLINSLPLYSLGLRLCRPYRLAAGVKFRVLRHEAGRPLRLLMQINPLPYSRVVHTYRLPSCGCHPKHSWGALCRKLFLGELIYPWRQRGDKQD

SEQ ID NO: 144243 - protein, 251 aa, Artificial Sequence
  derived and/or modified sequence
MVLKAFFPTCCVSTDSGLLVGRWVPEQSSAVVLAVLHFPFIPIQVKQLLAQVRQASQVGVAVLGTWCHCRQEPEESLGRFLESLGAVFPHEPWLRLCRERGGTFWSCEATHRQAPTAPGAPGEDQVMLIFYDQRQVLLSQLHLPTVLPDRQAGATTASTGGLAAVFDTVARSEVLFRSDRFDEGPVRLSHWQSEGVEASILAELARRASGPICLLLASLLSLVSAVSACRVFKLWPLSFLGSKLSTCEQLR

SEQ ID NO: 144244 - protein, 314 aa, Artificial Sequence
  derived and/or modified sequence
MVLKAFFPTCCVSTDSGLLVGRWVPEQSSAVVLAVLHFPFIPIQVKQLLAQVRQASQVGVAVLGTWCHCRQEPEESLGRFLESLGAVFPHEPWLRLCRERGGTFWSCEATHRQAPTAPGAPGEDQVMLIFYDQRQVLLSQLHLPTVLPDRQAGATTASTGGLAAVFDTVARSEVLFRSDRFDEGPVRLSHWQSEGVEASILAELARRASGPICLLLASLLSLVSAVSACRVFKLWPLSFLGSKLSTCEQLRHRLEHLTLIFSTRKAENPAQLMRKANTVASVLLDVALGLMLLSWLHGRSRIGHLADALVPVAD

SEQ ID NO: 144245 - protein, 112 aa, Artificial Sequence
  derived and/or modified sequence
MVLKAFFPTCCVSTDSGLLVGRWVPEQSSAVVLAVLHFPFIPIQVKQLLAQVRQASQVGVAVLGTWCHCRQEPEESLGRFLESLGAVFPHEPWLRLCRERGGTFWSCEATHR

SEQ ID NO: 144246 - protein, 574 aa, Artificial Sequence
  derived and/or modified sequence
MWWALRPPGILPPGMVLKAFFPTCCVSTDSGLLVGRWVPEQSSAVVLAVLHFPFIPIQVKQLLAQVRQASQVGVAVLGTWCHCRQEPEESLGRFLESLGAVFPHEPWLRLCRERGGTFWSCEATHRQAPTAPGAPGEDQVMLIFYDQRQVLLSQLHLPTVLPDRQAGATTASTGGLAAVFDTVARSEVLFRSDRFDEGPVRLSHWQSEGVEASILAELARRASGPICLLLASLLSLVSAVSACRVFKLWPLSFLGSKLSTCEQLRHRLEHLTLIFSTRKAENPAQLMRKANTVASVLLDVALGLMLLSWLHGRSRIGHLADALVPVADHVAEELQHLLQWLMGAPAGLKMNRALDQVLGRFFLYHIHLWISYIHLMSPFVEHILWHVGLSACLGLTVALSLLSDIIALLTFHIYCFYVYGARLYCLKIHGLSSLWRLFRGKKWNVLRQRVDSCSYDLDQLFIGTLLFTILLFLLPTTALYYLVFTLLRLLVVAVQGLIHLLVDLINSLPLYSLGLRLCRPYRLAGSEPWRPEATGLCSSALGFSGLGSLNCRPGAKRGKVRGTRSQQGGHHPLA

SEQ ID NO: 144247 - protein, 299 aa, Artificial Sequence
  derived and/or modified sequence
MVLKAFFPTCCVSTDSGLLVGRWVPEQSSAVVLAVLHFPFIPIQVKQLLAQVRQASQVGVAVLGTWCHCRQEPEESLGRFLESLGAVFPHEPWLRLCRERGGTFWSCEATHRQAPTAPGAPGEDQVMLIFYDQRQVLLSQLHLPTVLPDRQAGATTASTGGLAAVFDTVARSEVLFRSDRFDEGPVRLSHWQSEGVEASILAELARRASGPICLLLASLLSLVSAVSACRVFKLWPLSFLGSKLSTCEQLRHRLEHLTLIFSTRKAENPAQLMRCGPALVSAGLGACPLAPSPSPSAPR

SEQ ID NO: 144248 - DNA, 447 bp, Artificial Sequence
  derived and/or modified sequence
atggtgctgaaggccttcttccccacctgctgcgtgagcaccgacagcggcctgctggtgggcagatgggtgcccgagcagagcagcgccgtggtgctggccgtgctgcacttccccttcatccccatccaggtgaagcagctgctggcccaggtgagacaggccagccaggtgggcgtggccgtgctgggcacctggtgccactgcagacaggagcccgaggagagcctgggcagattcctggagagcctgggcgccgtgttcccccacgagccctggctgagactgtgcagagagagaggcggcaccttctggagctgcgaggccacccacagacaggcccccaccgcccccggcgcccccggcgaggaccaggtgatgctgatcttctacgaccagagacaggtgctgctgagccagctgcacctgcccaccgtgctgccctag

SEQ ID NO: 144249 - DNA, 1746 bp, Artificial Sequence
  derived and/or modified sequence
atggtgctgaaggccttcttccccacctgctgcgtgagcaccgacagcggcctgctggtgggcagatgggtgcccgagcagagcagcgccgtggtgctggccgtgctgcacttccccttcatccccatccaggtgaagcagctgctggcccaggtgagacaggccagccaggtgggcgtggccgtgctgggcacctggtgccactgcagacaggagcccgaggagagcctgggcagattcctggagagcctgggcgccgtgttcccccacgagccctggctgagactgtgcagagagagaggcggcaccttctggagctgcgaggccacccacagacaggcccccaccgcccccggcgcccccggcgaggaccaggtgatgctgatcttctacgaccagagacaggtgctgctgagccagctgcacctgcccaccgtgctgcccgacagacaggccggcgccaccaccgccagcaccggcggcctggccgccgtgttcgacaccgtggccagaagcgaggtgctgttcagaagcgacagattcgacgagggccccgtgagactgagccactggcagagcgagggcgtggaggccagcatcctggccgagctggccagaagagccagcggccccatctgcctgctgctggccagcctgctgagcctggtgagcgccgtgagcgcctgcagagtgttcaagctgtggcccctgagcttcctgggcagcaagctgagcacctgcgagcagctgagacacagactggagcacctgaccctgatcttcagcaccagaaaggccgagaaccccgcccagctgatgagaaaggccaacaccgtggccagcgtgctgctggacgtggccctgggcctgatgctgctgagctggctgcacggcagaagcagaatcggccacctggccgacgccctggtgcccgtggccgaccacgtggccgaggagctgcagcacctgctgcagtggctgatgggcgcccccgccggcctgaagatgaacagagccctggaccaggtgctgggcagattcttcctgtaccacatccacctgtggatcagctacatccacctgatgagccccttcgtggagcacatcctgtggcacgtgggcctgagcgcctgcctgggcctgaccgtggccctgagcctgctgagcgacatcatcgccctgctgaccttccacatctactgcttctacgtgtacggcgccagactgtactgcctgaagatccacggcctgagcagcctgtggagactgttcagaggcaagaagtggaacgtgctgagacagagagtggacagctgcagctacgacctggaccagctgttcatcggcaccctgctgttcaccatcctgctgttcctgctgcccaccaccgccctgtactacctggtgttcaccctgctgagactgctggtggtggccgtgcagggcctgatccacctgctggtggacctgatcaacagcctgcccctgtacagcctgggcctgagactgtgcagaccctacagactggccgccggcgtgaagttcagagtgctgagacacgaggccggcagacccctgagactgctgatgcagatcaaccccctgccctacagcagagtggtgcacacctacagactgcccagctgcggctgccaccccaagcacagctggggcgccctgtgcagaaagctgttcctgggcgagctgatctacccctggagacagagaggcgacaagcaggactag

SEQ ID NO: 144250 - DNA, 756 bp, Artificial Sequence
  derived and/or modified sequence
atggtgctgaaggccttcttccccacctgctgcgtgagcaccgacagcggcctgctggtgggcagatgggtgcccgagcagagcagcgccgtggtgctggccgtgctgcacttccccttcatccccatccaggtgaagcagctgctggcccaggtgagacaggccagccaggtgggcgtggccgtgctgggcacctggtgccactgcagacaggagcccgaggagagcctgggcagattcctggagagcctgggcgccgtgttcccccacgagccctggctgagactgtgcagagagagaggcggcaccttctggagctgcgaggccacccacagacaggcccccaccgcccccggcgcccccggcgaggaccaggtgatgctgatcttctacgaccagagacaggtgctgctgagccagctgcacctgcccaccgtgctgcccgacagacaggccggcgccaccaccgccagcaccggcggcctggccgccgtgttcgacaccgtggccagaagcgaggtgctgttcagaagcgacagattcgacgagggccccgtgagactgagccactggcagagcgagggcgtggaggccagcatcctggccgagctggccagaagagccagcggccccatctgcctgctgctggccagcctgctgagcctggtgagcgccgtgagcgcctgcagagtgttcaagctgtggcccctgagcttcctgggcagcaagctgagcacctgcgagcagctgagatag

SEQ ID NO: 144251 - DNA, 945 bp, Artificial Sequence
  derived and/or modified sequence
atggtgctgaaggccttcttccccacctgctgcgtgagcaccgacagcggcctgctggtgggcagatgggtgcccgagcagagcagcgccgtggtgctggccgtgctgcacttccccttcatccccatccaggtgaagcagctgctggcccaggtgagacaggccagccaggtgggcgtggccgtgctgggcacctggtgccactgcagacaggagcccgaggagagcctgggcagattcctggagagcctgggcgccgtgttcccccacgagccctggctgagactgtgcagagagagaggcggcaccttctggagctgcgaggccacccacagacaggcccccaccgcccccggcgcccccggcgaggaccaggtgatgctgatcttctacgaccagagacaggtgctgctgagccagctgcacctgcccaccgtgctgcccgacagacaggccggcgccaccaccgccagcaccggcggcctggccgccgtgttcgacaccgtggccagaagcgaggtgctgttcagaagcgacagattcgacgagggccccgtgagactgagccactggcagagcgagggcgtggaggccagcatcctggccgagctggccagaagagccagcggccccatctgcctgctgctggccagcctgctgagcctggtgagcgccgtgagcgcctgcagagtgttcaagctgtggcccctgagcttcctgggcagcaagctgagcacctgcgagcagctgagacacagactggagcacctgaccctgatcttcagcaccagaaaggccgagaaccccgcccagctgatgagaaaggccaacaccgtggccagcgtgctgctggacgtggccctgggcctgatgctgctgagctggctgcacggcagaagcagaatcggccacctggccgacgccctggtgcccgtggccgactag

SEQ ID NO: 144252 - DNA, 339 bp, Artificial Sequence
  derived and/or modified sequence
atggtgctgaaggccttcttccccacctgctgcgtgagcaccgacagcggcctgctggtgggcagatgggtgcccgagcagagcagcgccgtggtgctggccgtgctgcacttccccttcatccccatccaggtgaagcagctgctggcccaggtgagacaggccagccaggtgggcgtggccgtgctgggcacctggtgccactgcagacaggagcccgaggagagcctgggcagattcctggagagcctgggcgccgtgttcccccacgagccctggctgagactgtgcagagagagaggcggcaccttctggagctgcgaggccacccacagatag

SEQ ID NO: 144253 - DNA, 1725 bp, Artificial Sequence
  derived and/or modified sequence
atgtggtgggccctgagaccccccggcatcctgccccccggcatggtgctgaaggccttcttccccacctgctgcgtgagcaccgacagcggcctgctggtgggcagatgggtgcccgagcagagcagcgccgtggtgctggccgtgctgcacttccccttcatccccatccaggtgaagcagctgctggcccaggtgagacaggccagccaggtgggcgtggccgtgctgggcacctggtgccactgcagacaggagcccgaggagagcctgggcagattcctggagagcctgggcgccgtgttcccccacgagccctggctgagactgtgcagagagagaggcggcaccttctggagctgcgaggccacccacagacaggcccccaccgcccccggcgcccccggcgaggaccaggtgatgctgatcttctacgaccagagacaggtgctgctgagccagctgcacctgcccaccgtgctgcccgacagacaggccggcgccaccaccgccagcaccggcggcctggccgccgtgttcgacaccgtggccagaagcgaggtgctgttcagaagcgacagattcgacgagggccccgtgagactgagccactggcagagcgagggcgtggaggccagcatcctggccgagctggccagaagagccagcggccccatctgcctgctgctggccagcctgctgagcctggtgagcgccgtgagcgcctgcagagtgttcaagctgtggcccctgagcttcctgggcagcaagctgagcacctgcgagcagctgagacacagactggagcacctgaccctgatcttcagcaccagaaaggccgagaaccccgcccagctgatgagaaaggccaacaccgtggccagcgtgctgctggacgtggccctgggcctgatgctgctgagctggctgcacggcagaagcagaatcggccacctggccgacgccctggtgcccgtggccgaccacgtggccgaggagctgcagcacctgctgcagtggctgatgggcgcccccgccggcctgaagatgaacagagccctggaccaggtgctgggcagattcttcctgtaccacatccacctgtggatcagctacatccacctgatgagccccttcgtggagcacatcctgtggcacgtgggcctgagcgcctgcctgggcctgaccgtggccctgagcctgctgagcgacatcatcgccctgctgaccttccacatctactgcttctacgtgtacggcgccagactgtactgcctgaagatccacggcctgagcagcctgtggagactgttcagaggcaagaagtggaacgtgctgagacagagagtggacagctgcagctacgacctggaccagctgttcatcggcaccctgctgttcaccatcctgctgttcctgctgcccaccaccgccctgtactacctggtgttcaccctgctgagactgctggtggtggccgtgcagggcctgatccacctgctggtggacctgatcaacagcctgcccctgtacagcctgggcctgagactgtgcagaccctacagactggccggcagcgagccctggagacccgaggccaccggcctgtgcagcagcgccctgggcttcagcggcctgggcagcctgaactgcagacccggcgccaagagaggcaaggtgagaggcaccagaagccagcagggcggccaccaccccctggcctag

SEQ ID NO: 144254 - DNA, 900 bp, Artificial Sequence
  derived and/or modified sequence
atggtgctgaaggccttcttccccacctgctgcgtgagcaccgacagcggcctgctggtgggcagatgggtgcccgagcagagcagcgccgtggtgctggccgtgctgcacttccccttcatccccatccaggtgaagcagctgctggcccaggtgagacaggccagccaggtgggcgtggccgtgctgggcacctggtgccactgcagacaggagcccgaggagagcctgggcagattcctggagagcctgggcgccgtgttcccccacgagccctggctgagactgtgcagagagagaggcggcaccttctggagctgcgaggccacccacagacaggcccccaccgcccccggcgcccccggcgaggaccaggtgatgctgatcttctacgaccagagacaggtgctgctgagccagctgcacctgcccaccgtgctgcccgacagacaggccggcgccaccaccgccagcaccggcggcctggccgccgtgttcgacaccgtggccagaagcgaggtgctgttcagaagcgacagattcgacgagggccccgtgagactgagccactggcagagcgagggcgtggaggccagcatcctggccgagctggccagaagagccagcggccccatctgcctgctgctggccagcctgctgagcctggtgagcgccgtgagcgcctgcagagtgttcaagctgtggcccctgagcttcctgggcagcaagctgagcacctgcgagcagctgagacacagactggagcacctgaccctgatcttcagcaccagaaaggccgagaaccccgcccagctgatgagatgcggccccgccctggtgagcgccggcctgggcgcctgccccctggcccccagccccagccccagcgcccccagatag

SEQ ID NO: 144255 - DNA, 447 bp, Artificial Sequence
  derived and/or modified sequence
atggtgctaaaggctttttttcccacatgctgtgtgtccacagattccggcctactcgtgggccgctgggtccccgaacaatcatctgccgtggttctggcggtactgcacttccctttcatccccattcaagtgaaacagctgctcgctcaagtcagacaggcatcccaggtcggggtagccgtgctaggaacctggtgccactgcagacaagagcccgaggaatcactgggaaggttcctggagagtctcggcgccgtgtttccgcacgaaccctggctccggctctgccgcgagcggggaggcactttctggtcctgtgaagccactcacagacaagcccccacagctcccggcgcccccggggaagatcaggtgatgctgatcttttacgaccaaaggcaggttctgcttagtcaactccacctccctaccgtgctgccatag

SEQ ID NO: 144256 - DNA, 1746 bp, Artificial Sequence
  derived and/or modified sequence
atggtgctcaaggcattctttcccacctgttgcgttagtacggacagcggtctgctagtgggccgctgggtgcctgagcaatcctctgcagtcgttttagccgtgctgcattttccgttcatcccaattcaggtgaagcagctacttgcccaggtgcgccaggcgagtcaggtcggagtagccgtgctgggaacctggtgtcactgtcggcaggaacctgaggaaagccttggaagatttctggaaagtctaggcgccgtgtttccacacgagccatggctgcgcttatgccgcgaaagaggcggtaccttctggagttgcgaggcgactcatcggcaggctcctaccgcgcctggagccccaggcgaggaccaggtcatgctgatcttttacgaccagcggcaggtgcttctgagccagttacacctgcccacggtattgcctgatagacaagctggcgccacaacggcctccacgggtggactggcggctgttttcgataccgttgccagaagtgaagtgctgttcaggagcgaccggtttgacgaaggccctgtgcgcctgagccattggcagtccgaaggcgtggaagccagtatcctggccgagctcgctagacgggcaagcggccccatttgccttttactcgcctccctcttatctttggttagcgctgtttctgcctgtagggtttttaagctttggccccttagtttcttaggaagtaagttaagtacatgtgagcaactcaggcaccggctcgaacatcttacgttgatattttcgacaagaaaagcagagaatcctgcccaattgatgaggaaggcaaacactgtagccagtgtgctcctcgatgtcgcgctgggcctgatgctgctttcatggctgcatggcagatctcgcatcggccacttggccgacgctctcgttcctgtggccgatcacgtggccgaagaactccagcaccttctgcaatggctcatgggcgcacccgctggtctaaagatgaatagggccctcgatcaagtgctggggcggttcttcctctatcacattcatttgtggatttcctatatccacttaatgtcccccttcgtggagcacattctctggcatgtcggcctttctgcctgtctggggttgactgtggcgctgtccctgttgtccgatatcatagcactgctgacttttcatatttactgtttttacgtgtacggcgcaagactctactgcctgaaaattcatggactaagcagcctctggcgtctgttccgaggcaaaaagtggaatgtgctgcggcagagagtcgattcatgtagttacgatctcgaccaattgttcattggcacacttctcttcaccatcctcctgtttcttctgcctacaactgccctctactatcttgtgtttaccctgctgagactccttgttgtggctgtccaaggattaattcaccttctagtggacctgatcaactcactgcccctatatagtctgggattaagactgtgtcgtccctatcggttggctgctggtgtcaagtttcgcgtgttacgtcacgaagcaggtcgaccccttcgacttctgatgcagattaatcctttgccctactcacgtgtggtccacacgtaccgcctgccttcatgtggatgccaccccaaacatagctggggcgcgctatgcagaaagttgttcctgggcgaacttatctacccatggcggcagaggggggataagcaggactag

SEQ ID NO: 144257 - DNA, 756 bp, Artificial Sequence
  derived and/or modified sequence
atggtgttgaaagcgttcttccctacatgctgcgtgtcaacggactcaggactcctggtcggccgatgggtcccagagcagagttcagcagtggtactggccgtcctccattttccctttataccaatccaggtaaaacaactcctagcccaagtaaggcaggcctctcaggtgggtgtggctgtgctgggcacctggtgtcattgcaggcaggaaccagaagagtccctgggacggtttctggagtcattaggtgccgtattcccccatgagccctggctcagactttgccgcgagcggggtgggaccttttggtcgtgcgaggctacgcaccgccaagcacctactgccccgggtgcgccgggggaagatcaggtgatgctgatattctacgaccagcgtcaggtcctgctctcacagctgcacctgccaacagtgctgcctgaccgacaggccggcgcgacaaccgcaagtacgggcggtctggcagccgtgtttgacacagttgcgcggtcggaggtccttttcaggagtgatcgcttcgatgaaggccccgtgcgcttgtcccattggcagagtgagggcgtggaggcaagtattctcgccgagctggcaagaagggcatccggccctatttgcctgttactggcgtctttgctctccttggtctccgccgtaagtgcatgcagagtgtttaagttgtggcccctgtcttttctgggctccaagcttagtacttgcgagcagctcaggtag

SEQ ID NO: 144258 - DNA, 1746 bp, Artificial Sequence
  derived and/or modified sequence
atggtgctcaaagcgtttttcccgacttgctgtgtgtccactgacagtgggctgcttgtgggcagatgggtcccggagcaatcctccgctgtggtcctcgccgtccttcacttccccttcatccccatccaagtgaaacagttactggctcaggtgaggcaggcaagtcaggttggggtggccgtactggggacatggtgccattgtagacaggagccagaggagagtctggggagatttttagaaagcctgggcgctgtcttccctcacgaaccctggctgcggctgtgtcgcgagcggggaggcactttttggtcctgtgaagcgacacaccgacaggcccccaccgcacccggggcacctggcgaggaccaggtgatgcttatcttctatgatcagagacaggtccttctctcccagctccatctgccaactgtgctgcctgaccgtcaggccggcgcaactaccgcatcaacgggtggacttgcagccgtgtttgacactgtggctcggtccgaagttctctttagatcagacaggttcgatgaaggccctgttaggcttagccactggcagtcagagggtgtcgaggctagtattctcgccgaacttgcacgtagagcctctggtcccatctgcctgcttctagcgtccctgctgtcccttgtatcagccgtcagcgcatgccgagtattcaagttgtggcccctcagcttcctcgggtctaagctgtccacgtgtgaacagctgcggcacagactggaacatttaaccctgattttcagcactcgaaaggcggagaacccagcacaacttatgcgcaaagctaataccgtcgcctccgttctcttggacgtcgccttgggcttgatgctgctaagctggctccacggaagatctcgcatcggccatttggccgatgccctggtgcctgtggccgaccacgtggcagaggagctgcaacacctgctgcagtggctaatgggggcacctgctgggctgaagatgaatcgggccttggaccaggtgcttggacggttctttctataccatattcacctttggatttcttatattcacctgatgtccccctttgtggaacatattctatggcacgtcgggttgagtgcgtgtctcggcctgaccgtggccttgagtttattgtctgatattatcgctcttctaacattccacatatattgcttctacgtctacggcgctcgtttatactgcctgaaaatacacgggctgagctcattatggcggctcttcagaggtaaaaagtggaatgtcctgcgccagagggtggatagctgtagctacgacttggatcaactgtttatcggaaccctgcttttcacaatcctgttgttccttcttcccacaacggccctgtattaccttgtcttcactctgcttaggctgttagtcgtagcagttcaaggactgattcatttgctcgttgacttaataaattccttgccgctctactccctgggactccgcctgtgccggccataccggttagcggcgggcgtgaagtttcgcgtcctgagacatgaagcgggaaggcccttgcgcctgctgatgcagatcaacccactgccctacagtcgggtggtacacacctatagactgccctcatgcggatgccaccctaaacattcctggggggccctatgccgaaaactgttcctgggggagctgatctacccttggcggcaaagaggtgataagcaggattag

SEQ ID NO: 144259 - DNA, 945 bp, Artificial Sequence
  derived and/or modified sequence
atggtcttaaaggccttcttccccacatgttgtgtaagtaccgactctgggctgctggtaggtcgctgggtgccagaacagagtagcgccgtcgtactggccgttttgcactttcctttcattccgatccaggtcaagcagctcttggcacaggttaggcaggcttcccaggttggagtggctgtcctcgggacatggtgtcactgccggcaggagccagaagaaagcctcggtcgtttccttgagtcactaggcgccgtctttccacatgagccctggctccgcctgtgtcgggagcggggaggaacgttctggagttgtgaggctacacatagacaagcaccaaccgcccctggcgcacctggggaagatcaggtcatgctcattttttatgaccaaagacaagtactcctcagccagttgcaccttcccacagtgctgccagataggcaggccggcgcaacgacagccagcacggggggcctggctgcggtgttcgacacggttgctcggtcggaagtgctgtttcgttctgaccggtttgatgagggcccggtcaggctgtctcactggcaatccgagggagtggaggcctctatcctggccgagctagctaggcgtgctagtgggccaatctgcttgctgctggcttctctgttaagcctggtgtccgctgtttctgcatgccgcgtctttaagttatggccactaagcttcttagggtctaaattgtctacttgtgaacagcttcgccacaggttggagcatttgaccctcatcttttccactcgcaaagcagagaacccagcacaactgatgcgcaaagccaatacagtggcgtctgttctgctggacgtggccttggggctgatgttactgtcttggttgcacggcaggtcaaggatcgggcacctggccgatgccttggtccctgtggctgattag

SEQ ID NO: 144260 - DNA, 339 bp, Artificial Sequence
  derived and/or modified sequence
atggtgttgaaggccttctttccaacgtgctgtgtcagtactgactcaggcctactggtgggtcgttgggtccccgaacagtcctccgccgtcgtgctcgctgttctgcactttcccttcatccccattcaggtcaagcagttgctcgcccaggtcagacaggcctcacaagtcggcgttgcagtgctcggtacttggtgtcattgtagacaagagcctgaggagtcattagggcggttcctcgaaagtcttggcgcagttttccctcatgaaccttggcttcggctgtgtcgcgaacgcggcggaacattctggtcctgcgaggcaacccatcgttag

SEQ ID NO: 144261 - DNA, 1725 bp, Artificial Sequence
  derived and/or modified sequence
atgtggtgggccctgcgtccaccaggtatcctgcctccaggcatggtgctgaaggccttctttcccacgtgctgtgtctccacggattcgggacttttggtgggcagatgggtgcccgaacagtcctcggccgtggtactcgccgtgctgcacttcccatttattccaattcaggtgaagcagctccttgcccaagtccggcaggcttcccaggtgggcgttgccgtgttaggaacatggtgtcattgtcgccaggaaccagaagagagcttaggaaggttcctcgagtctcttggcgcggtgtttccacacgagccgtggctgaggctctgtagggagcggggtggaacattctggtcatgcgaggccactcaccggcaagctccgactgctcccggagcccccggggaggaccaggtgatgctgatattttatgaccagcgccaagtgttgctttcccaactgcatctgcccacggttctccctgaccgacaggctggggccaccaccgcttctacaggagggcttgctgccgtctttgacacggtggctcgcagcgaggtactgttcagatccgatagattcgacgagggtcctgtacgcctttcacattggcagtcagagggggtcgaggcctctatcctcgcagaactcgccagacgagcctctggtccaatctgtctcctcctggccagcctcctgtccctggtgtctgcagtatccgcctgcagggtctttaagctgtggccactctccttcctcgggtcaaagctgagtacttgcgaacagctgcgacaccgcctagaacatctaaccctgattttcagtacacgcaaggccgagaatccagctcagcttatgagaaaggccaacaccgtggccagcgttctcctcgacgtcgccttgggattgatgttgctcagctggctacacgggcgcagcagaattggccacttggctgacgcccttgttcccgtagccgatcacgtcgcggaggaactgcagcatctgctgcaatggctcatgggtgctccagccggccttaaaatgaatagggctctggatcaggtgcttggaagattttttctgtatcatatccacctctggatctcctatatccatctcatgtccccatttgtcgaacatatcctgtggcacgtgggattgtccgcctgtcttggactgaccgttgctttatctctgctttctgatatcatagccttgcttactttccatatctactgtttttatgtgtatggcgcacgactgtactgcctgaaaatccacggcctgtcttccctctggaggctctttcgtggcaagaaatggaacgtccttcggcagagggtggatagctgtagctacgatctcgatcaactctttattgggactttgttgtttacaatattactgtttctcctgccaaccacggctctctactacttggtctttacgctgctccgcctgttggtcgtggccgtccagggcctgattcacttgctagtggatctaattaacagccttccactctacagcttgggtctgcgcctatgcagaccataccgcctggccgggagcgagccatggagacctgaggctacaggtctgtgcagcagcgcattaggattctcaggtctgggctctctgaattgtcgccccggagcaaagagaggtaaagttaggggaacacggtctcagcagggcgggcatcacccattagcttag

SEQ ID NO: 144262 - DNA, 900 bp, Artificial Sequence
  derived and/or modified sequence
atggttcttaaggctttcttccctacctgctgtgtgtccacagacagcggcctgctggtggggcgctgggtgcccgagcaaagcagtgctgttgtgctggccgtcttacatttcccgttcatccctattcaggtcaagcagctgctggcccaggtccgacaagcctcacaggtaggcgtagcagtgctgggtacgtggtgccattgtaggcaggagccagaggagtcactcggtagatttctcgagagcctcggcgccgttttccctcacgaaccctggctgaggctttgcagagaacgtggaggaacattctggtcttgtgaggctactcatagacaagcccctacagcaccaggcgccccgggagaagatcaggtcatgctgatcttttacgatcagagacaggtgctgctcagccagttacacctgccaacagttctccccgatcggcaggccggggctacgaccgcttctacaggcggcctggcggcagtgtttgataccgtggctagaagcgaggtgctgttccgctctgaccggtttgatgagggccccgtcagactatctcactggcaatctgagggagtggaggccagtatcctggccgagctggcccgccgagcaagcggccccatctgcctactacttgcttccctgttatctctcgtttccgccgtgagtgcttgtagagttttcaagctgtggcctctgagtttcctgggctctaagctcagcacgtgcgagcagttaagacatagactcgaacacctcacgttgattttttcaacaaggaaggcagagaaccctgcgcagttaatgaggtgcggaccggctctggttagcgcggggctgggcgcatgtcctctggcaccgagcccatctccctctgctccccggtag

SEQ ID NO: 144263 - DNA, 447 bp, Artificial Sequence
  derived and/or modified sequence
atggtgctgaaggccttcttccccacctgctgcgtgtccacagacagcggcctgctggtgggccgctgggtgcctgagcagagcagcgctgtggtgctggccgtgctgcacttccccttcatccccatccaggtgaagcagctgctggcccaggtgcggcaggccagccaggtgggcgtggccgtgctgggcacctggtgccactgccggcaggagcctgaggagagcctgggccgcttcctggagagcctgggcgctgtgttcccccatgagccctggctgcggctgtgccgggagcggggcggcaccttctggagctgtgaggccacccaccggcaggcccccacagcccctggggcccctggagaggaccaggtgatgctgatcttctatgaccagaggcaggtgctgctgagccagctgcacctgcccaccgtgctgccctag

SEQ ID NO: 144264 - DNA, 1746 bp, Artificial Sequence
  derived and/or modified sequence
atggtgctgaaggccttcttccccacctgctgcgtgtccacagacagcggcctgctggtgggccgctgggtgcctgagcagagcagcgctgtggtgctggccgtgctgcacttccccttcatccccatccaggtgaagcagctgctggcccaggtgcggcaggccagccaggtgggcgtggccgtgctgggcacctggtgccactgccggcaggagcctgaggagagcctgggccgcttcctggagagcctgggcgctgtgttcccccatgagccctggctgcggctgtgccgggagcggggcggcaccttctggagctgtgaggccacccaccggcaggcccccacagcccctggggcccctggagaggaccaggtgatgctgatcttctatgaccagaggcaggtgctgctgagccagctgcacctgcccaccgtgctgcctgaccggcaggccggggccaccacagccagcactggaggcctggccgctgtgtttgacacagtggcccggtctgaggtgctcttcagaagtgacagatttgatgagggccctgtgcggctgagccactggcagagcgagggcgtggaggccagcatcctggccgagctggcccggcgggccagcggccccatctgcctgctgctggccagcctgctgagcctggtgtctgctgtgtctgcctgcagggtcttcaagctgtggcccctgtccttcctgggcagcaagctgagcacctgtgagcagctgcggcaccggctggagcacctgaccctcatcttcagcaccaggaaggcagaaaatcctgcccagctgatgaggaaggccaacacagtggcctctgtgctgctggatgtggccctgggcctgatgctgctgtcctggctgcacggccgcagccgcatcggccacctggctgatgccctggtgcctgtggccgaccacgtggccgaggagctgcagcacctgctgcagtggctgatgggcgccccagctggcctgaagatgaacagagccctggaccaggtgctgggccgcttcttcctgtaccacatccacctgtggatctcctacatccacctgatgagcccctttgtggagcacatcctgtggcacgtgggcctgagcgcctgcctgggcctgactgtggccctgagcctgctgagtgacatcatcgccctgctgaccttccacatctactgcttctacgtgtatggagcccggctgtactgcctgaagatccacggcctgagcagcctgtggaggctcttccggggcaagaagtggaatgtgctgcggcagagggtggacagctgcagctatgacctggaccagctgttcatcggcaccctgctcttcaccatcctgctcttcctgctgcccaccacagccctgtactacctggtgttcaccctgctgcggctgctggtggtggccgtgcagggcctcatccacctgctggtggacctgatcaacagcctgcccctgtacagcctgggcctgcggctgtgccggccctaccgcctggccgccggcgtgaagttccgggtgctgcggcatgaggccggccggcccctgcggctgctgatgcagatcaaccccctgccctacagccgggtggtgcacacctaccgcctgcccagctgtggctgccaccccaagcacagctggggcgccctgtgcaggaagctgttcctgggggagctgatctacccctggaggcagagaggagacaagcaggactag

SEQ ID NO: 144265 - DNA, 756 bp, Artificial Sequence
  derived and/or modified sequence
atggtgctgaaggccttcttccccacctgctgcgtgtccacagacagcggcctgctggtgggccgctgggtgcctgagcagagcagcgctgtggtgctggccgtgctgcacttccccttcatccccatccaggtgaagcagctgctggcccaggtgcggcaggccagccaggtgggcgtggccgtgctgggcacctggtgccactgccggcaggagcctgaggagagcctgggccgcttcctggagagcctgggcgctgtgttcccccatgagccctggctgcggctgtgccgggagcggggcggcaccttctggagctgtgaggccacccaccggcaggcccccacagcccctggggcccctggagaggaccaggtgatgctgatcttctatgaccagaggcaggtgctgctgagccagctgcacctgcccaccgtgctgcctgaccggcaggccggggccaccacagccagcactggaggcctggccgctgtgtttgacacagtggcccggtctgaggtgctcttcagaagtgacagatttgatgagggccctgtgcggctgagccactggcagagcgagggcgtggaggccagcatcctggccgagctggcccggcgggccagcggccccatctgcctgctgctggccagcctgctgagcctggtgtctgctgtgtctgcctgcagggtcttcaagctgtggcccctgtccttcctgggcagcaagctgagcacctgtgagcagctgaggtag

SEQ ID NO: 144266 - DNA, 945 bp, Artificial Sequence
  derived and/or modified sequence
atggtgctgaaggccttcttccccacctgctgcgtgtccacagacagcggcctgctggtgggccgctgggtgcctgagcagagcagcgctgtggtgctggccgtgctgcacttccccttcatccccatccaggtgaagcagctgctggcccaggtgcggcaggccagccaggtgggcgtggccgtgctgggcacctggtgccactgccggcaggagcctgaggagagcctgggccgcttcctggagagcctgggcgctgtgttcccccatgagccctggctgcggctgtgccgggagcggggcggcaccttctggagctgtgaggccacccaccggcaggcccccacagcccctggggcccctggagaggaccaggtgatgctgatcttctatgaccagaggcaggtgctgctgagccagctgcacctgcccaccgtgctgcctgaccggcaggccggggccaccacagccagcactggaggcctggccgctgtgtttgacacagtggcccggtctgaggtgctcttcagaagtgacagatttgatgagggccctgtgcggctgagccactggcagagcgagggcgtggaggccagcatcctggccgagctggcccggcgggccagcggccccatctgcctgctgctggccagcctgctgagcctggtgtctgctgtgtctgcctgcagggtcttcaagctgtggcccctgtccttcctgggcagcaagctgagcacctgtgagcagctgcggcaccggctggagcacctgaccctcatcttcagcaccaggaaggcagaaaatcctgcccagctgatgaggaaggccaacacagtggcctctgtgctgctggatgtggccctgggcctgatgctgctgtcctggctgcacggccgcagccgcatcggccacctggctgatgccctggtgcctgtggccgactag

SEQ ID NO: 144267 - DNA, 339 bp, Artificial Sequence
  derived and/or modified sequence
atggtgctgaaggccttcttccccacctgctgcgtgtccacagacagcggcctgctggtgggccgctgggtgcctgagcagagcagcgctgtggtgctggccgtgctgcacttccccttcatccccatccaggtgaagcagctgctggcccaggtgcggcaggccagccaggtgggcgtggccgtgctgggcacctggtgccactgccggcaggagcctgaggagagcctgggccgcttcctggagagcctgggcgctgtgttcccccatgagccctggctgcggctgtgccgggagcggggcggcaccttctggagctgtgaggccacccacaggtag

SEQ ID NO: 144268 - DNA, 1725 bp, Artificial Sequence
  derived and/or modified sequence
atgtggtgggccctgcggcccccaggcatcctgcccccaggcatggtgctgaaggccttcttccccacctgctgcgtgtccacagacagcggcctgctggtgggccgctgggtgcctgagcagagcagcgctgtggtgctggccgtgctgcacttccccttcatccccatccaggtgaagcagctgctggcccaggtgcggcaggccagccaggtgggcgtggccgtgctgggcacctggtgccactgccggcaggagcctgaggagagcctgggccgcttcctggagagcctgggcgctgtgttcccccatgagccctggctgcggctgtgccgggagcggggcggcaccttctggagctgtgaggccacccaccggcaggcccccacagcccctggggcccctggagaggaccaggtgatgctgatcttctatgaccagaggcaggtgctgctgagccagctgcacctgcccaccgtgctgcctgaccggcaggccggggccaccacagccagcactggaggcctggccgctgtgtttgacacagtggcccggtctgaggtgctcttcagaagtgacagatttgatgagggccctgtgcggctgagccactggcagagcgagggcgtggaggccagcatcctggccgagctggcccggcgggccagcggccccatctgcctgctgctggccagcctgctgagcctggtgtctgctgtgtctgcctgcagggtcttcaagctgtggcccctgtccttcctgggcagcaagctgagcacctgtgagcagctgcggcaccggctggagcacctgaccctcatcttcagcaccaggaaggcagaaaatcctgcccagctgatgaggaaggccaacacagtggcctctgtgctgctggatgtggccctgggcctgatgctgctgtcctggctgcacggccgcagccgcatcggccacctggctgatgccctggtgcctgtggccgaccacgtggccgaggagctgcagcacctgctgcagtggctgatgggcgccccagctggcctgaagatgaacagagccctggaccaggtgctgggccgcttcttcctgtaccacatccacctgtggatctcctacatccacctgatgagcccctttgtggagcacatcctgtggcacgtgggcctgagcgcctgcctgggcctgactgtggccctgagcctgctgagtgacatcatcgccctgctgaccttccacatctactgcttctacgtgtatggagcccggctgtactgcctgaagatccacggcctgagcagcctgtggaggctcttccggggcaagaagtggaatgtgctgcggcagagggtggacagctgcagctatgacctggaccagctgttcatcggcaccctgctcttcaccatcctgctcttcctgctgcccaccacagccctgtactacctggtgttcaccctgctgcggctgctggtggtggccgtgcagggcctcatccacctgctggtggacctgatcaacagcctgcccctgtacagcctgggcctgcggctgtgccggccctaccgcctggccggcagcgagccctggaggcctgaggccaccggcctgtgcagcagcgccctgggcttcagcggcctgggcagcctgaactgcaggcctggggccaagaggggcaaggtgcggggcaccaggagccagcagggcggccaccaccccctggcctag

SEQ ID NO: 144269 - DNA, 900 bp, Artificial Sequence
  derived and/or modified sequence
atggtgctgaaggccttcttccccacctgctgcgtgtccacagacagcggcctgctggtgggccgctgggtgcctgagcagagcagcgctgtggtgctggccgtgctgcacttccccttcatccccatccaggtgaagcagctgctggcccaggtgcggcaggccagccaggtgggcgtggccgtgctgggcacctggtgccactgccggcaggagcctgaggagagcctgggccgcttcctggagagcctgggcgctgtgttcccccatgagccctggctgcggctgtgccgggagcggggcggcaccttctggagctgtgaggccacccaccggcaggcccccacagcccctggggcccctggagaggaccaggtgatgctgatcttctatgaccagaggcaggtgctgctgagccagctgcacctgcccaccgtgctgcctgaccggcaggccggggccaccacagccagcactggaggcctggccgctgtgtttgacacagtggcccggtctgaggtgctcttcagaagtgacagatttgatgagggccctgtgcggctgagccactggcagagcgagggcgtggaggccagcatcctggccgagctggcccggcgggccagcggccccatctgcctgctgctggccagcctgctgagcctggtgtctgctgtgtctgcctgcagggtcttcaagctgtggcccctgtccttcctgggcagcaagctgagcacctgtgagcagctgcggcaccggctggagcacctgaccctcatcttcagcaccaggaaggcagaaaatcctgcccagctgatgagatgtggccctgccctggtgtctgctggcctgggcgcctgccccctggcccccagccccagccccagcgcccccaggtag

SEQ ID NO: 144270 - DNA, 447 bp, Artificial Sequence
  derived and/or modified sequence
atggtgctgaaggccttcttccccacctgctgcgtgagcaccgactccggactcctagtgggacgctgggtgccggaacagtcctctgccgtggtgctggccgtacttcatttccctttcattcctattcaagtgaaacagctcctggctcaggtccgccaagcgtcccaagtcggcgtcgccgttctggggacatggtgtcactgtaggcaggaacctgaggaaagcctgggccggtttctggaaagcttaggggcagtttttccccacgagccctggctccggctctgccgtgagcgcggtgggaccttttggtcatgcgaagctacccataggcaggcgcctaccgcgcctggcgccccaggcgaggaccaagtgatgctgatcttttatgaccagcgacaggttttgctttcgcaactccatttgcctactgtgttaccatag

SEQ ID NO: 144271 - DNA, 1746 bp, Artificial Sequence
  derived and/or modified sequence
atggtgctgaaggccttcttccccacctgctgcgtgagcaccgacagcggcttgctagtcggccggtgggtgccggagcaatcctctgccgtggtgcttgctgtgctgcactttccttttatccctatccaggtcaagcaactcctggctcaggttcggcaggcttcccaggtaggcgttgcagtgcttggcacttggtgtcactgccgccaggagcctgaggagtccctggggcgtttcctggaaagtctcggagcagtgtttccccacgagccctggctgaggttgtgtcgagaaagagggggaacattctggagttgtgaggccacccatcggcaggcaccgactgctccaggcgcgcctggggaagatcaggtcatgcttatcttctatgatcagcgccaggttttgctgagtcagctgcatctacctactgtgctacctgaccggcaggcaggtgctacaaccgctagcaccggaggcctggctgccgtgttcgatactgtggccaggtccgaagtactctttcgatcggatagattcgacgaggggcctgtccgcctgtcacactggcagagcgaaggagtggaagcgagcatcctggctgagttggctcgaagagccagcggccccatctgcctcttacttgcttcactgctgagccttgtctccgctgtgtccgcatgtagagtcttcaaattatggcccttatcttttttggggagcaaactgtccacgtgtgaacagcttagacacagactggaacacttaacgttgatcttcagcacccgcaaggccgagaatcccgcgcagctgatgcgcaaggccaacaccgtggccagtgtcctgctcgatgtggctcttggcttgatgctgctgagctggttgcatggccgcagtcggataggccacctcgctgatgcactggtccctgtggccgatcacgtagctgaggagttgcagcacctgttgcagtggctgatgggggcaccagccgggctgaagatgaacagggccttggatcaggtgctcggtagattctttctttaccacatacacctgtggatttcgtacattcacctaatgagcccattcgtggaacatatcctatggcatgttggactgagcgcgtgcttaggtttgacagttgcgttgtccctgcttagcgatatcattgcactgctgacattccacatctactgtttttacgtctacggggcgcggctgtattgcctcaagatccacggtctatcctccctctggcgcctcttccggggcaaaaagtggaatgtactccgtcagagagttgatagctgctcctacgatttagatcagcttttcattggaacccttctatttaccatcctcctgttcctgctgccaacgactgccctgtactacttggtttttaccctactccgacttctggtagtggcagtgcaaggtctgattcaccttctcgtcgatctaatcaactccctgcccctgtactcactggggctgcgcttgtgccgaccttaccgactagctgccggcgtgaagttcagagtgctccggcacgaagcagggaggccccttcggctgctgatgcaaataaatcctctcccttacagtcgagtggtgcatacataccgtctcccaagctgcggctgccatcccaagcacagctggggtgctctgtgcaggaagctctttctgggagagcttatttatccttggcggcagcggggcgacaagcaagattag

SEQ ID NO: 144272 - DNA, 756 bp, Artificial Sequence
  derived and/or modified sequence
atggtgctgaaggccttcttccccacctgctgcgtgagcaccgacagtggattgcttgtcggtcggtgggttcctgaacagtcctctgctgtggtgctagccgttctgcattttccattcatccctattcaggttaagcagttgctcgcacaggtgcgtcaggcgtcccaggtcggggttgccgttctgggcacatggtgtcactgtcggcaagaaccggaggagtccctaggcagatttctcgaatccttaggggcagtgttccctcatgagccctggctccgtctgtgccgtgagcggggaggaacattttggtcttgcgaggctacacatcggcaggccccgaccgcaccaggcgcccccggagaggaccaggtgatgctaatcttctacgatcagcgtcaggttctgcttagtcagctgcatctgccaactgtgctaccggaccgccaagcaggagccacgacagcttctaccggcggcttggccgccgtattcgacactgtcgccaggtctgaggttctgtttcggtctgatcgattcgatgaggggcccgttcgcctctctcactggcagtcagagggcgtagaagcctctattctcgccgagctggctcgtagggccagtgggcctatctgcctgttgttagctagtctgctgtcgttggtttctgccgtgtccgcgtgtcgtgtctttaagctgtggccactcagtttcctggggtccaaattgtcaacttgtgaacagctgcgatag

SEQ ID NO: 144273 - DNA, 1746 bp, Artificial Sequence
  derived and/or modified sequence
atggtgctgaaggccttcttccccacctgctgcgtgagcaccgactcaggactgctcgtggggaggtgggttccagagcagagctccgccgtggtgctcgccgtactacacttcccattcattcctattcaggtcaaacaattgctggcccaagtgagacaggcctcacaggtcggcgtggccgtgctggggacatggtgtcattgccggcaagagcccgaggaatcgctcgggcgattcctggagtctctgggggcggtatttccccacgaaccatggctgcgactgtgccgtgagagaggaggcaccttttggagttgcgaggcgactcatagacaggctccaactgctccgggggcccccggggaagaccaagtgatgcttattttctacgaccagaggcaggtcctcctcagccaactgcacctgccaacagttcttcctgatcgacaagccggcgccacgacagcctcaacaggcggccttgccgcagtgtttgacacagtggcccgaagcgaggtactcttccggagcgatcggttcgacgaaggtccagtcagactttcccactggcagagcgagggagttgaggccagcatcctggctgagctggccagacgagcctctggtccaatttgcctgttactggctagcctcctgtccttggtgtccgccgtgtctgcttgtcgcgtgtttaaattgtggcctctgtcctttctggggtcgaaattgagcacgtgcgaacagctgaggcatcggctggagcacttaaccctgatcttctctactcgcaaagccgaaaaccccgcccagcttatgcggaaggccaacactgtggcttccgttttactggacgttgcactcggtctcatgctcttatcctggttacatggtcgttccaggatcggccaccttgccgatgcattggtgcctgtggccgaccatgtggcagaggagctgcagcacttactacagtggttaatgggagccccagctggcttaaagatgaatagagccctggaccaagtacttggccggttttttctgtaccatatacacttgtggatatcttatatccacctgatgtccccttttgttgagcatattctctggcatgtgggcctgtcagcatgcctaggcttgactgttgcactctcccttctctctgacataatcgccctccttacctttcacatctactgtttctatgtgtatggagcccgcctatactgtctaaagattcacggcttgtctagtctatggcgcctgtttcgaggaaagaaatggaatgtattgcgccagcgagtcgacagttgcagctatgatttagaccagctttttataggcacattactcttcaccattttgctgtttcttctccctactaccgcactgtattaccttgtcttcacattactccgactgctggtcgttgccgttcagggactgatccatctccttgtggacctcataaattcgttgcctttgtattcactgggacttcgcctttgccgaccatatcggctggctgccggagtaaaatttagggtgctgcggcacgaggccggccggccactgcggcttttgatgcaaattaaccccctgccttattccagagtggtccatacatacagactacctagttgtggctgccaccctaaacattcatggggtgccctctgtcgcaagcttttcctaggggaactgatttacccctggaggcaacgcggcgacaagcaggactag

SEQ ID NO: 144274 - DNA, 945 bp, Artificial Sequence
  derived and/or modified sequence
atggtgctgaaggccttcttccccacctgctgcgtgagcaccgacagtggactgctcgtgggtagatgggttcctgagcagtcttctgcggtggttttggccgtgttgcattttccctttattcctatccaagtaaaacagctgctggctcaggttagacaggcttcccaggtcggcgtcgctgtgttaggaacatggtgccactgccgacaagagcccgaggagtcattgggtaggtttcttgaaagcctgggggcggtctttcctcacgagccatggttgcgcctgtgccgagaacggggcgggaccttctggagctgtgaggcaacacatcggcaagcgcccactgcgccgggcgctccgggcgaggaccaggtgatgctgatcttctatgaccaaaggcaagtgctcttatcacaactccatttgccaactgtgctgcccgatcggcaggccggtgccactacagcctccacagggggccttgcagcagtgttcgataccgtcgccaggagcgaagtgctattcaggtcagatcggttcgatgagggcccagtccgactgtctcactggcagtcagagggagttgaagcgagcattctcgctgaactggcccgtagggcaagcggccccatctgtttgctgcttgcatcactcctttctctcgtgtcagcggtgtccgcttgtagggtttttaaactctggccattgagctttcttggatctaagcttagtacttgcgagcaactgagacaccgactcgagcatctcacactgattttttccacacgtaaggccgaaaatccagcccaactaatgcgcaaggcaaacaccgtggcgagcgtattattagacgtagccctgggactgatgttactgagctggttgcacggccgatcacgtatcggtcatttggcagacgcgctcgtgcctgtcgctgactag

SEQ ID NO: 144275 - DNA, 339 bp, Artificial Sequence
  derived and/or modified sequence
atggtgctgaaggccttcttccccacctgctgcgtgagcaccgacagtggtttgctggtcggtcgatgggttcccgagcaatcatctgctgtggtcctggccgtactgcactttccatttattccaatccaggttaagcagctcttagcacaagtcaggcaggcaagtcaggttggagttgctgttttaggcacatggtgtcactgtaggcaggagccagaagaaagcttagggcgctttcttgagtcccttggggcggtgttcccccacgaaccctggctccgcctgtgccgagagcggggggggaccttctggtcgtgcgaagccacacacagatag

SEQ ID NO: 144276 - DNA, 1725 bp, Artificial Sequence
  derived and/or modified sequence
atgtggtgggccctgcggccccccggcatcctgccccccggcatggttctcaaggcttttttccctacatgttgcgtcagtacagatagcggcttgcttgtaggccgctgggtgccagaacagagctccgccgtcgtgttagcagtcctgcattttcctttcatccccatacaagttaaacagctcctcgcacaggttagacaggcatcacaggtcggcgttgccgtgctcggcacttggtgtcattgcaggcaggaacccgaggagagcctagggagatttctcgagtcccttggtgccgtgtttcctcatgaaccctggttgagattgtgccgagagcggggtgggaccttctggagctgcgaagccacgcaccggcaggctccaactgcccccggagcccctggcgaggaccaggtaatgctgatcttctatgaccagagacaggtcctgctgagccagttacacctccccactgtgctaccggataggcaggctggggctaccacagccagtacagggggtctagccgcggtctttgacaccgtggccagatcagaagtactgttccggagcgaccggttcgatgaagggcccgtacgcctcagccactggcagtctgagggagtcgaggcctccatcttggccgaactcgcgcgacgggcatcaggaccaatttgtctgttgctggcaagcctgctttcactcgtaagtgcggtctctgcctgtagagttttcaagctttggccgctgagttttttaggctccaagctgagcacctgcgaacagctgcggcaccggctggaacatctgaccctaattttctcaacgcgtaaggccgagaacccggcgcaactcatgaggaaggccaacaccgttgcctcagtgctgctggatgtggcacttgggctgatgctgttgtcttggttgcacggccgcagtagaatcggacatttggccgatgctttagtgccagttgctgaccacgtcgctgaggagctgcaacacctgctgcagtggcttatgggtgcaccagccggactcaaaatgaatagagccctcgaccaagttctcggaaggttcttcctgtaccatatccacctgtggatttcctatattcacctgatgtccccgttcgtcgaacatatactctggcacgtcggacttagcgcctgcctcggcctgacagtagctctgagcctcctttccgacatcatcgcactgctgacattccacatttactgcttctacgtttacggtgcaaggttatactgcctcaagattcacggactgagcagtctgtggaggctgtttagggggaaaaagtggaacgtgctgagacagcgagtcgatagttgtagctacgatcttgatcaattattcattggcacacttctgtttaccatactcctattcctgttacctactaccgccctgtactatctggtctttaccctcttaagattgctggtggtggccgtgcagggcctgattcatctcctggtggatttgatcaactcccttcctctctattccctgggactccgactgtgcagaccttatagattggctggttcagaaccttggaggcccgaggccactggtctgtgcagctccgcactgggattttctggactcggttcactgaactgccgaccgggcgctaaacgtgggaaagttaggggcacacgctctcaacaagggggacatcacccgttggcctag

SEQ ID NO: 144277 - DNA, 900 bp, Artificial Sequence
  derived and/or modified sequence
atggtgctgaaggccttcttccccacctgctgcgtgagcaccgacagtggtttactcgtagggaggtgggtgccggaacaaagcagtgcggtggtcctggctgtgctccacttcccttttatacctattcaggtgaaacagttgttagcccaggttcgacaggcgagccaggttggggtcgcggtcttaggcacgtggtgccactgcagacaggagcctgaggagagtcttggccgatttcttgaaagcctgggcgctgtgtttccccacgagccgtggctgcggttatgcagagagagaggggggactttctggagctgcgaagcaacacaccgtcaagcccccaccgccccgggcgctcctggtgaggatcaggtaatgctgatcttctacgatcagagacaggtgctgctctcgcagctgcacctaccgacagtccttccagatcgccaagcaggagccacaacggccagcacgggcggattagccgcagtatttgacactgtggctcggtctgaagttctgttcaggtccgatcgcttcgacgagggtcctgtcaggctgtcccattggcaatcagaaggcgtagaggccagcattctcgccgaactggcacgacgtgcctcaggccccatttgtctgctgttggcaagtctgctgagcctggttagtgcagtgagtgcatgtcgcgtgtttaaactgtggcctttgagcttcctgggcagtaaattgagcacctgcgagcaactgagacacaggctggaacatctcacgctcatattttctacaagaaaggccgagaacccggcgcagctcatgcggtgcggtcctgccctggtgagcgccggtcttggtgcatgtcctttagcacctagcccgtctcctagcgctcccaggtag

SEQ ID NO: 144278 - DNA, 603 bp, Artificial Sequence
  derived and/or modified sequence
cacttcctccagttctagtttccaacaacagaggctgcagccacccagccccgaagcagggcccagcgagacagggcccagccccaagcgtgacccagctgcagagaagctgagacggtgattcggactgactggactctggcctccagcctcccggcatggtgctcaaggccttcttccccacgtgctgcgtctcgacggacagcgggctgctggtgggacggtgggtgccggagcagagcagcgccgtggtcctggcggtcctgcactttcccttcatccccatccaggtcaagcagctcctggcccaggtgcggcaggccagccaggtgggcgtggccgtgctgggcacctggtgccactgccggcaggagcccgaggagagcctgggccgcttcctggagagcctgggtgctgtcttcccccatgagccctggctgcggctgtgccgggagagaggcggcacgttctggagctgcgaggccacccaccggcaagcgcccactgcccccggtgcccctggtgaggaccaggtcatgctcatcttctatgaccagcgccaggtgttgctgtcacagctacacctgcccaccgtcctgcccg

SEQ ID NO: 144279 - DNA, 3006 bp, Artificial Sequence
  derived and/or modified sequence
gcggcaacgcgcggagccggcggaagtggggctcgggtcccgcggcggggctggaggcagcgagcgccgtcgtctgcccgggcccgcccatcggggtccccaaccccatccggaccccgccgcccgagcgcgcggccccggaagcacccgcctcccggcatggtgctcaaggccttcttccccacgtgctgcgtctcgacggacagcgggctgctggtgggacggtgggtgccggagcagagcagcgccgtggtcctggcggtcctgcactttcccttcatccccatccaggtcaagcagctcctggcccaggtgcggcaggccagccaggtgggcgtggccgtgctgggcacctggtgccactgccggcaggagcccgaggagagcctgggccgcttcctggagagcctgggtgctgtcttcccccatgagccctggctgcggctgtgccgggagagaggcggcacgttctggagctgcgaggccacccaccggcaagcgcccactgcccccggtgcccctggtgaggaccaggtcatgctcatcttctatgaccagcgccaggtgttgctgtcacagctacacctgcccaccgtcctgcccgaccgccaggctggagccaccactgccagcacggggggcctggctgccgtcttcgacacggtagcacgcagtgaggtgctcttccgcagtgaccgctttgatgagggccccgtgcggctgagccactggcagtcggagggcgtggaggccagcatcctcgcggagctggccaggcgagcctcgggacccatttgcctgctgttggccagcctgctgtcgctggtctcagctgtcagtgcctgccgagtgttcaagctctggcccctgtccttcctcgggagcaaactctccacgtgcgaacagctccggcaccggctggagcacctcacgctaatcttcagtacacggaaggcggagaaccctgcccagctgatgaggaaggccaacacggtggcctctgtgctgctggacgtggccctgggcctcatgctgctgtcctggctccacgggagaagccgcatcgggcatctggccgacgccctcgttcctgtggctgaccacgtggccgaggagctccagcatctgctgcagtggctgatgggtgctcccgccgggctcaagatgaaccgtgcactggaccaggtgctgggccgcttcttcctctaccacatccacctgtggatcagctacatccacctcatgtcccccttcgtggagcacatcctttggcacgtgggcctctcggcctgcctgggcctgacggtggccctgtccctcctctcggacattatcgccctcctcaccttccacatctactgcttttacgtctatggagccaggctgtactgcctgaagatccatggcctgtcctcactgtggcgtctgttccgggggaagaagtggaacgttctgcgccagcgcgtggactcctgttcctatgacctggaccagctgttcatcgggactctgctcttcaccatcctgctcttcctcctgcctaccacagccctgtactacctggtgttcaccctgctccggctcctggtggtcgccgtgcagggcctgatccatctgctcgtggacctcatcaactccctgccgctgtactcactgggtcttcggctctgccggccctacaggctggcggctggcgtgaagttccgtgtcctccggcacgaggccggcaggcccctccgcctcctgatgcagataaacccactgccctacagccgcgtggtgcacacctaccgcctccccagctgtggctgccaccccaagcactcctggggcgccctgtgccgcaagctgttccttggggagctcatctacccctggaggcagagaggggacaagcaggactgagggaactgctggctcgcctggcaccaccacacggccacagccagccatctgctctgccagggtggcaccagctcagctggcgcatgtcctgtgctttgtggacgctgctgtgtgctcctgaacacggcaggccctgctatcacaccttgggcttggaggtcattgggagtgagcagatgtgggggtggccagccaggctggccgcactccatcactggcactgcctgccttgggacccgcttcccacctgctgcggtcaccatggtggcgagcacagcaaccccaggtgtccagagcactgccccatgcccaccctgtgtacccaggtccagagggtccgtccaccacagcagccccaggtggagggctggtctccctgggggctccccagtggctctgccctggctgtgggggtggagggaccttgccaggatgaaccccccagtcccaggcaccctctagctccctcagccgaacagcaccctgcatctgggggattgaagcagtcgctgacccccgtccccagcgggcccgggccctcactccctgaaccacacggggtttatttgcggatgttccctggagaggtcgctttgtgaagaaaccatcagcaggctgtgagcatcgccaggctgctgtgggggcgggagcagcctcagtgtcaagggcccgcccactgacccagccgtacctattcgtccacggtgccccgtagcagcaggtcctgcggccaaatctgtctcccttcatgggcctcccagggaaggaggaagccctgctgtgcagacacctctgtggccccccaggagtgtgagtggcctggggagggggccgtggcactgaggccgaaagtgcctgccagacggcacggtctgggtgcgggtgttccctgtgagcccgagtccgcttcaggaggggagcctgcaggtgccggctggtgaggggatgacgcgctgtgggtgggaggaggcagcgcccatctcagcagcaccaggactgcctgggactccctggcaacccagcaccggggaagccgtcagctgctgtgacaataaaacctgccccgtgtctggagcgcaggctcggtcccgggtccatgtg

SEQ ID NO: 144280 - DNA, 916 bp, Artificial Sequence
  derived and/or modified sequence
aggcctcctaatcgggggcagacaggcagggagggtgtggctgggctgggctgggcggggcggcctggggcaggggtgtggcccctaaatgtccccaacctcagagggacctagagtcctgagcctccagtagcttctctgggcctggcagagcctcccggcatggtgctcaaggccttcttccccacgtgctgcgtctcgacggacagcgggctgctggtgggacggtgggtgccggagcagagcagcgccgtggtcctggcggtcctgcactttcccttcatccccatccaggtcaagcagctcctggcccaggtgcggcaggccagccaggtgggcgtggccgtgctgggcacctggtgccactgccggcaggagcccgaggagagcctgggccgcttcctggagagcctgggtgctgtcttcccccatgagccctggctgcggctgtgccgggagagaggcggcacgttctggagctgcgaggccacccaccggcaagcgcccactgcccccggtgcccctggtgaggaccaggtcatgctcatcttctatgaccagcgccaggtgttgctgtcacagctacacctgcccaccgtcctgcccgaccgccaggctggagccaccactgccagcacggggggcctggctgccgtcttcgacacggtagcacgcagtgaggtgctcttccgcagtgaccgctttgatgagggccccgtgcggctgagccactggcagtcggagggcgtggaggccagcatcctcgcggagctggccaggcgagcctcgggacccatttgcctgctgttggccagcctgctgtcgctggtctcagctgtcagtgcctgccgagtgttcaagctctggcccctgtccttcctcgggagcaaactctccacgtgcgaacagctccggc

SEQ ID NO: 144281 - DNA, 1915 bp, Artificial Sequence
  derived and/or modified sequence
ctagtttccaacaacagaggctgcagccacccagccccgaagcagggcccagcgagacagggcccagtggggccttattctctctcttgcagccccaagcgtgacccagctgcagagaagctgagacggtgattcggactgactggactctggcctccagcctcccggcatggtgctcaaggccttcttccccacgtgctgcgtctcgacggacagcgggctgctggtgggacggtgggtgccggagcagagcagcgccgtggtcctggcggtcctgcactttcccttcatccccatccaggtcaagcagctcctggcccaggtgcggcaggccagccaggtgggcgtggccgtgctgggcacctggtgccactgccggcaggagcccgaggagagcctgggccgcttcctggagagcctgggtgctgtcttcccccatgagccctggctgcggctgtgccgggagagaggcggcacgttctggagctgcgaggccacccaccggcaagcgcccactgcccccggtgcccctggtgaggaccaggtcatgctcatcttctatgaccagcgccaggtgttgctgtcacagctacacctgcccaccgtcctgcccgaccgccaggctggagccaccactgccagcacggggggcctggctgccgtcttcgacacggtagcacgcagtgaggtgctcttccgcagtgaccgctttgatgagggccccgtgcggctgagccactggcagtcggagggcgtggaggccagcatcctcgcggagctggccaggcgagcctcgggacccatttgcctgctgttggccagcctgctgtcgctggtctcagctgtcagtgcctgccgagtgttcaagctctggcccctgtccttcctcgggagcaaactctccacgtgcgaacagctccggcaccggctggagcacctcacgctaatcttcagtacacggaaggcggagaaccctgcccagctgatgaggaaggccaacacggtggcctctgtgctgctggacgtggccctgggcctcatgctgctgtcctggctccacgggagaagccgcatcgggcatctggccgacgccctcgttcctgtggctgaccacgtggccgaggagctccagcatctgctgcagtggctgatgggtgctcccgccgggctcaagatgaaccgtgcactggaccaggtgctgggccgcttcttcctctaccacatccacctgtggatcagctacatccacctcatgtcccccttcgtggagcacatcctttggcacgtgggcctctcggcctgcctgggcctgacggtggccctgtccctcctctcggacattatcgccctcctcaccttccacatctactgcttttacgtctatggagccaggctgtactgcctgaagatccatggcctgtcctcactgtggcgtctgttccgggggaagaagtggaacgttctgcgccagcgcgtggactcctgttcctatgacctggaccagctgttcatcgggactctgctcttcaccatcctgctcttcctcctgcctaccacagccctgtactacctggtgttcaccctgctccggctcctggtggtcgccgtgcagggcctgatccatctgctcgtggacctcatcaactccctgccgctgtactcactgggtcttcggctctgccggccctacaggctggcggctggcgtgaagttccgtgtcctccggcacgaggccggcaggcccctccgcctcctgatgcagataaacccactgccctacagccgcgtggtgcacacctaccgcctccccagctgtggctgccaccccaagcactcctggggcgccctgtgccgcaagctgttccttggggagctcatctacccctggaggcagagaggggacaagcaggactga

SEQ ID NO: 144282 - DNA, 1286 bp, Artificial Sequence
  derived and/or modified sequence
gtagttaggtgctcaataaacggagttgccgctgaggtctgggctggggtcttgttcctgggatcgggaggggctggacgcctgtgtgttctctcctgacgatcgctggcggcagcctctgggctggtcctaccagggctcaaaattcccggcaccactggccttggggatctgggggcggcccctctgcagacaacagagtgacgggggcgggaccgggctggggctggggccttcctggaatcccgcagggcctggggacctgttcacttggggaggctgggagccaggcggggtccgggttccacgaaggccaggtccagtcagtttctcagcctcccggcatggtgctcaaggccttcttccccacgtgctgcgtctcgacggacagcgggctgctggtgggacggtgggtgccggagcagagcagcgccgtggtcctggcggtcctgcactttcccttcatccccatccaggtcaagcagctcctggcccaggtgcggcaggccagccaggtgggcgtggccgtgctgggcacctggtgccactgccggcaggagcccgaggagagcctgggccgcttcctggagagcctgggtgctgtcttcccccatgagccctggctgcggctgtgccgggagagaggcggcacgttctggagctgcgaggccacccaccggcaagcgcccactgcccccggtgcccctggtgaggaccaggtcatgctcatcttctatgaccagcgccaggtgttgctgtcacagctacacctgcccaccgtcctgcccgaccgccaggctggagccaccactgccagcacggggggcctggctgccgtcttcgacacggtagcacgcagtgaggtgctcttccgcagtgaccgctttgatgagggccccgtgcggctgagccactggcagtcggagggcgtggaggccagcatcctcgcggagctggccaggcgagcctcgggacccatttgcctgctgttggccagcctgctgtcgctggtctcagctgtcagtgcctgccgagtgttcaagctctggcccctgtccttcctcgggagcaaactctccacgtgcgaacagctccggcaccggctggagcacctcacgctaatcttcagtacacggaaggcggagaaccctgcccagctgatgaggaaggccaacacggtggcctctgtgctgctggacgtggccctgggcctcatgctgctgtcctggctccacgggagaagccgcatcgggcatctggccgacgccctcgttcctgtggctgac

SEQ ID NO: 144283 - DNA, 586 bp, Artificial Sequence
  derived and/or modified sequence
ggaagtggggctcgggtcccgcggcggggctggaggcagcgagcgccgtcgtctgcccgggcccgcccatcggggtccccaaccccatccggaccccgccgcccgagcgcgcggccccggaagcacccgtagagacttggtttcacccccatcgaggctggtcttaagctcctgacctcaagtgatccgcccgcctcggcctcccaaagtgctgggattacaggcgtgagccaccgcgccagcctcccggcatggtgctcaaggccttcttccccacgtgctgcgtctcgacggacagcgggctgctggtgggacggtgggtgccggagcagagcagcgccgtggtcctggcggtcctgcactttcccttcatccccatccaggtcaagcagctcctggcccaggtgcggcaggccagccaggtgggcgtggccgtgctgggcacctggtgccactgccggcaggagcccgaggagagcctgggccgcttcctggagagcctgggtgctgtcttcccccatgagccctggctgcggctgtgccgggagagaggcggcacgttctggagctgcgaggccacccaccg

SEQ ID NO: 144284 - DNA, 2054 bp, Artificial Sequence
  derived and/or modified sequence
agaggacttacaggtcacaccaccccgacgtgtgcatcctgctctgttccctcgtccctaaggatgtggtgggctctgagacctccaggcatcctgcctcccggcatggtgctcaaggccttcttccccacgtgctgcgtctcgacggacagcgggctgctggtgggacggtgggtgccggagcagagcagcgccgtggtcctggcggtcctgcactttcccttcatccccatccaggtcaagcagctcctggcccaggtgcggcaggccagccaggtgggcgtggccgtgctgggcacctggtgccactgccggcaggagcccgaggagagcctgggccgcttcctggagagcctgggtgctgtcttcccccatgagccctggctgcggctgtgccgggagagaggcggcacgttctggagctgcgaggccacccaccggcaagcgcccactgcccccggtgcccctggtgaggaccaggtcatgctcatcttctatgaccagcgccaggtgttgctgtcacagctacacctgcccaccgtcctgcccgaccgccaggctggagccaccactgccagcacggggggcctggctgccgtcttcgacacggtagcacgcagtgaggtgctcttccgcagtgaccgctttgatgagggccccgtgcggctgagccactggcagtcggagggcgtggaggccagcatcctcgcggagctggccaggcgagcctcgggacccatttgcctgctgttggccagcctgctgtcgctggtctcagctgtcagtgcctgccgagtgttcaagctctggcccctgtccttcctcgggagcaaactctccacgtgcgaacagctccggcaccggctggagcacctcacgctaatcttcagtacacggaaggcggagaaccctgcccagctgatgaggaaggccaacacggtggcctctgtgctgctggacgtggccctgggcctcatgctgctgtcctggctccacgggagaagccgcatcgggcatctggccgacgccctcgttcctgtggctgaccacgtggccgaggagctccagcatctgctgcagtggctgatgggtgctcccgccgggctcaagatgaaccgtgcactggaccaggtgctgggccgcttcttcctctaccacatccacctgtggatcagctacatccacctcatgtcccccttcgtggagcacatcctttggcacgtgggcctctcggcctgcctgggcctgacggtggccctgtccctcctctcggacattatcgccctcctcaccttccacatctactgcttttacgtctatggagccaggctgtactgcctgaagatccatggcctgtcctcactgtggcgtctgttccgggggaagaagtggaacgttctgcgccagcgcgtggactcctgttcctatgacctggaccagctgttcatcgggactctgctcttcaccatcctgctcttcctcctgcctaccacagccctgtactacctggtgttcaccctgctccggctcctggtggtcgccgtgcagggcctgatccatctgctcgtggacctcatcaactccctgccgctgtactcactgggtcttcggctctgccggccctacaggctggcgggttcagaaccctggagacctgaggccacaggcctttgttcttctgccttgggattttctgggcttgggagtctgaactgcaggccaggggccaagcgcggcaaagtcagaggcactaggagccagcagggcggccaccatccactggcgtgaagttccgtgtcctccggcacgaggccggcaggcccctccgcctcctgatgcagataaacccactgccctacagccgcgtggtgcacacctaccgcctccccagctgtggctgccaccccaagcactcctggggcgccctgtgccgcaagctgttccttggggagctcatctacccctggaggcagagaggggacaagcaggactgagggaactgctggctcgcctggcaccaccacacggccacagccagccatctgctctgccag

SEQ ID NO: 144285 - DNA, 2112 bp, Artificial Sequence
  derived and/or modified sequence
cccgccgcccgagcgcgcggccccggaagcacccgcctcccggcatggtgctcaaggccttcttccccacgtgctgcgtctcgacggacagcgggctgctggtgggacggtgggtgccggagcagagcagcgccgtggtcctggcggtcctgcactttcccttcatccccatccaggtcaagcagctcctggcccaggtgcggcaggccagccaggtgggcgtggccgtgctgggcacctggtgccactgccggcaggagcccgaggagagcctgggccgcttcctggagagcctgggtgctgtcttcccccatgagccctggctgcggctgtgccgggagagaggcggcacgttctggagctgcgaggccacccaccggcaagcgcccactgcccccggtgcccctggtgaggaccaggtcatgctcatcttctatgaccagcgccaggtgttgctgtcacagctacacctgcccaccgtcctgcccgaccgccaggctggagccaccactgccagcacggggggcctggctgccgtcttcgacacggtagcacgcagtgaggtgctcttccgcagtgaccgctttgatgagggccccgtgcggctgagccactggcagtcggagggcgtggaggccagcatcctcgcggagctggccaggcgagcctcgggacccatttgcctgctgttggccagcctgctgtcgctggtctcagctgtcagtgcctgccgagtgttcaagctctggcccctgtccttcctcgggagcaaactctccacgtgcgaacagctccggcaccggctggagcacctcacgctaatcttcagtacacggaaggcggagaaccctgcccagctgatgaggtgtgggcctgccctggtctctgcagggctgggtgcgtgccctctggccccttctccatccccctctgcaccacgctgacccctccggccaggcaggcctcctcctgcggccccaggctgtgctggccaccctcatgccggccgggccggacctcccttccaggaaggccaacacggtggcctctgtgctgctggacgtggccctgggcctcatgctgctgtcctggctccacgggagaagccgcatcgggcatctggccgacgccctcgttcctgtggctgacgtgagtggactggggtggagcccggtgtcccgggtgggcgtggggacccctcctgggcagcagagccttcccgggccagagccaccgccccacaaagccagttctaccttctccatgctctggagacacggccctcccctgaaccagaagcaggaactccaggggcgctggggcctgggcagggcaggcctcgcaggtacacccccctttccttctgaaggggctgtgtgcaggagccagccgggctgaggctctggggagcccgcctctccctgtgggcccagcgtcctggtatctcccttgtggtccctgagatcagcgttgccctcctggctctctggggccctctgcagagccagggtcatgaaacctttcctgtccagggaggcccatgtgcagcccagctgggacttcctgccctgcccctgtgctgattctgtaactcctgtgctgagagccagaggcacagcttgtctcccatctcccaccttccctgcatggtctgtgccccgtttccagccgggtgcagccccctcctctgcagatctagtgcatttccatgctgcctctgggccttcagcttctctgtcttcctccctcagcaccaaagccccgtctcttccattaggagcttgtcttcctgctgggggtggtacctgactctttggcccaccctcgggcctctgtggaggcctccttgaggcctgactgggtgggtcttgtgtgggctgcaggtgtgcactgggcctgcttgtggccaggccaggcctctgggggcagcatcaggcacgtctgtgtggctgtgggggtgcagggagctccagcccagaaggaaggaggggcggggctggggaaggggctcggcagctttgcctgtggtcgtccgcacctgccaccggcctactttgtcctagacctcccttttgcaaaagtgctcagaaatataaatatttaatttaaaaa

SEQ ID NO: 144286 - DNA, 447 bp, Artificial Sequence
  derived and/or modified sequence
atggttctgaaagctttcttccctacatgttgtgtttccacagactctggactcctggtggggaggtgggtaccagagcagtcaagtgccgtcgttttagccgtcctgcacttcccttttatacccatccaggtgaaacagctgcttgctcaggtgcgacaggcctctcaagtcggcgtcgctgtgctgggcacctggtgtcattgtaggcaggagcccgaagaaagtctcggcaggtttctggagtcccttggggctgtcttcccacacgagccctggttgagactttgtcgtgagaggggcggaaccttttggtcttgtgaggctactcatagacaggcgccaacagcgcctggtgcccctggtgaagatcaggtcatgcttatattctacgatcaacgacaggtgctgttgagccagctacaccttccaacagtgcttccctag

SEQ ID NO: 144287 - DNA, 1746 bp, Artificial Sequence
  derived and/or modified sequence
atggtactcaaagccttctttccaacatgttgcgtgtctaccgactcaggtttactggtcggtaggtgggtacctgaacagtctagcgccgttgtgttagccgtacttcattttccttttatcccgatccaggtcaaacaactcctggcccaggtccgtcaagcctctcaggtaggcgtagccgttcttggcacttggtgtcactgccgtcaggaaccggaagaatctcttggtagattcctggagagcctgggagcagtgtttcctcacgaaccatggctgcgcctctgccgagaacgcggaggaacgttttggtcctgcgaggcaacacacagacaggcccctaccgctccgggagctccgggtgaggaccaggtgatgctcattttttatgaccaacgacaggtgttgctgtctcagctgcacttacccacagttctgcccgatcgacaagccggtgccactaccgcatcaacaggaggcctggctgccgtttttgacactgtggcaagaagtgaggtgctgtttcggtctgaccggttcgacgaagggcctgttcgcctgagtcattggcagagtgaaggggtagaggcatctattctcgccgaactcgcgagaagggccagtgggcctatctgtctccttcttgcctccctgctcagcctcgtctctgccgtatccgcatgccgagtgttcaaactgtggccacttagcttcctcggaagcaagctgtccacctgtgaacaactgagacacaggctcgagcacttgactctgatattctcgaccagaaaggctgaaaatcccgcacagttgatgagaaaggccaacacggttgccagcgttctcttggatgttgcccttggcttgatgctgttgtcttggctccacggtagatctcggattgggcacctcgccgacgcactggtgcccgtggccgaccatgtggctgaggagcttcagcatctgctgcagtggctgatgggggctcctgccggactgaaaatgaatcgcgctttggatcaagtgctgggcagattcttcctgtaccacatacatctgtggattagttatatccatttgatgtctccatttgtcgagcatatcctttggcacgtggggttatctgcctgcctgggcctgactgtggctctctccctgctgtcagacattatcgcgcttttaaccttccacatttactgcttttacgtgtacggggcaaggttgtattgtttgaagatccatggcctctcttcgctgtggaggctgttccgcggaaaaaagtggaatgtcctcagacagagagtcgactcatgcagctatgacctcgaccaactctttattggcactctcctattcaccatcctgcttttcctgctccccactactgccttgtactacttagtcttcacactgctaagacttctggtcgtcgccgtacaaggtctgattcacctactcgtcgacttgatcaattctctgcccctctactctctgggcctccgcctgtgccgcccatatcgactggcagctggcgtgaaattcagagttcttcgccatgaggcaggcagacccctcagactcttaatgcagattaaccccctaccctacagtagggtggtgcatacatacaggctgccctcttgtggttgtcacccgaagcacagctggggcgctctgtgcagaaagcttttcttgggtgaactgatttacccttggaggcaaaggggggacaaacaagactag

SEQ ID NO: 144288 - DNA, 756 bp, Artificial Sequence
  derived and/or modified sequence
atggtgctaaaagctttcttcccaacctgttgtgtgtcaacagatagtggccttctggtaggcagatgggttccagaacagtcaagtgcagtggtcctggccgtgctgcacttccctttcataccaattcaggtcaagcaactcctcgcccaagtgagacaagcgtctcaggttggcgtcgcggtgcttggaacctggtgtcattgtaggcaagagcccgaggagtccctgggcaggtttctcgagtctctaggcgctgtatttccgcacgaaccctggctgagactgtgtcgcgagagaggcggtacattctggtcatgtgaagcaacccacagacaggctcccactgcaccaggtgcaccgggtgaggaccaggttatgcttatcttctacgaccagaggcaggtgctcttaagccagctgcaccttccaaccgtcctgcctgatagacaagctggggctactaccgcgtcaactggaggactggccgctgtatttgacaccgttgccaggagcgaggttctatttcgaagcgacagattcgacgagggtcctgtacgcctatcccattggcaatcagagggagtggaggcgtctatattggcggagctggccagaagagccagcggcccaatatgtcttctcttggcctcgctgctgtccttggtgagcgccgtcagcgcatgcagggtgttcaagctatggccactgtcttttctggggagcaaactatctacttgcgagcaacttaggtag

SEQ ID NO: 144289 - DNA, 1746 bp, Artificial Sequence
  derived and/or modified sequence
atggtgctcaaggcattttttcccacatgttgtgtcagcaccgactctggactgctggtgggcagatgggtacctgaacagtcatctgccgtggttctggccgttctccacttcccctttatacccattcaggtgaagcaactgctggcccaggtgcggcaggcatcacaggtgggggtcgctgtcctgggcacttggtgccactgcagacaggagcccgaagagtccctaggtcgatttctggagtcactcggcgcagtttttccccacgagccctggctgcgcctgtgtcgagagagaggcggtacattttggtcttgcgaggcgacccataggcaagctcctaccgcacctggggctccaggggaagatcaagtgatgcttatattctatgatcagcggcaggtacttttgtctcagcttcatctccctacggtcctgcctgataggcaggcaggagcgactacagcatctaccgggggacttgcggcagtgtttgacactgttgcccgatctgaggtactgttcagaagcgatcgcttcgacgaaggtcctgttagactgtctcactggcagagtgaaggagtcgaggcatctatcctagcagagctcgctcgtcgcgcttctggacccatctgtctactccttgctagcttgttgagcctcgtgtctgcagtctcggcttgccgtgtatttaaactctggccactgtcattcctgggaagcaagcttagcacttgcgaacagctcaggcatcggctcgaacatttgacattgatctttagtacgagaaaagctgagaatccagcccagttgatgcgaaaagccaacactgtcgcgtccgtgctgctcgatgtagctttgggcctcatgcttctttcatggctccatggtcggtcacgcatcgggcatctagcagacgccctagtgcctgtggcagaccacgtggccgaggagctgcagcaccttctccaatggctgatgggggcaccagccggtctgaaaatgaaccgggctttggaccaagttctaggacgattctttctctaccatattcacttatggatctcctatatccacctcatgagcccattcgttgaacatattctctggcatgtggggctgagcgcttgcttgggcctgactgtggctcttagcctgttgtcagatatcatcgccctgctgacatttcacatctactgcttctacgtttacggggctaggctgtattgcctcaagattcatgggctgagctccctctggcgtctgtttaggggcaagaaatggaacgtactccgccaaagggtagattcatgtagctacgacctggatcagcttttcatcggtacgcttctgtttactatcctgctttttttactccccaccactgccctgtattacctggtttttacgctcttaaggctcctggtcgtggctgtacagggcctgatccatctactagtggacctgattaactctctaccactctactccctgggcctgaggctgtgtagaccttaccgtcttgctgcgggtgtaaagttcagggttctccggcatgaggctggtcgccctttgcggctattaatgcagattaatcctctgccgtattcacgggtcgtccacacgtacagactgccctcctgcggctgtcacccgaaacatagctggggggctctttgtcgtaagttgttcctaggcgagctgatctatccttggcgccaaaggggtgacaagcaggattag

SEQ ID NO: 144290 - DNA, 945 bp, Artificial Sequence
  derived and/or modified sequence
atggtcctgaaagccttctttccaacttgttgtgtgtccactgactcaggactcctggtcggaaggtgggtgcctgagcagtctagtgctgtcgtgctggccgtcctgcactttccatttatcccgatccaggtcaagcagctgttggcacaagtccgccaagcgtcacaagtcggggtagccgtgctgggtacctggtgccattgccgccaggagcctgaggaatcacttggtcgtttcttagagtcccttggagcagtgtttcctcatgagccgtggctccggctctgccgtgagcgaggtggaactttttggagctgtgaagccacccatagacaagcacctaccgctcctggagcccctggtgaggaccaggtgatgctgatcttctacgaccagaggcaagtccttctttcccagcttcatttgcctactgtcctcccagatagacaggccggtgccaccacagccagcactggaggcctagccgcagtttttgatactgtcgcccgtagcgaagtattgttcaggtcagataggttcgatgaaggaccagtccggctgtcccattggcagagcgagggagtggaagcctcaattctggccgagctcgcaaggagggcaagcgggcctatttgtctacttttggcctctcttctgtccttggtatctgctgtttccgcctgcagagtttttaagctttggcctctgtcctttctcggcagcaagctttcaacctgcgaacaattgcgccatcgactcgagcacctgacactcatcttcagcaccagaaaggccgagaaccctgctcaactgatgaggaaagccaacacagtcgcgagtgtgcttctagatgtggcattagggctcatgctactgtcctggctccatggcaggagccggatcggccatctcgccgatgccctcgtgccagtggcggactag

SEQ ID NO: 144291 - DNA, 339 bp, Artificial Sequence
  derived and/or modified sequence
atggtgctcaaggcttttttcccaacatgctgtgtgtccacagattcagggttactggttggcaggtgggtcccagagcagtcgtcagctgtggtactcgctgtattgcactttccattcatccctatccaggtcaaacaattgctggcacaggtgcgacaggcctcacaggtaggggtagctgtcctgggcacttggtgccactgcagacaggagccagaagagagtttaggcaggttcctggagtctctcggagcggtcttcccccacgagccctggctccggctctgtcgggagagagggggaaccttttggagctgcgaggccactcatagatag

SEQ ID NO: 144292 - DNA, 1725 bp, Artificial Sequence
  derived and/or modified sequence
atgtggtgggccctgcgccctcctggcattctcccccctgggatggttttgaaggccttcttccccacctgttgtgtgagcaccgatagcggcctgttagtcgggaggtgggtcccagagcagtcctccgcagtagtcctggccgtacttcactttccattcatccctattcaggtcaaacagcttcttgcacaagttaggcaggcctcccaggttggggtcgcagttctaggtacctggtgtcactgccgtcaggaaccggaagaatcgcttgggaggtttttggaatctctcggagcagttttcccccacgaaccctggttaagactatgcagagagagggggggaaccttttggtcctgtgaagcaactcaccgacaggcacctactgcccctggcgctcccggagaggaccaagtgatgctgatattctatgaccaaaggcaagtgttactaagccagctgcatctgccaaccgttctgcccgacaggcaggcgggagctacaactgctagtaccggaggtttggccgctgtgtttgatacagttgcgaggagcgaggtcctgtttcgatccgatcgcttcgatgagggccctgtccggctctcccattggcagagtgaaggcgtcgaagcaagcattttagccgaacttgccaggcgcgcatccggccctatttgcctactgctcgcatccctgctgtcactggtgtccgccgtcagcgcttgcagggtattcaaactatggccattgagtttcttgggcagcaagctgtcgacctgcgagcagttgcgccatcgactggaacaccttaccctgatctttagcactcgcaaggccgaaaatcctgcacagctcatgagaaaggctaatacggtggcttcagtattgctcgacgtggcactgggcctgatgctactaagttggctgcatgggagatcacgcattggacacttagcagacgctcttgtgcctgtggccgatcatgtcgctgaagagctgcagcatctcctgcaatggctgatgggtgctcccgcagggcttaagatgaatcgggctctagaccaggtgctaggtcggttttttctctatcatatccatttgtggatcagctacatccacctgatgtcaccatttgtggagcatattctctggcatgtgggattatcagcctgcttgggcttaacggtggccctgtccctgctgtccgatataattgcactgctgacattccacatatattgtttctacgtgtacggcgcacggctgtattgtctgaagatccacggactgtcctctctctggcgcttattcaggggtaaaaaatggaacgtgctgcgacagagagtggattcctgctcatacgacctagatcagcttttcatcggaacactacttttcactattctgcttttcctgctccccaccaccgccctgtactacctggtgttcaccctgctgagactgcttgtggtcgcggtgcagggactgattcatttgctggtagatcttatcaactccttgcctctgtattcgctggggctccgactgtgtagaccttacagactggctggctctgaaccatggcgaccggaggctaccggcttgtgttcaagcgccctcggattctctggacttgggtctctcaactgcagaccaggggctaagaggggtaaggttcgcggaacccgctcacagcagggagggcatcatcctctagcttag

SEQ ID NO: 144293 - DNA, 900 bp, Artificial Sequence
  derived and/or modified sequence
atggtgctgaaggcctttttccccacctgttgtgtgtccacagacagtggcctgctggttggcagatgggtgccggagcagagttcagccgttgtcctggccgtgctgcacttcccttttattcccatacaggtgaaacagctgttagcgcaggtgcggcaggccagccaagtgggcgttgccgtgctaggtacatggtgccattgcagacaggagcccgaggagagtctcggcaggttcttggaaagcctcggtgcagttttcccacatgagccctggctgcggttgtgcagagagcgcggaggtaccttttggtcatgtgaagcaacgcaccggcaagctccaaccgccccaggggctccgggagaggatcaggtaatgctcatcttttacgatcaacggcaagttctcttgtcacagctgcatctgcccactgtattgcctgaccgccaggccggtgcaaccacagcaagcacgggcggtctagccgctgtatttgatactgtggctcgttctgaggttctgttccgatccgataggtttgacgagggcccagttagactgtcacattggcagtctgagggagtggaggcctcgatcttggctgaacttgccaggagagcgagtgggccaatttgtctgctgttagctagcctgctgtcactcgtgagtgccgtgtccgcatgcagggtctttaagctctggccactgagcttcctcggaagtaaactgagcacttgcgagcagcttaggcatcgactcgaacatctcactctgattttttcaacacggaaagccgaaaatcctgcccagctaatgaggtgtggacctgcgttggtcagtgccggactaggggcttgccccctggcgccatccccttcgccatctgcaccaaggtag

SEQ ID NO: 144294 - protein, 613 aa, Artificial Sequence
  derived and/or modified sequence
MFRCGGLAAGALKQKLVPLVRTVCVRSPRQRNRLPGNLFQRWHVPLELQMTRQMASSGASGGKIDNSVLVLIVGLSTVGAGAYAYKTMKEDEKRYNERISGLGLTPEQKQKKAALSASEGEEVPQDKAPSHVPFLLIGGGTAAFAAARSIRARDPGARVLIVSEDPELPYMRPPLSKELWFSDDPNVTKTLRFKQWNGKERSIYFQPPSFYVSAQDLPHIENGGVAVLTGKKVVQLDVRDNMVKLNDGSQITYEKCLIATGGTPRSLSAIDRAGAEVKSRTTLFRKIGDFRSLEKISREVKSITIIGGGFLGSELACALGRKARALGTEVIQLFPEKGNMGKILPEYLSNWTMEKVRREGVKVMPNAIVQSVGVSSGKLLIKLKDGRKVETDHIVAAVGLEPNVELAKTGGLEIDSDFGGFRVNAELQARSNIWVAGDAACFYDIKLGRRRVEHHDHAVVSGRLAGENMTGAAKPYWHQSMFWSDLGPDVGYEAIGLVDSSLPTVGVFAKATAQDNPKSATEQSGTGIRSESETESEASEITIPPSTPAVPQAPVQGEDYGKGVIFYLRDKVVVGIVLWNIFNRMPIARKIIKDGEQHEDLNEVAKLFNIHED

SEQ ID NO: 144295 - protein, 274 aa, Artificial Sequence
  derived and/or modified sequence
MGKILPEYLSNWTMEKVRREGVKVMPNAIVQSVGVSSGKLLIKLKDGRKVETDHIVAAVGLEPNVELAKTGGLEIDSDFGGFRVNAELQARSNIWVAGDAACFYDIKLGRRRVEHHDHAVVSGRLAGENMTGAAKPYWHQSMFWSDLGPDVGYEAIGLVDSSLPTVGVFAKATAQDNPKSATEQSGTGIRSESETESEASEITIPPSTPAVPQAPVQGEDYGKGVIFYLRDKVVVGIVLWNIFNRMPIARKIIKDGEQHEDLNEVAKLFNIHED

SEQ ID NO: 144296 - protein, 14 aa, Artificial Sequence
  derived and/or modified sequence
TGGLEIDSDFGGFR

SEQ ID NO: 144297 - DNA, 1842 bp, Artificial Sequence
  derived and/or modified sequence
atgttcagatgtggtggcctagccgcaggcgccttaaagcaaaaacttgtgcctctcgtgcgcacagtgtgcgttcgctcaccccgtcagaggaacaggctccctggtaacctgttccagagatggcacgtgccacttgagttgcaaatgaccaggcagatggcgtcttcgggtgcctctggcgggaagatcgacaacagtgtgttggtgctgattgtggggctgagtacagtgggcgccggtgcctacgcctacaaaaccatgaaggaggatgaaaagagatacaacgaaagaatttcaggcctggggttaacacctgagcagaagcagaaaaaagcagccttgtccgcctccgagggggaagaggttcctcaagataaagcccctagccacgtgccatttctgttgattggaggaggtacagctgcctttgcggcagcacgctctattcgcgcgagggatcctggtgccagggtactgatcgtgtctgaggatccagaacttccatacatgcgaccgcctctcagcaaggagctctggttcagcgacgaccctaatgtcacgaaaacccttcggttcaaacaatggaatggaaaagagcgctcaatctattttcaacctccctccttctatgtgtccgctcaggatctgccacacatcgagaacggaggcgtggccgttctgacgggaaaaaaagtggtccagctggacgtccgagacaacatggtcaaactgaatgacggatctcagataacatatgagaaatgcttgatagctaccggcgggacacctcgttccctgtctgcaatcgatagagccggtgcggaggtgaaaagccgcaccactctgttccgcaagattggtgacttccgtagccttgaaaagatctcacgagaggttaagagcatcaccatcattggcggaggctttctcggctcggaacttgcttgcgctttgggccgcaaggcaagagctctggggacagaggtgatacagctctttccagagaaaggcaatatgggaaaaatacttccagagtacctgagcaactggaccatggaaaaggtaagaagagaaggggtgaaggtcatgcctaacgcgattgtgcagtctgtcggcgtgagctccggaaagcttctgatcaagctaaaagacggacgcaaggttgagaccgaccacattgttgccgcagtgggacttgagcctaatgtggagctggccaagaccgggggactggaaattgatagtgatttcggcggcttccgggtcaacgccgagcttcaggctcgaagtaatatctgggtcgccggggacgccgcatgcttctacgacattaagctgggaagaagacgcgtcgaacatcacgatcatgctgtcgtgtccggtagactggccggggagaacatgactggcgctgcaaagccctactggcaccaaagcatgttttggtcagatctggggcctgacgtaggttatgaagctatcgggcttgttgattcttctctacctaccgtaggagtcttcgccaaggctacagcacaggataaccccaaaagcgcgaccgagcaatctggaacgggaatacgcagcgagagcgaaacagaatcagaggcaagcgagattaccatccctcctagtacaccagctgtgccgcaagcccccgtgcaaggagaagattacggcaagggagtgatattctacctgcgcgacaaagtggtcgttggtatcgtgctatggaatatcttcaataggatgcccatcgcgcgtaagataattaaggatggggagcagcacgaggatctcaacgaagtggccaagttgttcaatatccacgaggattag

SEQ ID NO: 144298 - DNA, 1842 bp, Artificial Sequence
  derived and/or modified sequence
atgttccgctgtggcggcctggccgccggggccctgaagcagaagctggtgcccctggtgaggacagtgtgtgtgcgcagcccccggcagaggaaccggctgcccggcaacctcttccagcgctggcacgtgcccctggagctgcagatgacccggcagatggccagcagcggggccagcggcggcaagattgacaacagcgtgctggtgctgattgtgggcctgagcacagtgggcgctggggcctatgcctacaagaccatgaaggaggatgagaagcgctacaatgaaagaatcagcggcctgggcctgaccccagagcagaagcagaagaaggccgccctgagcgccagcgagggggaggaggtgccccaggacaaggcccccagccacgtgcccttcctgctgattggaggcggcacagctgcctttgctgctgcccggagcatccgggcccgggaccccggggcccgggtgctgattgtgtctgaggaccctgagctgccctacatgaggcctcccctgagcaaggagctgtggttcagtgatgaccccaacgtgaccaagaccctgcgcttcaagcagtggaatggcaaggagaggagcatctacttccagcccccatccttctacgtgtctgcccaggacctgccccacattgaaaatggaggagtggccgtgctgaccgggaagaaggtggtgcagctggatgtgcgggacaacatggtgaagctgaatgatggcagccagatcacctatgaaaaatgtctcatcgccaccggcggcacccccaggagcctgagcgccatcgacagagctggagctgaggtgaagagcaggaccaccctcttcaggaagattggagacttccgcagcctggagaagatcagccgggaggtgaagagcatcaccatcatcggcggcggcttcctgggcagcgagctggcctgtgccctgggcaggaaggcccgggccctgggcacagaggtgatccagctgtttcctgagaagggcaacatgggcaagatcctgcctgagtacctgagcaactggaccatggagaaggtgagaagagagggcgtgaaggtgatgcccaatgccatcgtgcagagcgtgggcgtgagcagcggcaagctgctgatcaagctgaaggatggcaggaaggtggagacagaccacatcgtggccgctgtgggcctggagcccaacgtggagctggccaagacaggaggcctggagattgacagcgactttggaggcttccgggtgaatgctgagctgcaggcccggagcaacatctgggtggccggagatgctgcctgcttctatgacatcaagctgggcagaagaagagtggagcaccacgaccatgctgtggtgtctggccgcctggccggggagaacatgaccggggccgccaagccctactggcaccagagcatgttctggagcgacctgggcccagatgtgggctatgaggccatcggcctggtggacagcagcctgcccaccgtgggcgtgtttgccaaggccacagcccaggacaaccccaagagcgccacagagcagagcggcaccggcatccgctctgagagcgagacagagagcgaggccagcgagatcaccatcccccccagcaccccagctgtgccccaggcccctgtgcagggcgaggactatggcaagggcgtcatcttctacctgcgggacaaggtggtggtgggcatcgtgctgtggaacatcttcaacaggatgcccatcgccaggaagatcatcaaggatggagagcagcacgaggacctgaatgaggtggccaagctgttcaacatccacgaggactag

SEQ ID NO: 144299 - DNA, 1842 bp, Artificial Sequence
  derived and/or modified sequence
atgttccggtgcggcggcctggccgccggcgccctgaagcagaagctggtgcccttagtgcggaccgtgtgtgtaaggagcccacgccagagaaaccgtctgccaggcaatctgtttcagcgttggcatgtgccactggaactacaaatgacacggcaaatggccagcagcggcgcctcaggtgggaaaattgacaactcagtcctggtgctgatagtgggattgagtacagtcggggcaggcgcctacgcgtacaaaactatgaaagaagatgagaagcgctacaatgagaggatttcggggctaggcttgaccccagagcaaaagcagaaaaaggcagccctgagtgcttctgagggggaggaagtgccccaggacaaggccccttcccacgtccccttcctcctgataggcggcggcacagcagcattcgcagcagctcgcagcatccgggctcgagatcctggggcgagggttctcattgtgtccgaggatccggagctaccttacatgagaccacccctgagcaaggaactttggttctctgacgatcccaatgtgaccaagactctgaggttcaagcagtggaatgggaaagaacgttccatatactttcagcctccctccttctatgtttcagctcaggatcttccgcatatagagaacgggggggttgccgtgctgactggtaagaaagtagtgcagctcgacgtcagggataacatggtaaagttaaatgacggttctcagattacatatgagaaatgtctcatagcaaccggcggcaccccccgttcccttagcgcaatcgaccgggctggagctgaggtgaagtcgcgtaccacgttatttaggaagattggggattttcggagtctggaaaaaatttcacgagaagtgaagtctatcaccatcattggcgggggcttcctgggatccgaactggcctgtgcgctgggtaggaaagcacgcgccctgggcaccgaagtgatccagctttttcccgaaaaggggaatatgggcaagattttgcccgagtatctgtctaattggaccatggagaaggtccggagagaaggggtaaaggttatgcccaacgcaattgttcagagtgtgggagtttcctctggtaaactgctaataaaactcaaagatgggagaaaggtcgagacggatcacattgtggcggccgtgggactcgagcccaatgtggagctcgccaagactggcggactggaaattgactctgatttcggcggcttcagggtgaacgctgaactgcaggcacggtctaatatttgggtggcgggggacgccgcgtgtttctacgatatcaaactgggccggcgccgggtcgaacatcacgaccacgctgttgtgtctggccggctcgccggcgagaacatgacaggagctgccaagccttactggcaccagtctatgttctggtccgacttgggtccggatgtagggtatgaggctatcggtctggttgatagcagcttacccaccgtcggggtgttcgccaaagcgacggcccaggacaaccctaaatctgcaactgagcagtccggaaccggcattagatctgagtcagagacagagtctgaagcttcggaaatcaccatcccgccatctaccccggccgttcctcaggccccggttcagggcgaagattacggaaagggtgtaatcttttatctccgggataaagttgtggtgggtatcgtgctgtggaatattttcaatcgcatgccgatcgccagaaagatcataaaggacggggaacagcatgaagacctgaacgaagtggcaaagctattcaacatacatgaggactag

SEQ ID NO: 144300 - DNA, 1842 bp, Artificial Sequence
  derived and/or modified sequence
atgttccgttgtggtgggttagccgctggcgctctgaagcaaaaattggtcccgctggtgcgaacagtgtgcgtacggagtcccaggcaaagaaatcgcctgcccggtaatcttttccaaaggtggcacgttccccttgagctgcagatgacacgtcaaatggcaagttccggcgcatctgggggtaaaatcgacaacagcgtactggtcctgatagtgggtctgagtacagttggggcaggcgcatacgcctataagactatgaaggaggatgagaagaggtataatgaacgaatctccggcctcggcctgacccctgagcagaaacagaagaaagctgccttgtcggccagtgagggggaagaagtgccacaggacaaggccccttctcatgtccccttcctgctcatcggcggtggtacagcagcctttgctgccgcacgaagtatcagggctcgggatcctggagccagagtgctcatcgtttcagaagacccggagctgccatatatgagaccccctctcagcaaggagctgtggtttagcgatgatcccaacgttaccaagaccctgcgattcaagcagtggaatggaaaagaaagatctatttactttcagccaccatctttttacgtgtccgcccaagaccttccgcatatcgagaacgggggtgtggccgtcctgacaggaaagaaagtggtccaattggacgtgcgtgacaacatggtaaaacttaacgacggatctcagattacttatgagaagtgtctgattgcaaccggcggaaccccaagaagcctttctgcaatcgaccgagctggtgctgaggtgaagtctagaactactctctttcgcaagatcggcgactttcgatccctggagaaaataagccgcgaagttaaatcaatcacgatcatcgggggaggttttctaggctccgagctagcctgcgccctgggcaggaaggccagggcccttggaacggaagtgattcaactctttcccgagaaagggaacatgggaaaaatacttcctgagtacttgagtaattggacaatggagaaagtaagaagagagggtgtgaaagtgatgcctaacgcgattgtgcagagcgtcggggtgtcctccgggaagctactgattaaattaaaggacggaaggaaggtcgaaaccgaccatatcgttgcagcagtgggcctcgaaccgaatgttgaactggccaagacagggggtcttgaaatcgacagcgacttcggagggtttagagtcaacgcggagctgcaggctagaagtaacatctgggtggctggagacgcagcctgcttttacgatataaaactgggtagaaggcgggtggagcaccacgatcacgccgtggtctctggcagactggctggtgagaacatgaccggagctgctaagccttactggcaccagtcgatgttctggtcagacctgggacctgatgtggggtacgaagccattggccttgtggacagtagcctgcctaccgtaggtgtgtttgctaaggccactgcgcaggataacccgaaatccgcaactgagcaatctggaacgggcatccgctctgaatccgagaccgagtcagaagcaagcgaaataacaatcccgccatccacgccagcagtgcctcaggcgcctgtccaaggagaagattatggcaagggagtcatcttttacttgcgggacaaggtcgtggtgggcatcgtgttgtggaatatcttcaacaggatgcctatcgcccgaaagataatcaaggacggcgagcaacatgaggatctcaacgaggtggccaaattgttcaacatacacgaagactag

SEQ ID NO: 144301 - DNA, 2260 bp, Artificial Sequence
  derived and/or modified sequence
aatgcggcagcgagtgctacgcctgcgcagtaggcctccggtcgccgttccccttccccggctctagcaggccggcttctctgtccaatgcccacccggagctgggaggaggagtctgcgtaatgtgcgtgtgaagagactgggggagctggccggggctcacggtgtttgacccgtcggtcgtgcgtgagaggaaagggaaggaggaggtcccgaatagcggtcgccgaaatgttccggtgtggaggcctggcggcgggtgctttgaagcagaagctggtgcccttggtgcggaccgtgtgcgtccgaagcccgaggcagaggaaccggctcccaggcaacttgttccagcgatggcatgttcctctagaactccagatgacaagacaaatggctagctctggtgcatcagggggcaaaatcgataattctgtgttagtccttattgtgggcttatcaacagtaggagctggtgcctatgcctacaagactatgaaagaggatgaaaaaagatacaatgaaagaatttcagggttagggctgacaccagaacagaaacagaaaaaggccgcgttatctgcttcagaaggagaggaagttcctcaagacaaggcgccaagtcatgttcctttcctgctaattggtggaggcacagctgcttttgctgcagccagatccatccgggctcgggatcctggggccagggtactgattgtatctgaagatcctgagctgccgtacatgcgacctcctctttcaaaagaactgtggttttcagatgacccaaatgtcacaaagacactgcgattcaaacagtggaatggaaaagagagaagcatatatttccagccaccttctttctatgtctctgctcaggacctgcctcatattgagaatggtggtgtggctgtcctcactgggaagaaggtagtacagctggatgtgagagacaacatggtgaaacttaatgatggctctcaaataacctatgaaaagtgcttgattgcaacaggaggtactccaagaagtctgtctgccattgatagggctggagcagaggtgaagagtagaacaacgcttttcagaaagattggagactttagaagcttggagaagatttcacgggaagtcaaatcaattacgattatcggtgggggcttccttggtagcgaactggcctgtgctcttggcagaaaggctcgagccttgggcacagaagtgattcaactcttccccgagaaaggaaatatgggaaagatcctccccgaatacctcagcaactggaccatggaaaaagtcagacgagagggggttaaggtgatgcccaatgctattgtgcaatccgttggagtcagcagtggcaagttacttatcaagctgaaagacggcaggaaggtagaaactgaccacatagtggcagctgtgggcctggagcccaatgttgagttggccaagactggtggcctggaaatagactcagattttggtggcttccgggtaaatgcagagctacaagcacgctctaacatctgggtggcaggagatgctgcatgcttctacgatataaagttgggaaggaggcgggtagagcaccatgatcacgctgttgtgagtggaagattggctggagaaaatatgactggagctgctaagccgtactggcatcagtcaatgttctggagtgatttgggccccgatgttggctatgaagctattggtcttgtggacagtagtttgcccacagttggtgtttttgcaaaagcaactgcacaagacaaccccaaatctgccacagagcagtcaggaactggtatccgatcagagagtgagacagagtccgaggcctcagaaattactattcctcccagcaccccggcagttccacaggctcccgtccagggggaggactacggcaaaggtgtcatcttctacctcagggacaaagtggtcgtggggattgtgctatggaacatctttaaccgaatgccaatagcaaggaagatcattaaggacggtgagcagcatgaagatctcaatgaagtagccaaactattcaacattcatgaagactgaagccccacagtggaattggcaaacccactgcagcccctgagaggaggtcgaatgggtaaaggagcatttttttattcagcagactttctctgtgtatgagtgtgaatgatcaagtcctttgtgaatattttcaactatgtaggtaaattcttaatgttcacatagtgaaataaattctgattcttct

SEQ ID NO: 144302 - DNA, 1842 bp, Artificial Sequence
  derived and/or modified sequence
atgttcagatgcggcggcctggccgccggcgccctgaagcagaagctggtgcccctggtgagaaccgtgtgcgtgagaagccccagacagagaaacagactgcccggcaacctgttccagagatggcacgtgcccctggagctgcagatgaccagacagatggccagcagcggcgccagcggcggcaagatcgacaacagcgtgctggtgctgatcgtgggcctgagcaccgtgggcgccggcgcctacgcctacaagaccatgaaggaggacgagaagagatacaacgagagaatcagcggcctgggcctgacccccgagcagaagcagaagaaggccgccctgagcgccagcgagggcgaggaggtgccccaggacaaggcccccagccacgtgcccttcctgctgatcggcggcggcaccgccgccttcgccgccgccagaagcatcagagccagagaccccggcgccagagtgctgatcgtgagcgaggaccccgagctgccctacatgagaccccccctgagcaaggagctgtggttcagcgacgaccccaacgtgaccaagaccctgagattcaagcagtggaacggcaaggagagaagcatctacttccagccccccagcttctacgtgagcgcccaggacctgccccacatcgagaacggcggcgtggccgtgctgaccggcaagaaggtggtgcagctggacgtgagagacaacatggtgaagctgaacgacggcagccagatcacctacgagaagtgcctgatcgccaccggcggcacccccagaagcctgagcgccatcgacagagccggcgccgaggtgaagagcagaaccaccctgttcagaaagatcggcgacttcagaagcctggagaagatcagcagagaggtgaagagcatcaccatcatcggcggcggcttcctgggcagcgagctggcctgcgccctgggcagaaaggccagagccctgggcaccgaggtgatccagctgttccccgagaagggcaacatgggcaagatcctgcccgagtacctgagcaactggaccatggagaaggtgagaagagagggcgtgaaggtgatgcccaacgccatcgtgcagagcgtgggcgtgagcagcggcaagctgctgatcaagctgaaggacggcagaaaggtggagaccgaccacatcgtggccgccgtgggcctggagcccaacgtggagctggccaagaccggcggcctggagatcgacagcgacttcggcggcttcagagtgaacgccgagctgcaggccagaagcaacatctgggtggccggcgacgccgcctgcttctacgacatcaagctgggcagaagaagagtggagcaccacgaccacgccgtggtgagcggcagactggccggcgagaacatgaccggcgccgccaagccctactggcaccagagcatgttctggagcgacctgggccccgacgtgggctacgaggccatcggcctggtggacagcagcctgcccaccgtgggcgtgttcgccaaggccaccgcccaggacaaccccaagagcgccaccgagcagagcggcaccggcatcagaagcgagagcgagaccgagagcgaggccagcgagatcaccatcccccccagcacccccgccgtgccccaggcccccgtgcagggcgaggactacggcaagggcgtgatcttctacctgagagacaaggtggtggtgggcatcgtgctgtggaacatcttcaacagaatgcccatcgccagaaagatcatcaaggacggcgagcagcacgaggacctgaacgaggtggccaagctgttcaacatccacgaggactag

SEQ ID NO: 144303 - protein, 574 aa, Artificial Sequence
  derived and/or modified sequence
MGNNFSSIPSLPRGNPSRAPRGHPQNLKDSIGGPFPVTSHRCHHKQKHCPAVLPSGGLPATPLLFHPHTKGSQILMDLSHKAVKRQASFCNAITFSNRPVLIYEQVRLKITKKQCCWSGALRLGFTSKDPSRIHPDSLPKYACPDLVSQSGFWAKALPEEFANEGNIIAFWVDKKGRVFHRINDSAVMLFFSGVRTADPLWALVDVYGLTRGVQLLDSELVLPDCLRPRSFTALRRPSLRREADDARLSVSLCDLNVPGADGDEAAPAAGCPIPQNSLNSQHSRALPAQLDGDLRFHALRAGAHVRILDEQTVARVEHGRDERALVFTSRPVRVAETIFVKVTRSGGARPGALSFGVTTCDPGTLRPADLPFSPEALVDRKEFWAVCRVPGPLHSGDILGLVVNADGELHLSHNGAAAGMQLCVDASQPLWMLFGLHGTITQIRILGSTILAERGIPSLPCSPASTPTSPSALGSRLSDPLLSTCSSGPLGSSAGGTAPNSPVSLPESPVTPGLGQWSDECTICYEHAVDTVIYTCGHMCLCYACGLRLKKALHACCPICRRPIKDIIKTYRSS

SEQ ID NO: 144304 - DNA, 1725 bp, Artificial Sequence
  derived and/or modified sequence
atgggcaataatttctctagcattccaagcctgccgcgggggaacccctcccgggccccaagagggcacccccagaacctgaaggactcgatagggggacccttcccagtgaccagccatagatgtcaccacaagcagaaacactgcccggcagtgctgcctagtggaggcctgccagcaacccccctcttgttccatccccacacaaaaggctctcaaatcttaatggatctgtcacacaaggctgttaagaggcaggcttcgttttgtaacgcgattactttctcgaacagacctgttctgatctatgaacaggtccgattgaaaattacaaagaagcagtgctgctggagcggcgcactcaggctaggattcacgagtaaggacccctcacggatccacccggacagcttgccgaaatatgcttgccccgacctggtctcacaatccggcttctgggcaaaggccctccctgaggaatttgcaaacgaggggaacattatcgctttctgggtggacaagaaaggcagagtctttcatcgcatcaacgattcagccgtgatgctttttttttccggagtgagaacagctgatcctctgtgggccctggttgatgtttacgggctgacgcggggcgtccaacttctagactcggagttagtgttaccagactgtctccggcccagatcatttactgcattgaggcggcccagtttgcggcgggaggcagatgacgcgcggctgagcgttagtctgtgtgaccttaatgttcccggggcggacggtgatgaagccgcaccagcagcgggctgccccatccctcaaaacagcttgaattcccaacactcccgagccctgcctgcacagctcgacggcgaccttcgattccacgctctgagggccggcgctcacgtgaggatccttgacgagcagactgtggctagggtggagcacggccgcgatgagagagccctcgttttcacgagcagacctgtcagggtggcagagacgattttcgtaaaagttactcggtcaggaggcgctagacccggtgccctgtccttcggcgtgacaacctgtgatccaggcaccctccgtccagctgacctgccctttagtcctgaggccctggtggaccgaaaagaattctgggctgtctgtcgcgttcccggcccactgcattccggagacatcctcggcctggttgtgaatgccgatggggagctccatctcagtcataacggagctgctgccggcatgcaactctgcgtcgacgcaagtcagcccctttggatgctcttcggattgcacggcaccataactcaaattagaatcctggggtcaacaatcctagccgaacgtggcatcccctcccttccttgctcacccgcgtcaactccaacttctccttcggcacttgggtccagattgagtgatcctctgctgtctacatgctcttccgggcctcttggttcatctgccggaggcaccgctcctaactcccccgtctctttgcccgaaagtcccgtcacccccgggttaggtcaatggagcgacgagtgcaccatctgctatgaacacgctgtcgataccgtcatttacacgtgcggccacatgtgcctctgttacgcttgtggcctgcggctgaagaaggcactgcacgcctgctgcccaatttgcagacggccgataaaagacatcattaaaacgtatagatcatcctag

SEQ ID NO: 144305 - DNA, 1725 bp, Artificial Sequence
  derived and/or modified sequence
atgggcaacaacttcagcagcatccccagcctgccccggggcaaccccagccgggccccccggggccacccccagaacctgaaggacagcattggaggccccttccctgtgaccagccaccgctgccaccacaagcagaagcactgcccagctgtgctgcccagcggcggcctgcctgccacccccctgctcttccacccccacaccaagggcagccagatcctgatggacctgagccacaaggctgtgaagaggcaggccagcttctgcaatgccatcaccttcagcaacagacctgtgctgatctatgagcaggtgcggctgaagatcaccaagaagcagtgctgctggagcggggccctgcggctgggcttcaccagcaaggaccccagccgcatccacccagacagcctgcccaagtatgcctgcccagacctggtgtcccagagcggcttctgggccaaggccctgcctgaggagtttgccaatgaaggcaacatcatcgccttctgggtggacaagaagggccgggtcttccaccgcatcaatgattctgctgtgatgctgttcttcagcggcgtgaggacagctgaccccctgtgggccctggtggatgtgtatggcctgacccggggcgtgcagctgctggacagcgagctggtgctgcctgactgcctgcggcccaggagcttcaccgccctgcggcggcccagcctgcggcgggaggctgatgatgcccggctgtctgtgtccctgtgtgacctgaatgtgcctggagcagatggagatgaagctgccccagctgctggctgccccatcccccagaacagcctgaacagccagcacagccgggccctgcctgcccagctggatggagacctgcgcttccacgccctgcgggccggggcccacgtgcgcatcctggatgagcagacagtggcccgggtggagcacggcagagatgagcgggccctggtgttcaccagcaggcctgtgcgggtggccgagaccatctttgtgaaggtgaccaggtctggaggagcccggcctggggccctgagctttggagtgaccacctgtgaccccggcaccctgcggcctgctgacctgcccttcagccctgaggccctggtggacaggaaggagttctgggccgtgtgccgggtgcccggccccctgcacagcggggacatcctgggcctggtggtgaatgctgatggagagctgcacctgagccacaacggggctgctgctggcatgcagctgtgtgtggatgccagccagcccctgtggatgctgtttggcctgcacggcaccatcacccagatccgcatcctgggcagcaccatcctggccgagcggggcatccccagcctgccctgcagccctgccagcacccccaccagccccagcgccctgggcagccggctgagtgaccccctgctgagcacctgcagcagcggccccctgggcagcagcgctgggggcacagcccccaacagccctgtgtccctgcctgagagccctgtgaccccaggcctgggccagtggagcgatgagtgcaccatctgctatgaacatgctgtggacaccgtcatctacacctgtggccacatgtgcctgtgctacgcctgtggcctgcggctgaagaaggccctgcacgcctgctgccccatctgcagaagacccatcaaggacatcatcaagacctaccgcagcagctag

SEQ ID NO: 144306 - DNA, 1725 bp, Artificial Sequence
  derived and/or modified sequence
atgggcaacaacttcagcagcatccccagcctgccccggggcaacccatccagggcaccaaggggccacccacagaatctaaaggattctatcggcggaccttttccagttacctcccaccgctgtcatcacaaacagaagcactgccccgcagtgttgccgtccgggggcttacccgcgacccccttactgtttcacccccatacaaagggctcacaaatactgatggatttgagtcataaggctgtcaagaggcaggcctccttctgcaacgcaataaccttctcgaaccgtcccgttctcatatacgagcaggtgcgcttgaaaattactaagaaacagtgctgttggtctggcgcactcaggctgggctttacaagtaaggacccatccagaatccaccctgattcattgccaaagtacgcatgtcctgatctcgtgtcacaatctggcttttgggctaaggccctgcctgaggagttcgcaaacgaaggcaatattatcgctttttgggtcgacaaaaagggtagagtcttccataggattaacgactctgccgtgatgctgttcttctccggtgtaagaactgccgatcccctttgggctctggtagatgtgtatggcctgactcggggcgtccagctgctcgatagcgagctggtcctccctgattgtttgcggcctcggtctttcactgccctccgtaggccatcactccgccgagaggcggacgatgcccgtttatctgtgtccttatgcgatctcaacgtgccaggcgctgatggggatgaagctgcacccgctgccggctgtcctatccctcagaattctctgaactcacaacattctcgagcattacccgctcagctggacggagatctaagattccatgcgctccgggctggggcccacgtgaggatcctggacgagcaaaccgtcgcgcgagttgagcatggaagggacgagcgggcgctggtcttcacaagtaggcccgttcgagtggctgagactattttcgtaaaggtcacaagaagcgggggagcccgacccggggcactaagttttggcgtaacaacgtgtgatcccggcaccctgcgtcccgctgacctccccttcagtccggaagctctggtcgatcgtaaagaattttgggccgtgtgcagagtgccggggcctctgcattctggcgatatcctcggactagtggtcaatgccgacggagagttacatttgagtcataatggggctgcggctggcatgcaactatgcgtggacgcctcccaaccgctttggatgctgttcggtcttcacggaaccataacccagatccgaatcctgggatcgacaattctggcggaaagagggattccttctctaccctgctcacccgcttccaccccaacaagtcctagcgctttgggcagcaggctgagtgaccctctcctgagcacatgcagctccgggcccctgggaagtagcgccgggggcacagctccaaattcgcctgtgagtcttcctgagtcccccgttactccaggactgggacaatggagcgacgagtgcactatctgctatgagcacgctgtggacactgtgatctatacatgtggccacatgtgcctgtgctatgcctgtggactgcgcttgaagaaagctctgcatgcatgttgtcctatctgtcgacgccccataaaagatattatcaagacgtatagaagtagttag

SEQ ID NO: 144307 - DNA, 4314 bp, Artificial Sequence
  derived and/or modified sequence
cgaacgcccacgccagcgaccctgactctatggccccgggggagcgcgccggagccgccgcgccgcccacccccagccggaaccctagcgtcccggggagcaagcggggagccccgggcgtccccggccccggcccagggccctgcttgtggcccccgctcccgccacggggcatgggaggcaggtagcccagcctgcgccaggacacccgtggcgggcggaacccgccaaggaccgcgaagtccagagaaaggaagctgaggagctgcccgcccgcccccggctgcagccccagcagggccctcccccggtggcgcgcacccgcgcgcgcacactcgcacaccgcacctcagcgcctgcccggcctcgcccccacccgcgagcgccgaacctcctggggccggatgccatgggtaacaacttctccagtatcccctcgctgccccgaggaaacccgagccgcgcgccgcggggccacccccagaacctcaaagactctatcgggggccccttccccgtcacttctcaccgatgccaccacaagcagaagcactgtccggcagtgctgcccagcggggggctcccagccacgccgctgctcttccacccgcacaccaagggctcccagatcctcatggacctcagccacaaggctgtcaagaggcaggccagcttctgcaacgccatcaccttcagcaaccgcccggtcctcatctacgagcaagtcaggctgaagatcaccaagaagcagtgctgctggagcggggccctgcggctgggcttcaccagcaaggacccgtcccgcatccaccctgactcgctgcccaagtacgcctgccccgacctggtgtcccagagtggcttctgggccaaggcgctgcctgaggagtttgccaatgagggcaacatcatcgcattctgggtggacaagaagggccgtgtcttccaccgcatcaacgactcggctgttatgctgttcttcagcggggtccgcacggccgacccgctctgggccctggtggacgtctacggcctcacgcggggcgtccagctgcttgatagcgagctggtgctcccggactgtctgcggccgcgctccttcaccgccctgcggcggccgtcgctgcggcgcgaggcggacgacgcgcgcctctcggtgagcctatgcgacctcaacgtgccgggcgcggacggcgacgaggccgcgccggccgccggctgccccatcccgcagaactcactcaactcgcagcacagccgcgcgctgccggcgcagctcgacggcgacctgcgtttccacgccctgcgcgccggcgcgcacgtccgcatcctcgacgagcagacggtggcgcgcgtggagcacgggcgcgacgagcgcgcgctcgtcttcaccagccggcccgtgcgcgtggccgagaccatcttcgtcaaggtcacgcgctcgggtggcgcgcggcccggcgcgctgtcgttcggcgtcaccacgtgcgaccccggcacgctgcggccggccgacctgcctttcagccctgaggccctggtggaccgcaaggaattctgggccgtgtgccgcgtgcccgggcccctgcacagcggcgacatcctgggcctggtggtcaacgccgacggcgagctgcacctcagccacaatggcgcggccgccggcatgcagctgtgcgtggacgcctcgcagccgctttggatgctcttcggcctgcacgggaccatcacgcagatccgcatcctcggctccactatcctggccgagcggggtatcccatcactcccctgctcccctgcctccacgccaacctcgcccagtgccctgggcagccgcctgtctgaccccttgctcagcacgtgcagctctggccctctgggtagctctgctggtgggacagcccccaattcgccagtgagcctgcccgagtcgccagtgaccccaggtctgggccagtggagcgatgagtgcaccatttgctatgaacacgcggtggacacggtcatctacacatgtggccacatgtgcctctgctacgcctgtggcctgcgcctcaagaaggctctgcacgcctgctgccccatctgccgccgccccatcaaggacatcatcaagacctaccgcagctcctagcccgttgcggtggcccatcccgcatacccatcttctcgggcttcagcccagtcccagctgaggaacaagccagtggggccccttctcttcctcattttggaaacttttcctcctctattaaacatgggaaactgaagcccttgaaggtttggggagaggggggtatcaggcagggagggggcagaggcaaatcaccgggcagagggaggggaggagaggaggccgcactctccctgtctctcccgtctctgcacccagctcctctctgcatgctgagggctaaattgggatctcagcctgccctaatctttccccatctgaggcaggtttctaggaggtgtctgtagtccatgtggcacctttgtgagaattagaaaacatgtaccttcctctgggcagctgcagccctgagccaggacatgtggcctggctagtgcagcatggagtggattttaggctcatttgccctctcagccaactgcccttgagcagtgtacagcctgctcaacaaccgccctgggcaggccgctcctgagctgctgtctccctctctgacctatgcctaccttctctttcttcgttccctgcccactgggcatggcagctgggggtgagaggctggtggttgcctcccgtcctgggcaggctgcagcctcatgccatgtctctctcccactacctgatgggcacatggacaggctgcagagggctccaggttctgggcccctggctgagaaggggaggatcctgtcctggctgtagccttcctgccccaatcatctcgctggatgccattgcccaggggtagcccttcggtatgggctggggagaagggttggtcttctgccagggtccctaagaacaggtttgcagctaccctctctgaccttttccccatatcttgtgctgtccagggcctaggctgatagtcagagcctgtggcacacctgggatgggccagggccctgggtggggaggtgtgggttccctgggccaagaccagcctttttcctcagtttaattaatttatttatttggtttgtggttttgggttttttttgtttgtttgtttgtaggtgagttcccatcctctgggcccctagaaatgctgcctttgtgtgtggggtacctgggaaagggtgtggctgaggcagtcataatgcagtatcttcccctgactccagccacaaagctcatacccagccctaccaatcatgaactggaactccataaggaggggccaaattgggaggccttttggcaaacagtgtctattttacagagaggcaaaccaagcctccttagtgccctggggctgatggtcacccagagccatagagcacccttcctcctgggccagagctgggttatcatggttggcttaggtacctcaggtggcccaggaggtcccccctccataaggacgtcaaacttccaggagggccagtgttcctagtgtgggccaggaacaggacagggagaccttgtgatggcggggcagggagcctgttcgtagggaagatgaggaggcaagggctgcctctcacacctccaggttctctaagttctggggagggagcgccccacctgctgaggtcggtcctctcagccctgcctgccctggcctgggctctcccagcctcccagccctctgccccctcagatggctttttgtttttgtttttttttgcatccatcagagactgcacctctgtgtggcaggcagggcatgggttttagtcctggccactgaccagctgtgtggccctggccgagtcgtagccccctggagcccagcttccatttctataaaatggttgtttcgggagagaggggcaggctttctgtgtgactcgggagttcttccgtgagggctgccagggggtggtgtgccaggacctcaggctgggcctttgtgctggccttgcagtgggtgtgtggggaagtcactgtcccactatgggtctccactacccagtcactgaccctgggagaccccttctgtgtgggagggagcgggggctggctagcgggccccccagccagggatcccagaggctgagggttggggagaggaagccatcatctcattacctctgtcagtgcaggggtggctgctgcttcccttgtgcacttgggtcgctgtgattgtgaataaaagtgatttcgtaccagcctga

SEQ ID NO: 144308 - DNA, 1725 bp, Artificial Sequence
  derived and/or modified sequence
atgggaaacaacttctcttcaattccctcattgcctaggggcaacccttctagggcgccacgcggacaccctcagaatctgaaagattctatcggcggtcccttccctgtgacgagccatcgatgccaccataaacagaaacattgtcctgccgtgctccccagcggtggcctgcccgcaaccccgctgcttttccatccccacactaagggttcccaaatcctcatggacttatcgcacaaagctgtgaagcgacaggctagcttttgcaacgctattacctttagtaatcggccagtactgatctacgaacaagtaaggcttaagatcactaaaaagcagtgctgctggtctggcgcactgagactggggttcaccagcaaggatccttcccgcattcatcctgactcgctcccgaaatacgcttgccccgatcttgttagccagtctggcttctgggctaaggctttaccggaagaattcgcaaatgaaggaaatatcatcgccttttgggtggacaagaagggccgagtgtttcataggatcaacgactctgctgtaatgctgttcttttcaggagttagaacagccgatcctctttgggctctcgtggacgtgtatgggctgacacgaggggtacagctgttggatagcgagttggtgctacccgactgtttaagaccgaggagtttcactgcactgaggcgaccatcccttcgtagggaagccgatgatgcccgtctcagcgtgtctctatgcgacttgaatgtaccgggagcggacggagatgaggctgctcccgcagctggatgcccgataccacaaaattccttgaattcccagcacagccgggctctccccgcacagttggacggagacctgcgatttcatgctcttagggccggagcgcacgtaaggatcctggatgaacagactgtcgccagggtagaacacggcagagacgaacgggctctcgtgtttacctccagaccagttcgtgtggcggagaccatcttcgtcaaggtgacgaggtccggcggtgcacgacccggagcattgagtttcggagtgactacatgtgaccccggtaccctgcgacccgctgacctgcctttctcgccagaggccctggtcgataggaaagaattctgggccgtgtgccgtgttcctgggccacttcatagcggcgacattctaggactcgtcgtcaatgcagatggagagctgcatctgtctcataatggagctgctgccggtatgcaattgtgcgtggacgccagtcagcccctgtggatgcttttcggattacacggaacgatcacgcagatcaggattttaggttctactattctggcagagagaggaataccgtctctgccttgctcccccgcaagcactcctacgagtccctcagccctgggcagtaggttgtctgaccccttgctcagcacatgctcgtcagggccactggggtcttctgctggaggaaccgcaccgaattctccagtgagcctgcctgaatcgcccgtgaccccaggcctggggcaatggtccgatgaatgtacaatttgctacgagcatgccgtagacacagtgatatatacatgcggacacatgtgtttatgctacgcctgtggtctgagactaaaaaaggcactgcatgcctgctgcccgatttgtcgacgcccaatcaaagatattataaagacctacaggagcagttag

SEQ ID NO: 144309 - DNA, 1725 bp, Artificial Sequence
  derived and/or modified sequence
atgggcaacaacttcagcagcatccccagcctgcccagaggcaaccccagcagagcccccagaggccacccccagaacctgaaggacagcatcggcggccccttccccgtgaccagccacagatgccaccacaagcagaagcactgccccgccgtgctgcccagcggcggcctgcccgccacccccctgctgttccacccccacaccaagggcagccagatcctgatggacctgagccacaaggccgtgaagagacaggccagcttctgcaacgccatcaccttcagcaacagacccgtgctgatctacgagcaggtgagactgaagatcaccaagaagcagtgctgctggagcggcgccctgagactgggcttcaccagcaaggaccccagcagaatccaccccgacagcctgcccaagtacgcctgccccgacctggtgagccagagcggcttctgggccaaggccctgcccgaggagttcgccaacgagggcaacatcatcgccttctgggtggacaagaagggcagagtgttccacagaatcaacgacagcgccgtgatgctgttcttcagcggcgtgagaaccgccgaccccctgtgggccctggtggacgtgtacggcctgaccagaggcgtgcagctgctggacagcgagctggtgctgcccgactgcctgagacccagaagcttcaccgccctgagaagacccagcctgagaagagaggccgacgacgccagactgagcgtgagcctgtgcgacctgaacgtgcccggcgccgacggcgacgaggccgcccccgccgccggctgccccatcccccagaacagcctgaacagccagcacagcagagccctgcccgcccagctggacggcgacctgagattccacgccctgagagccggcgcccacgtgagaatcctggacgagcagaccgtggccagagtggagcacggcagagacgagagagccctggtgttcaccagcagacccgtgagagtggccgagaccatcttcgtgaaggtgaccagaagcggcggcgccagacccggcgccctgagcttcggcgtgaccacctgcgaccccggcaccctgagacccgccgacctgcccttcagccccgaggccctggtggacagaaaggagttctgggccgtgtgcagagtgcccggccccctgcacagcggcgacatcctgggcctggtggtgaacgccgacggcgagctgcacctgagccacaacggcgccgccgccggcatgcagctgtgcgtggacgccagccagcccctgtggatgctgttcggcctgcacggcaccatcacccagatcagaatcctgggcagcaccatcctggccgagagaggcatccccagcctgccctgcagccccgccagcacccccaccagccccagcgccctgggcagcagactgagcgaccccctgctgagcacctgcagcagcggccccctgggcagcagcgccggcggcaccgcccccaacagccccgtgagcctgcccgagagccccgtgacccccggcctgggccagtggagcgacgagtgcaccatctgctacgagcacgccgtggacaccgtgatctacacctgcggccacatgtgcctgtgctacgcctgcggcctgagactgaagaaggccctgcacgcctgctgccccatctgcagaagacccatcaaggacatcatcaagacctacagaagcagctag

SEQ ID NO: 144310 - protein, 649 aa, Artificial Sequence
  derived and/or modified sequence
MENDPSRRRESISLTPVAKGLENMGADFLESLEEGQLPRSDLSPAEIRSSWSEAAPKPFSRWRNLQPALRARSFCREHMQLFRWIGTGLLCTGLSAFLLVACLLDFQRALALFVLTCVVLTFLGHRLLKRLLGPKLRRFLKPQGHPRLLLWFKRGLALAAFLGLVLWLSLDTSQRPEQLVSFAGICVFVALLFACSKHHCAVSWRAVSWGLGLQFVLGLLVIRTEPGFIAFEWLGEQIRIFLSYTKAGSSFVFGEALVKDVFAFQVLPIIVFFSCVISVLYHVGLMQWVILKIAWLMQVTMGTTATETLSVAGNIFVSQTEAPLLIRPYLADMTLSEVHVVMTGGYATIAGSLLGAYISFGIDATSLIAASVMAAPCALALSKLVYPEVEESKFRREEGVKLTYGDAQNLIEAASTGAAISVKVVANIAANLIAFLAVLDFINAALSWLGDMVDIQGLSFQLICSYILRPVAFLMGVAWEDCPVVAELLGIKLFLNEFVAYQDLSKYKQRRLAGAEEWVGDRKQWISVRAEVLTTFALCGFANFSSIGIMLGGLTSMVPQRKSDFSQIVLRALFTGACVSLVNACMAGILYMPRGAEVDCMSLLNTTLSSSSFEIYQCCREAFQSVNPEFSPEALDNCCRFYNHTICAQ

SEQ ID NO: 144311 - DNA, 1950 bp, Artificial Sequence
  derived and/or modified sequence
atggagaacgatccgtcgaggaggcgcgaatctatctctctgacccccgtggctaaaggactcgagaatatgggcgcggacttcttggagtctctggaggaagggcaactgccaagaagcgacttatcacccgcagagatcagatccagctggagcgaagccgcccccaaacccttctctcggtggaggaacctgcaacccgcactgagagcccggagcttttgccgagagcacatgcagttattcagatggatcggaaccgggcttctatgcacaggtctgtcggcatttctcctggtcgcctgtctgctggattttcagagggccctggcactgtttgtgttgacatgtgtcgttctgacattcctaggtcatcgccttttgaaaagactacttggcccgaaacttagaaggttcttgaaacctcaggggcaccccaggttgctgttgtggtttaagcgaggactggcattagcagcttttctgggcctggtactgtggctgtctctggacacctcccagcggcccgaacagctggtgagctttgcaggcatttgtgtgtttgtggcattgctctttgcgtgttccaagcatcattgtgctgtgagttggagggccgtcagctggggattgggccttcagtttgtgttggggttgctggtgattcggactgaacccggcttcatcgctttcgagtggcttggggagcagatacggatcttcctatcatacacaaaggctggctccagctttgtgttcggtgaggccctggtgaaagatgtgttcgcctttcaagtgctgccgattattgttttcttctcctgcgtgatctccgtcctttaccatgtgggcctcatgcagtgggtcatcctcaagatcgcctggctgatgcaagtgacaatgggaaccacagccacagaaacattgagtgtagcaggaaatatattcgtcagtcagacggaggctcctctgctcattcgtccgtatctcgctgacatgacccttagtgaggtgcacgttgttatgacggggggctacgcaaccatcgctggatccctgctgggggcatatattagctttgggattgatgccacctcacttattgcggcaagcgtgatggccgcaccgtgcgctcttgcccttagcaagctcgtttatcccgaagtggaggaaagtaaatttcggcgagaagaaggcgttaagctcacatatggcgatgcccagaatctgattgaagcagcgtctaccggggctgctatatccgtgaaagtggtggctaatatcgccgctaacttaatcgctttcttggctgtgctggattttattaacgccgccttgtcttggctgggagatatggtcgatattcagggactctcttttcaattgatctgttcctatattctgaggcctgtcgcctttctaatgggcgtggcttgggaagactgtcctgtcgttgctgagctattgggaatcaagctttttttgaacgaattcgttgcgtaccaggacctgtcaaagtacaaacagcgccggctcgcaggcgccgaggaatgggttggtgatagaaagcagtggatcagtgtgagagctgaggttttgacaacgttcgctctgtgtggctttgcaaatttcagtagcataggcataatgctaggcggactcacgtccatggtcccacaaagaaaatcagattttagtcagatcgtactccgggccttgttcaccggcgcttgcgtgtcattggtcaatgcctgtatggcggggattctgtacatgcctagaggagcggaagtcgattgtatgagtctgctgaacaccactctcagtagcagtagctttgaaatttatcagtgttgccgcgaggctttccagtcagttaaccctgagtttagcccggaggctctcgacaattgctgccggttctataaccatacgatttgtgcgcaatag

SEQ ID NO: 144312 - DNA, 1950 bp, Artificial Sequence
  derived and/or modified sequence
atggaaaacgacccatcaagaaggcgagagtctattagtctcactcctgtggcaaaggggctcgagaatatgggggccgatttcctggagtcattggaggaggggcagcttcctcggtccgatctaagcccggccgaaattaggagcagttggagcgaggcagccccaaagccattctctcgctggcgcaatctgcagcccgcccttagggccagatcgttctgtcgggaacacatgcagctctttagatggatagggacaggactgctgtgtaccggcctgtcggccttcttacttgtggcatgcctgctggacttccaaagagcgctggctctcttcgtgctgacatgtgtggtgcttacctttctgggacacagactgctgaagcgcctcctaggtcccaagcttaggaggtttctgaaaccccagggccatcctcgactgctgctgtggtttaagcggggtttagctctcgctgctttcctgggcctggtcctgtggctcagcctcgataccagccagcgtccggaacaactggtctccttcgccggcatctgtgtgtttgtggccctgctgtttgcctgctcaaaacaccattgcgccgtgtcatggcgggccgtgagttggggcctcggactccagttcgtcctgggacttttagtaattcggacagaacctgggttcatcgcatttgagtggttaggggagcagattaggatatttctctcttatacaaaagccgggtcatcttttgtgttcggcgaggctctcgtcaaggacgtcttcgcattccaagtgctgcctattattgtgtttttctcatgcgtaatatcagtgttataccacgtgggactcatgcagtgggtaatcctgaaaattgcttggctcatgcaggttacaatgggtacaacagccactgagaccctatctgtcgcaggaaatattttcgtgagccagactgaagcacccctgcttatcaggccctacctggccgacatgactctgtctgaagtgcacgtggtgatgacgggaggatatgccacaatcgccggaagcctgctcggcgcctacataagcttcgggatagacgccacatcactgatcgctgcttcagttatggccgccccctgtgctttagccctgtctaagctagtctaccctgaggtggaagaaagcaaatttaggcgggaggagggagtgaaactgacatacggcgatgcccaaaacctgattgaagccgcatcaaccggcgcagctatctcagtgaaggtggtggctaacatcgctgccaatctcatcgcctttctggcagtgctcgatttcattaacgctgcactttcctggctgggagatatggtggacatccagggtctgtccttccagctcatttgtagctacatcctgcgacctgtggcctttctcatgggcgtggcttgggaggactgtccagtggtggctgaattgttgggaattaagctgtttttgaacgagttcgtcgcctaccaagatctgagcaaatacaagcagcggcgattggccggcgccgaggagtgggtgggcgatagaaaacaatggatatctgttcgtgcagaagtgttgacgacctttgccctgtgcggctttgcaaatttctcctcaattgggatcatgctggggggcctgacaagcatggtgccacagcgaaaatccgacttcagccaaatcgtgctgcgggccttatttaccggcgcttgtgtgtccctggtgaatgcttgtatggccggcatcctatacatgccccgaggtgccgaggttgactgcatgtctctcctgaacactacgctgagctctagctcttttgagatctaccagtgctgccgggaggccttccagtccgtgaatccggaattctctcctgaggcccttgataactgttgcaggttttataatcataccatttgtgcacaatag

SEQ ID NO: 144313 - DNA, 1950 bp, Artificial Sequence
  derived and/or modified sequence
atggagaatgaccccagcagaagaagagagagcatcagcctgacccctgtggccaagggcctggagaacatgggcgctgacttcctggagagcctggaggagggccagctgcccaggagtgacctgagccctgctgagatccgcagctcctggagcgaggccgcccccaagcccttcagccgctggaggaacctgcagcctgccctgcgggcccgctccttctgccgggagcacatgcagctgttccgctggattggaacaggcctgctgtgcaccggcctgagcgccttcctgctggtggcctgcctgctggacttccagagggccctggccctgtttgtgctgacctgtgtggtgctgaccttcctgggccaccggctgctgaagaggctgctgggccccaagctgcggcgcttcctgaagccccagggccacccccggctgctgctgtggttcaagaggggcctggccctggccgccttcctgggcctggtgctgtggctgagcctggacaccagccagaggcctgagcagctggtgtcctttgctggcatctgtgtgtttgtggccctgctgtttgcctgcagcaagcaccactgtgctgtgtcctggagggctgtgtcctggggcctgggcctgcagtttgtgctgggcctgctggtgatcagaacagagcccggcttcatcgcctttgagtggctgggggagcagatccgcatcttcctgagctacaccaaggccggcagcagctttgtgtttggagaggccctggtgaaggatgtgtttgccttccaggtgctgcccatcatcgtgttcttcagctgtgtgatctctgtgctgtaccacgtgggcctgatgcagtgggtgatcctgaagatcgcctggctgatgcaggtgaccatgggcaccacagccacagagaccctgtctgtggccggcaacatctttgtgtcccagacagaggcccccctgctgatccggccctacctggccgacatgaccctgtctgaggtgcacgtggtgatgactggaggctacgccaccatcgccggcagcctgctgggcgcctacatcagctttggaattgatgccaccagcctgattgctgcctctgtgatggccgccccctgtgccctggccctgagcaagctggtgtacccagaggtggaggagagcaagttcagaagagaggagggcgtgaagctgacctatggagatgcccagaacctgattgaagctgccagcactggagctgccatctctgtgaaggtggtggccaacattgctgccaacctgattgccttcctggccgtgctggacttcatcaatgctgccctgtcctggctgggggacatggtggacatccagggcctgtccttccagctgatctgcagctacatcctgcggcctgtggccttcctgatgggcgtggcctgggaggactgccctgtggtggccgagctgctgggcatcaagctgttcctgaatgaatttgtggcctaccaggacctgagcaagtacaagcagaggcggctggccggggctgaggagtgggtgggggacaggaagcagtggatctctgtgcgggcagaggtgctgaccacctttgccctgtgtggctttgccaacttcagcagcatcggcatcatgctgggcggcctgacctccatggtgccccagaggaagagtgacttcagccagatcgtgctgcgggccctcttcaccggggcctgtgtgtccctggtgaatgcctgcatggccggcatcctgtacatgcccagaggagctgaggtggactgcatgagcctgctgaacaccaccctgagcagcagcagctttgagatctaccagtgctgccgggaggccttccagagcgtgaaccctgagttcagccctgaggccctggacaactgctgccgcttctacaaccacaccatctgtgcccagtag

SEQ ID NO: 144314 - DNA, 1950 bp, Artificial Sequence
  derived and/or modified sequence
atggagaacgaccccagccggcggcgggagagcatcagcctgacccccgttgccaaagggctggagaatatgggggccgactttctcgagagtttagaagagggacagttacctaggtccgacttatccccagcagaaataaggtcttcctggtcagaggccgcccccaagccctttagcagatggcggaacctccagccggcactccgagcccggagcttttgtagagagcatatgcagttgttccgctggatagggacgggcctgctgtgcaccggtctgtctgcctttctcctggtcgcctgcctccttgatttccagagggccctggcactgtttgttctgacttgcgtggtgctcacgtttctgggccatagactgctgaagcggctgctcggcccaaaattaaggcgttttctgaaacctcagggccaccctagactgctgctgtggtttaagaggggattggccctcgctgcatttctgggcctggttttatggctgtctcttgatacttcacagagaccagaacagttggtcagtttcgccgggatctgtgtgtttgtcgcgctgctgtttgcctgttctaagcatcactgcgccgtctcttggcgtgccgtgtcttggggtctgggtctgcaatttgttttggggctgttggtcatccgaacagaaccaggctttatagcttttgaatggttaggcgagcagataagaatctttctctcttacacaaaggccggtagctcttttgtatttggagaggccttggtgaaagacgtgttcgccttccaggtgcttcctataattgtattcttttcatgcgtgataagcgtgttatatcatgtgggccttatgcagtgggtgatcctgaagatagcttggcttatgcaggtgacgatgggcacaactgcaaccgagactctgtcagtggcggggaatatatttgtgtcacagactgaagcccctttacttatcagaccttacctggctgacatgaccttatcggaggtgcatgtggtcatgacaggggggtacgccacaatcgcggggtctttgctgggggcttatatctctttcggcatcgacgccacctcgctgatagctgctagtgtgatggccgcaccatgcgccctggccctgtccaaactggtgtatcccgaggtggaagagagcaaatttagacgtgaagaaggggtgaagctgacatacggggacgcccaaaatctcatagaagccgcctcaacaggtgccgcgatatctgtgaaagtcgtggcaaacatagctgccaacttaatcgccttcctggccgtgctggacttcatcaacgcggctcttagttggctaggagacatggtcgacatacagggcttatcctttcaattaatctgttcttacatcctgcgcccagttgctttcctcatgggagttgcctgggaggattgcccagtcgtggctgagctgctcggaatcaagctctttctgaatgaatttgtcgcctatcaggacctgagtaagtacaaacagaggcgcctggctggcgctgaagaatgggtgggtgaccggaaacagtggatctctgtcagagcggaagttctgaccacgttcgccttgtgcggcttcgccaattttagtagcattggcattatgttggggggtttgacctcaatggtgccccaacgaaagtcagattttagtcagatcgtgctgcgcgctctttttactggagcatgtgtgtcactcgtaaacgcgtgtatggctggaatcctctatatgccgaggggggcagaagtggactgtatgtctcttttgaacactacgctgtccagttcctcgttcgaaatctaccagtgctgtagagaggcttttcagagtgtcaacccggaattctcacctgaagctctggacaattgttgcaggttttacaatcatacaatttgtgctcagtag

SEQ ID NO: 144315 - DNA, 1950 bp, Artificial Sequence
  derived and/or modified sequence
atggagaacgaccccagccggcggcgggagagcatcagcctgacccctgtagctaagggacttgagaatatgggcgccgattttctggaatctcttgaggaaggacaactcccccgctcggacctgtccccagcagagattcgtagctcttggtccgaggccgctccgaaacctttcagtaggtggcggaatttgcagccggccttaagagccagatcattttgccgtgaacacatgcagctgtttcgatggatcggcacgggcttgctttgcacaggcttatccgctttccttctagtcgcttgtcttctggacttccagcgcgcacttgcgctgttcgtgctcacatgcgtcgtcctgacattcctcgggcatcgcctgttgaaaagacttctcggccccaagttgcgacgctttctgaaaccacaaggccatccccggttgctgctgtggttcaagcgcgggctggcactggccgccttcctgggtttagtgttgtggcttagcctggacacttcccagcgacccgagcaactcgtgagctttgccgggatctgtgtcttcgttgctcttttatttgcttgctccaagcaccactgcgctgtgagctggcgtgccgtgagctggggcttgggtctccagttcgttttggggctgctggtgattcggaccgaaccggggtttatcgcttttgagtggcttggagaacagatacgaatatttctcagttataccaaggccggttcaagctttgttttcggcgaagcccttgtgaaagacgtgtttgcattccaggtgctccccattatagtatttttctcatgtgtgatctccgtcctttaccacgttgggctgatgcagtgggtgattcttaaaattgcctggctgatgcaggtgaccatgggaaccaccgcaaccgaaacgcttagtgtggccggcaacatcttcgtgagccaaacggaggccccacttttgattagaccttacctcgcggacatgacccttagtgaagtgcatgtggtgatgacaggcggctacgcaaccattgcaggaagtttacttggcgcatatataagtttcgggatcgacgccacatcgctaatagccgctagcgtgatggcggccccatgtgccctggccctctctaagctagtctatcctgaggtggaggagtcaaaatttcgccgcgaagagggcgtcaagctgacttacggcgatgcacagaatctgattgaagctgcatccacaggagctgcaatcagcgtcaaggtggtggcaaacatcgccgcgaatctgatcgcgtttcttgctgtgctggacttcatcaatgcagccctttcctggctgggtgatatggtagatatccagggactttcattccagttgatatgtagctatatcctcagaccggtcgctttcctaatgggagttgcctgggaggactgtccagtcgtagccgagcttctaggaattaaactgtttctgaacgaatttgttgcttaccaggacttaagcaaatacaaacaacggcggctcgctggcgccgaagaatgggtgggagatcggaaacaatggatatccgtcagggcagaagtccttacaaccttcgctctctgtggattcgcaaatttttctagcataggcatcatgcttgggggacttaccagcatggttccccagcgtaagagtgatttctctcaaatcgtgcttcgggcgctgtttacaggggcctgtgtcagcctggtaaatgcatgtatggccggaatcttgtatatgcccaggggggccgaagtggattgtatgtcattactcaacactactttgtcttcgtcctcctttgagatataccagtgctgtcgcgaggcatttcagtcagtgaatcctgagtttagtcctgaggcccttgataactgctgtagattttacaaccacacgatctgtgctcagtag

SEQ ID NO: 144316 - DNA, 1950 bp, Artificial Sequence
  derived and/or modified sequence
atggagaatgatccaagtcgcaggcgagaatccatatcactgacccccgttgctaaggggctcgagaacatgggtgcagattttttggaatctttagaagagggtcagctaccgaggtccgatctgagcccagccgagattaggagcagctggtctgaagctgctccaaaacccttctctcgctggagaaacctgcagcccgctcttagagcacgctccttttgccgcgaacacatgcagctgttccgttggattggtacaggcttgttgtgtaccggcttatctgctttcctcctggtggcttgtcttcttgacttccagagggccctagcactgttcgtgctgacctgtgtggtcctgacctttctggggcacagactcctgaagaggctactgggacccaagcttcgacgcttcttgaagccccagggccacccgcgtctgttactgtggtttaagcgaggtttagcccttgcagctttcctgggtttagttctttggctgtcccttgacacgagtcaacgacccgagcaactggtgagcttcgctggcatctgtgtctttgtcgctctgctgttcgcgtgcagtaagcatcactgtgccgtttcctggagagcagtttcttggggcctgggcctgcagttcgtgttgggccttctggtgattaggactgaaccaggttttatcgctttcgagtggctgggcgagcagatcagaatatttctgtcatatactaaagccggatcctcatttgtgttcggagaagcgctggttaaggatgtgttcgcttttcaggtcttgccaataatagtgttcttctcctgcgtaatttccgttctgtaccatgtggggctgatgcagtgggtaatactgaagatagcttggcttatgcaagtgactatgggcaccaccgccaccgagactctaagcgtcgccggtaacatatttgtgtctcagaccgaagccccactccttataagaccatacctcgccgacatgaccctttctgaagtccacgtggtcatgaccggcggatatgcaacaattgccggttctctgctgggtgcctacatctctttcggtattgatgccacatcactcattgccgcttccgtgatggcggcaccgtgcgcgttagcactgtctaaactggtgtaccccgaggtggaagagagcaaatttcggcgagaggagggtgttaagttgacatacggcgatgctcaaaacctgatcgaagcagcctctactggcgctgccatctcagttaaggttgtcgccaacatcgctgctaatctgattgcttttttggcagtgctcgatttcatcaacgccgcactgtcttggctcggggacatggtcgacatccaggggcttagcttccagctgatttgcagctacatattgcgtcccgttgcatttttgatgggcgtggcatgggaagactgtcccgtggttgccgagctgctgggcattaaactgtttcttaatgagttcgtagcctaccaggatcttagcaaatacaaacagcggagactagccggagcagaagaatgggtgggggacaggaagcagtggatttccgtgcgagccgaagtacttacgaccttcgccctgtgtgggtttgcaaatttcagttccatcgggatcatgcttggcggtcttacctccatggtgccacaacgtaagtcagatttcagccagatagtattgcgtgccttgttcaccggcgcatgtgtgtccctggtaaatgcttgtatggccggaatcctgtacatgcccaggggggcagaggtggattgtatgagcctgctaaacactactctgagctcctccagttttgagatctaccaatgttgtagagaagcattccaatcagttaacccagaattctcgcctgaggccctggataactgttgtagattctacaatcataccatctgtgcacagtag

SEQ ID NO: 144317 - DNA, 1950 bp, Artificial Sequence
  derived and/or modified sequence
atggagaacgaccccagccgtcggagggagagcatcagccttacccccgttgccaaggggctggagaatatgggtgcagactttttagagagtttggaggagggacagctgcctagatccgatctgagcccagccgagatccgcagttcatggtcagaagccgctccaaaacccttctcccggtggagaaacttacagcccgctttaagggcccgatctttctgccgcgagcatatgcagttgtttcgttggatcggaacagggcttctttgcaccggcctgagcgcctttttgctggtggcctgtctgctcgacttccaacgtgccctcgctctgttcgtgctgacctgtgtagtcctgacgtttcttggtcacagattgttgaagcgattactgggccctaagctcagacggtttctcaaaccccaagggcatcctcgcctacttctatggttcaagcggggactagccctcgctgcattcttgggattagtgctctggctgagtctggatacatcacagagaccagagcagctggtctctttcgcagggatatgtgtcttcgtcgccctgttgttcgcctgctctaagcatcactgtgcagtctcatggcgtgccgtgtcctggggactcggcctccagtttgtcctcgggctcctggtcatccggactgaacctggattcatcgcattcgaatggctgggtgaacaaatccgcatatttctgtcctacaccaaagcaggtagtagcttcgtgtttggggaggccctcgtgaaagacgttttcgcttttcaggttctaccaattattgtctttttcagttgtgtaattagcgtgctgtatcacgtgggtctgatgcagtgggtcatattgaaaatcgcctggttaatgcaggtcactatgggtactacagccaccgaaacattgtcagtggccggtaatatcttcgtgagccagaccgaagcacccctgctaattcgtccatatcttgccgatatgaccttatccgaagtgcatgtggttatgacgggcggatacgccacaatagctggctccctgttaggcgcttatatctcctttggcatagacgccacctctttgatcgcagcatctgtcatggcggctccttgcgccctagccctatcaaagctcgtttaccctgaagtcgaggagagtaaattcaggcgagaggagggtgtgaaattgacatacggcgacgctcaaaatcttattgaggcagcttcaactggagcagccatctctgtcaaggtcgttgcgaatattgctgcaaatttaatagcattcctggctgtccttgattttatcaacgcggctctgagctggttgggcgatatggtagacatccaggggcttagcttccagctgatctgttcctacattttgaggccagtggcctttctgatgggggtggcctgggaggactgtccagtggtagctgaactcctgggtatcaagctttttttgaatgagtttgtggcctaccaggacctgagcaagtacaagcagaggcggctggccggagctgaagaatgggtcggcgatcgcaaacaatggatctccgtacgggctgaggtactgactaccttcgcactttgtggattcgccaacttcagctccattggcatcatgcttggaggcctgacgagcatggtcccacaacgaaaaagtgatttcagccagatcgtgctgagggccctgttcacaggagcctgtgttagtcttgtgaacgcctgtatggctggcattctgtatatgcccagaggagcagaggtggactgtatgtctctgctcaataccactttgtcaagctcttccttcgagatttatcaatgctgccgtgaagcattccagagcgtcaatcccgagttctctcccgaggcactcgacaactgttgtagattctataatcatactatctgtgcgcaatag

SEQ ID NO: 144318 - DNA, 2636 bp, Artificial Sequence
  derived and/or modified sequence
ataagctgcactgcatggttgctgctggatgtgttgtgttcctggcttccctctggatgctgacagaaacaaggctggaaggtctgggacatggagaacgacccctcgagacgaagagagtccatctctctcacacctgtggccaagggtctggagaacatgggggctgatttcttggaaagcctggaggaaggccagctccctaggagtgacttgagccccgcagagatcaggagcagctggagcgaggcggcgccgaagcccttctccagatggaggaacctgcagccagccctgagagccagaagcttctgcagggagcacatgcagctgtttcgatggatcggcacaggcctgctctgcactgggctctctgccttcctgctggtggcctgcctcctggatttccagagggccctggctctgtttgtcctcacctgtgtggtcctcaccttcctgggccaccgcctgctgaaacggcttctggggccaaagctgaggaggtttctcaagcctcagggccatccccgcctgctgctctggtttaagaggggtctagctcttgctgctttcctgggcctggtcctgtggctgtctctggacacctcccagcggcctgagcaactggtgtccttcgcaggaatctgcgtgttcgtcgctctcctctttgcctgctcaaagcatcattgcgcagtgtcctggagggccgtgtcttggggacttggactgcagtttgtacttggactcctcgtcatcagaacagaaccaggattcattgcgttcgagtggctgggcgagcagatccggatcttcctgagctacacgaaggctggctccagcttcgtgtttggggaggcgctggtcaaggatgtctttgcctttcaggttctgcccatcattgtctttttcagctgtgtcatatccgttctctaccacgtgggcctcatgcagtgggtgatcctgaagattgcctggctgatgcaagtcaccatgggcaccacagccactgagaccctgagtgtggctggaaacatctttgtgagccagaccgaggctccattactgatccggccctacttggcagacatgacactctctgaagtccacgttgtcatgaccggaggttacgccaccattgctggcagcctgctgggtgcctacatctcctttgggatcgatgccacctcgttgattgcagcctctgtgatggctgccccttgtgccttggccctctccaagctggtctacccggaggtggaggagtccaagtttaggagggaggaaggagtgaaactgacctatggagatgctcagaacctcatagaagcagccagcactggggccgccatctccgtgaaggtggtcgccaacatcgctgccaacctgattgcgttcctggctgtgctggactttatcaatgctgccctctcctggctgggagacatggtggacatccaagggctcagcttccagctcatctgctcctacatcctgcggcctgtagccttcttgatgggtgtggcgtgggaggactgcccagtggtagctgagctgctggggatcaagctgtttctgaacgagtttgtggcctatcaagacctctccaagtacaagcaacgccgcctggcaggggccgaggagtgggtcggcgacaggaagcagtggatctccgtcagagctgaagtcctcacgacgtttgccctctgtggatttgccaatttcagctccattgggatcatgctgggaggcttgacctccatggtcccccaacggaagagcgacttctcccagatagtgctccgggcgctcttcacgggagcctgtgtgtccctggtgaacgcctgtatggcagggatcctctacatgcccaggggggctgaagttgactgcatgtccctcttgaacacgaccctcagcagcagtagctttgagatttaccagtgctgccgtgaggccttccagagcgtcaatccagagttcagcccagaggccctggacaactgctgtcggttttacaaccacacgatctgtgcacagtgaggacagaacatgcttgtgcttctgcgcttctgagggctgttctcccccgggaaccatctgtccccaccttccctttcccagagccctcttcagggaagccacaggacttagacccagctcaatcccacaattgggaagggttcatggagtgagtgtgcagagagtgagtgaggacataaggaaggacatgtcccactccatcccccttcctgctcccccatttcctaactcccccagtgtgaattctcagggtcacttctgcctcctcccgtttcccctccacatccaaacagcaccctggtcctctctatcccccctctcctggggtccctcacatgccccttcccttctgttgtgggctgcacaccaaagcctcctcccctccccacttcctaggcactaggatctctctgtggcttcccctgctgggtggtgtcacctctttctctgctttcagagaaacccttcccgcctttcctcagagtgcttcccaaactgaggtcccatggcacactgtcctgggaggcgttcagagggttccatgatggactaggtttggaaccactgggttaaataaacttagagagggctgttta

SEQ ID NO: 144319 - DNA, 2750 bp, Artificial Sequence
  derived and/or modified sequence
gctgcactgcatggttgctgctggatgtgttgtgttcctggcttccctctggatgctgacagaaacaagggaatttctgctgaagtgacaaggcaagccagagccaaagcaggttggacccagcttgtccccacagagacgtgtgcttccctctctctctgagagcgacctgttaaccgcaaatacctggaaggtctgggacatggagaacgacccctcgagacgaagagagtccatctctctcacacctgtggccaagggtctggagaacatgggggctgatttcttggaaagcctggaggaaggccagctccctaggagtgacttgagccccgcagagatcaggagcagctggagcgaggcggcgccgaagcccttctccagatggaggaacctgcagccagccctgagagccagaagcttctgcagggagcacatgcagctgtttcgatggatcggcacaggcctgctctgcactgggctctctgccttcctgctggtggcctgcctcctggatttccagagggccctggctctgtttgtcctcacctgtgtggtcctcaccttcctgggccaccgcctgctgaaacggcttctggggccaaagctgaggaggtttctcaagcctcagggccatccccgcctgctgctctggtttaagaggggtctagctcttgctgctttcctgggcctggtcctgtggctgtctctggacacctcccagcggcctgagcaactggtgtccttcgcaggaatctgcgtgttcgtcgctctcctctttgcctgctcaaagcatcattgcgcagtgtcctggagggccgtgtcttggggacttggactgcagtttgtacttggactcctcgtcatcagaacagaaccaggattcattgcgttcgagtggctgggcgagcagatccggatcttcctgagctacacgaaggctggctccagcttcgtgtttggggaggcgctggtcaaggatgtctttgcctttcaggttctgcccatcattgtctttttcagctgtgtcatatccgttctctaccacgtgggcctcatgcagtgggtgatcctgaagattgcctggctgatgcaagtcaccatgggcaccacagccactgagaccctgagtgtggctggaaacatctttgtgagccagaccgaggctccattactgatccggccctacttggcagacatgacactctctgaagtccacgttgtcatgaccggaggttacgccaccattgctggcagcctgctgggtgcctacatctcctttgggatcgatgccacctcgttgattgcagcctctgtgatggctgccccttgtgccttggccctctccaagctggtctacccggaggtggaggagtccaagtttaggagggaggaaggagtgaaactgacctatggagatgctcagaacctcatagaagcagccagcactggggccgccatctccgtgaaggtggtcgccaacatcgctgccaacctgattgcgttcctggctgtgctggactttatcaatgctgccctctcctggctgggagacatggtggacatccaagggctcagcttccagctcatctgctcctacatcctgcggcctgtagccttcttgatgggtgtggcgtgggaggactgcccagtggtagctgagctgctggggatcaagctgtttctgaacgagtttgtggcctatcaagacctctccaagtacaagcaacgccgcctggcaggggccgaggagtgggtcggcgacaggaagcagtggatctccgtcagagctgaagtcctcacgacgtttgccctctgtggatttgccaatttcagctccattgggatcatgctgggaggcttgacctccatggtcccccaacggaagagcgacttctcccagatagtgctccgggcgctcttcacgggagcctgtgtgtccctggtgaacgcctgtatggcagggatcctctacatgcccaggggggctgaagttgactgcatgtccctcttgaacacgaccctcagcagcagtagctttgagatttaccagtgctgccgtgaggccttccagagcgtcaatccagagttcagcccagaggccctggacaactgctgtcggttttacaaccacacgatctgtgcacagtgaggacagaacatgcttgtgcttctgcgcttctgagggctgttctcccccgggaaccatctgtccccaccttccctttcccagagccctcttcagggaagccacaggacttagacccagctcaatcccacaattgggaagggttcatggagtgagtgtgcagagagtgagtgaggacataaggaaggacatgtcccactccatcccccttcctgctcccccatttcctaactcccccagtgtgaattctcagggtcacttctgcctcctcccgtttcccctccacatccaaacagcaccctggtcctctctatcccccctctcctggggtccctcacatgccccttcccttctgttgtgggctgcacaccaaagcctcctcccctccccacttcctaggcactaggatctctctgtggcttcccctgctgggtggtgtcacctctttctctgctttcagagaaacccttcccgcctttcctcagagtgcttcccaaactgaggtcccatggcacactgtcctgggaggcgttcagagggttccatgatggactaggtttggaaccactgggttaaataaacttagagagggctgtttaga

SEQ ID NO: 144320 - DNA, 1950 bp, Artificial Sequence
  derived and/or modified sequence
atggagaacgaccccagcagaagaagagagagcatcagcctgacccccgtggccaagggcctggagaacatgggcgccgacttcctggagagcctggaggagggccagctgcccagaagcgacctgagccccgccgagatcagaagcagctggagcgaggccgcccccaagcccttcagcagatggagaaacctgcagcccgccctgagagccagaagcttctgcagagagcacatgcagctgttcagatggatcggcaccggcctgctgtgcaccggcctgagcgccttcctgctggtggcctgcctgctggacttccagagagccctggccctgttcgtgctgacctgcgtggtgctgaccttcctgggccacagactgctgaagagactgctgggccccaagctgagaagattcctgaagccccagggccaccccagactgctgctgtggttcaagagaggcctggccctggccgccttcctgggcctggtgctgtggctgagcctggacaccagccagagacccgagcagctggtgagcttcgccggcatctgcgtgttcgtggccctgctgttcgcctgcagcaagcaccactgcgccgtgagctggagagccgtgagctggggcctgggcctgcagttcgtgctgggcctgctggtgatcagaaccgagcccggcttcatcgccttcgagtggctgggcgagcagatcagaatcttcctgagctacaccaaggccggcagcagcttcgtgttcggcgaggccctggtgaaggacgtgttcgccttccaggtgctgcccatcatcgtgttcttcagctgcgtgatcagcgtgctgtaccacgtgggcctgatgcagtgggtgatcctgaagatcgcctggctgatgcaggtgaccatgggcaccaccgccaccgagaccctgagcgtggccggcaacatcttcgtgagccagaccgaggcccccctgctgatcagaccctacctggccgacatgaccctgagcgaggtgcacgtggtgatgaccggcggctacgccaccatcgccggcagcctgctgggcgcctacatcagcttcggcatcgacgccaccagcctgatcgccgccagcgtgatggccgccccctgcgccctggccctgagcaagctggtgtaccccgaggtggaggagagcaagttcagaagagaggagggcgtgaagctgacctacggcgacgcccagaacctgatcgaggccgccagcaccggcgccgccatcagcgtgaaggtggtggccaacatcgccgccaacctgatcgccttcctggccgtgctggacttcatcaacgccgccctgagctggctgggcgacatggtggacatccagggcctgagcttccagctgatctgcagctacatcctgagacccgtggccttcctgatgggcgtggcctgggaggactgccccgtggtggccgagctgctgggcatcaagctgttcctgaacgagttcgtggcctaccaggacctgagcaagtacaagcagagaagactggccggcgccgaggagtgggtgggcgacagaaagcagtggatcagcgtgagagccgaggtgctgaccaccttcgccctgtgcggcttcgccaacttcagcagcatcggcatcatgctgggcggcctgaccagcatggtgccccagagaaagagcgacttcagccagatcgtgctgagagccctgttcaccggcgcctgcgtgagcctggtgaacgcctgcatggccggcatcctgtacatgcccagaggcgccgaggtggactgcatgagcctgctgaacaccaccctgagcagcagcagcttcgagatctaccagtgctgcagagaggccttccagagcgtgaaccccgagttcagccccgaggccctggacaactgctgcagattctacaaccacaccatctgcgcccagtag

SEQ ID NO: 144321 - protein, 357 aa, Artificial Sequence
  derived and/or modified sequence
MTSELDIFVGNTTLIDEDVYRLWLDGYSVTDAVALRVRSGILEQTGATAAVLQSDTMDHYRTFHMLERLLHAPPKLLHQLIFQIPPSRQALLIERYYAFDEAFVREVLGKKLSKGTKKDLDDISTKTGITLKSCRRQFDNFKRVFKVVEEMRGSLVDNIQQHFLLSDRLARDYAAIVFFANNRFETGKKKLQYLSFGDFAFCAELMIQNWTLGAVDSQMDDMDMDLDKEFLQDLKELKVLVADKDLLDLHKSLVCTALRGKLGVFSEMEANFKNLSRGLVNVAAKLTHNKDVRDLFVDLVEKFVEPCRSDHWPLSDVRFFLNQYSASVHSLDGFRHQALWDRYMGTLRGCLLRLYHD

SEQ ID NO: 144322 - DNA, 1248 bp, Artificial Sequence
  derived and/or modified sequence
ataagctgggtcccgatgccgcgagcggaatctcggcgctcccggaagtggcctgaaggcggcgcgccagtcccgagcagtgctcgctcctgctcggggcgctgcggccccgggcgtcgccatgaccagtgagctggacatcttcgtggggaacacgacccttatcgacgaggacgtgtatcgcctctggctcgatggttactcggtgaccgacgcggtggccctgcgggtgcgctcgggaatcctggagcagactggcgccacggcagcggtgctgcagagcgacaccatggaccattaccgcaccttccacatgctcgagcggctgctgcatgcgccgcccaagctactgcaccagctcatcttccagattccgccctcccggcaggcactactcatcgagaggtactatgcctttgatgaggcctttgttcgggaggtgctgggcaagaagctgtccaaaggcaccaagaaagacctggatgacatcagcaccaaaacaggcatcaccctcaagagctgccggagacagtttgacaactttaaacgggtcttcaaggtggtagaggaaatgcggggctccctggtggacaatattcagcaacacttcctcctctctgaccggttggccagggactatgcagccatcgtcttctttgctaacaaccgctttgagacagggaagaaaaaactgcagtatctgagcttcggtgactttgccttctgcgctgagctcatgatccaaaactggacccttggagccgtcgactcacagatggatgacatggacatggacttagacaaggaatttctccaggacttgaaggagctcaaggtgctagtggctgacaaggaccttctggacctgcacaagagcctggtgtgcactgctctccggggaaagctgggcgtcttctctgagatggaagccaacttcaagaacctgtcccgggggctggtgaacgtggccgccaagctgacccacaataaagatgtcagagacctgtttgtggacctcgtggagaagtttgtggaaccctgccgctccgaccactggccactcagcgacgtgcggttcttcctgaatcagtattcagcgtctgtccactccctcgatggcttccgacaccaggccctctgggaccgctacatgggcaccctccgcggctgcctcctgcgcctgtatcatgactgaggtgcctcccaacgctccgcccacgctgacaataaagttgctctgagtttgga

SEQ ID NO: 144323 - DNA, 1074 bp, Artificial Sequence
  derived and/or modified sequence
atgacaagtgagctcgacatctttgtcggtaacactactctgattgacgaggatgtttacaggctctggctggacgggtatagcgtgactgacgccgtcgcactccgcgtgcggtcagggatcctcgagcagactggcgcaaccgctgccgtgctccagagcgacaccatggaccactaccgcactttccatatgctggaacgtctgttgcatgcccctcccaaattattgcatcagctgatcttccagatcccgccttctagacaggctctgctgatcgagcgctattacgcttttgatgaggcgttcgttcgtgaagtgctcggaaagaaattgtctaagggcaccaagaaggacctcgacgacatttctacgaaaacaggaattacccttaagtcatgtaggaggcagtttgacaactttaaacgagttttcaaagtcgtcgaagagatgcgtggctcacttgtggataacattcagcagcacttcttgctctccgacagactggcccgagattacgccgccatcgtcttcttcgccaacaaccgctttgagacaggcaaaaaaaaactgcaatacctatcattcggtgattttgcattttgtgccgaactgatgatacaaaattggacactgggcgccgtggattcccaaatggacgacatggatatggatctcgacaaggagtttttgcaggaccttaaagagctcaaggtcctggtagcagataaggatttgttggacttgcacaaatccttggtatgtaccgctctgagaggtaaattgggggttttcagtgagatggaagctaatttcaagaacctgtctagaggcctggttaatgtggccgccaagcttactcacaataaagatgtcagggatctatttgtggaccttgtcgagaaattcgtggaaccttgtagatccgatcactggcctctgagtgacgtccgcttcttcctgaaccagtacagcgcttctgtacactcactggatggcttccggcatcaggccctctgggaccgctatatgggcacactgcggggttgcctgctgcgcctgtaccacgactag

SEQ ID NO: 144324 - DNA, 1074 bp, Artificial Sequence
  derived and/or modified sequence
atgaccagcgagctggacatctttgtgggcaacaccaccctgattgatgaagatgtgtaccgcctgtggctggatggctacagcgtgacagatgctgtggccctgcgggtgcgcagcggcatcctggagcagacaggagccacagctgctgtgctgcagagcgacaccatggaccactaccgcaccttccacatgctggagcggctgctgcacgccccacccaagctgctgcaccagctgatcttccagatcccccccagccggcaggccctgctgattgagcgctactatgcctttgatgaggcctttgtgcgggaggtgctgggcaagaagctgagcaagggcaccaagaaggacctggatgacatcagcaccaagacaggcatcaccctgaagagctgccggcggcagtttgacaacttcaagagggtcttcaaggtggtggaggagatgaggggcagcctggtggacaacatccagcagcacttcctgctgagtgaccggctggcccgggactatgctgccatcgtgttctttgccaacaacagatttgagaccgggaagaagaagctgcagtacctgagctttggagactttgccttctgtgccgagctgatgatccagaactggaccctgggcgctgtggacagccagatggatgacatggacatggacctggacaaggagttcctgcaggacctgaaggagctgaaggtgctggtggccgacaaggacctgctggacctgcacaagagcctggtgtgcacagccctgcggggcaagctgggcgtcttcagcgagatggaggccaacttcaagaacctgagccggggcctggtgaatgtggccgccaagctgacccacaacaaggatgtgcgggacctgtttgtggacctggtggagaagtttgtggagccctgccgcagtgaccactggcccctgagtgatgtgcgcttcttcctgaaccagtacagcgcctctgtgcacagcctggatggcttccgccaccaggccctgtgggaccgctacatgggcaccctgcggggctgcctgctgcggctgtaccatgactag

SEQ ID NO: 144325 - DNA, 1074 bp, Artificial Sequence
  derived and/or modified sequence
atgaccagcgagctggacatcttcgtgggcaacaccaccctgatcgacgaggatgtctacagattgtggctggatggatactccgtcacggacgcagtggcacttcgggtccgcagcggcatactggagcaaacaggcgctacagccgctgtgctccaatcagacacaatggaccattatcgcacatttcacatgctggaaaggctgctgcacgcaccccccaaactgttacatcaactcattttccagatacctccatcaagacaagcattgctcattgaaagatattacgcgttcgacgaagccttcgtgagagaagtccttggcaagaagttgagcaagggaactaaaaaagacttagacgacatctcaactaagactgggattaccctgaaatcctgtcggcgccagttcgataatttcaaaagagtgttcaaagtggttgaggaaatgaggggaagcctggtggacaacatccagcagcactttcttctctcagataggttagccagagactacgccgcgatcgtctttttcgcgaataaccgttttgagacgggtaaaaagaagttgcagtacctgtcgttcggagacttcgcattttgcgcagagttaatgattcaaaactggaccctgggagctgtagattcccagatggatgatatggacatggatctcgacaaagaattcctgcaagatcttaaggaactgaaggtgctggtggccgacaaagatctcttggacctccacaagtccctggtgtgcaccgcactccggggtaaactgggcgtattttccgaaatggaggccaactttaagaacctaagtaggggtctcgtgaatgtcgctgccaagctgactcacaataaggatgtaagagacctgttcgtcgaccttgtcgagaagtttgtagagccgtgtcggtctgaccactggcctttaagcgatgttagattttttctgaaccagtactccgccagcgttcacagcctggatgggttccgacaccaggcgctgtgggataggtatatgggcacactccgcggctgtctgctgcgactttaccacgactag

SEQ ID NO: 144326 - DNA, 1074 bp, Artificial Sequence
  derived and/or modified sequence
atgacctctgagctggacatcttcgtgggcaacaccacactgatagatgaagacgtctacagactgtggctggacggctattcggtaacagacgcagtggccctgcgggttcggtcaggcattctcgagcagactggcgcaactgcggctgtgcttcaaagcgatactatggaccattaccgcacattccacatgctggaaaggctgctccacgctccgccaaagcttctgcatcagctgatcttccagatccccccatctaggcaggctctcctcatcgaacggtattacgcattcgatgaggcgttcgtgcgcgaagtgctggggaagaaactttcgaagggtaccaaaaaggacctggatgatattagcactaagaccggaattacgctaaagagttgccgccgacaatttgacaatttcaaacgcgtgtttaaggtcgtagaggaaatgcgcggtagccttgtggacaacatccagcagcatttcctgctgagcgacaggctggccagagattatgcagcgatcgtgttttttgcaaacaaccggtttgagaccggcaaaaagaagttgcaatatttaagcttcggggatttcgcgttctgcgccgaactgatgattcagaactggacgctcggtgccgtcgattcacagatggatgacatggatatggacctggacaaagagttcctgcaggatctcaaagaactgaaggttctagttgcagataaagaccttctcgatctgcataaaagccttgtctgcacagcgcttcgcggaaaactcggcgtgttctctgaaatggaagccaacttcaaaaatctgagccgaggactcgttaatgtggctgcaaagttgacacacaacaaagacgtccgggatctgttcgtggacttagtagaaaaattcgttgaaccttgtcggtccgaccactggccactcagtgacgtaagattcttcttgaatcagtacagcgcctctgttcactccctcgatggttttcgccatcaggcactgtgggaccggtacatgggcactctccgcggatgtctgctgaggctgtatcatgactag

SEQ ID NO: 144327 - DNA, 1074 bp, Artificial Sequence
  derived and/or modified sequence
atgaccagcgagctggacatcttcgtgggcaacaccaccctgatcgacgaggacgtgtacagactgtggctggacggctacagcgtgaccgacgccgtggccctgagagtgagaagcggcatcctggagcagaccggcgccaccgccgccgtgctgcagagcgacaccatggaccactacagaaccttccacatgctggagagactgctgcacgccccccccaagctgctgcaccagctgatcttccagatcccccccagcagacaggccctgctgatcgagagatactacgccttcgacgaggccttcgtgagagaggtgctgggcaagaagctgagcaagggcaccaagaaggacctggacgacatcagcaccaagaccggcatcaccctgaagagctgcagaagacagttcgacaacttcaagagagtgttcaaggtggtggaggagatgagaggcagcctggtggacaacatccagcagcacttcctgctgagcgacagactggccagagactacgccgccatcgtgttcttcgccaacaacagattcgagaccggcaagaagaagctgcagtacctgagcttcggcgacttcgccttctgcgccgagctgatgatccagaactggaccctgggcgccgtggacagccagatggacgacatggacatggacctggacaaggagttcctgcaggacctgaaggagctgaaggtgctggtggccgacaaggacctgctggacctgcacaagagcctggtgtgcaccgccctgagaggcaagctgggcgtgttcagcgagatggaggccaacttcaagaacctgagcagaggcctggtgaacgtggccgccaagctgacccacaacaaggacgtgagagacctgttcgtggacctggtggagaagttcgtggagccctgcagaagcgaccactggcccctgagcgacgtgagattcttcctgaaccagtacagcgccagcgtgcacagcctggacggcttcagacaccaggccctgtgggacagatacatgggcaccctgagaggctgcctgctgagactgtaccacgactag

SEQ ID NO: 144328 - protein, 218 aa, Artificial Sequence
  derived and/or modified sequence
MGTRDDEYDYLFKVVLIGDSGVGKSNLLSRFTRNEFNLESKSTIGVEFATRSIQVDGKTIKAQIWDTAGQERYRAITSAYYRGAVGALLVYDIAKHLTYENVERWLKELRDHADSNIVIMLVGNKSDLRHLRAVPTDEARAFAEKNNLSFIETSALDSTNVEEAFKNILTEIYRIVSQKQIADRAAHDESPGNNVVDISVPPTTDGQKPNKLQCCQNL

SEQ ID NO: 144329 - DNA, 657 bp, Artificial Sequence
  derived and/or modified sequence
atgggcaccagagacgacgagtacgactacctgttcaaggtggtgctgatcggcgacagcggcgtgggcaagagcaacctgctgagcagattcaccagaaacgagttcaacctggagagcaagagcaccatcggcgtggagttcgccaccagaagcatccaggtggacggcaagaccatcaaggcccagatctgggacaccgccggccaggagagatacagagccatcaccagcgcctactacagaggcgccgtgggcgccctgctggtgtacgacatcgccaagcacctgacctacgagaacgtggagagatggctgaaggagctgagagaccacgccgacagcaacatcgtgatcatgctggtgggcaacaagagcgacctgagacacctgagagccgtgcccaccgacgaggccagagccttcgccgagaagaacaacctgagcttcatcgagaccagcgccctggacagcaccaacgtggaggaggccttcaagaacatcctgaccgagatctacagaatcgtgagccagaagcagatcgccgacagagccgcccacgacgagagccccggcaacaacgtggtggacatcagcgtgccccccaccaccgacggccagaagcccaacaagctgcagtgctgccagaacctgtag

SEQ ID NO: 144330 - DNA, 657 bp, Artificial Sequence
  derived and/or modified sequence
atgggcacgcgagatgacgagtatgactacctgtttaaggttgtgctgattggagattcaggcgttggaaagagcaacttactgtcccgtttcacccgcaatgagttcaatctggaaagcaaaagcacgattggggtggagtttgccacccggtctatccaagttgacgggaagactatcaaggctcagatttgggacactgctggtcaggaacgctacagggcaataacaagtgcctattataggggggctgtgggggccctcctcgtgtatgacatagctaagcacctcacctatgaaaatgtcgagaggtggctgaaagagctccgagatcacgccgattccaatatcgtgatcatgctggtgggcaataaatcagatctccggcatctacgcgcagtgcctactgacgaggcacgcgcattcgccgaaaagaacaatctgtctttcatcgagacttccgcactggacagtacaaatgtcgaggaagctttcaaaaatatcttgactgagatttacaggatcgtctctcaaaagcagatcgccgatcgcgccgctcacgacgagtcccccggaaataacgtcgtagacattagtgtgccccctacaactgatggtcagaagcctaataagctccagtgttgccagaacctatag

SEQ ID NO: 144331 - DNA, 657 bp, Artificial Sequence
  derived and/or modified sequence
atgggcaccagagatgatgaatatgactacctgttcaaggtggtgctgattggagacagcggcgtgggcaagagcaacctgctgagccgcttcaccagaaatgagttcaacctggagagcaagagcaccatcggcgtggagtttgccaccaggagcatccaggtggatggcaagaccatcaaggcccagatctgggacacagctggccaggagcgctaccgggccatcaccagcgcctactacagaggagctgtgggcgccctgctggtgtatgacatcgccaagcacctgacctatgaaaatgtggagcgctggctgaaggagctgcgggaccatgctgacagcaacatcgtcatcatgctggtgggcaacaagagtgacctgcggcacctgcgggctgtgcccacagatgaggcccgggcctttgctgagaagaacaacctgtccttcatcgagaccagcgccctggacagcaccaacgtggaggaggccttcaagaacatcctgacagagatctacagaattgtgtcccagaagcagattgctgacagagctgcccatgatgagagccctggcaacaacgtggtggacatctctgtgccccccaccacagatggccagaagcccaacaagctgcagtgctgccagaacctgtag

SEQ ID NO: 144332 - DNA, 657 bp, Artificial Sequence
  derived and/or modified sequence
atgggcacccgggacgacgagtacgactacctgttcaaggtggtgctgatcggcgactctggcgtgggaaagtcgaatctgctatccagattcactagaaatgagttcaatctggagagtaagtctaccatcggcgtagagtttgcaacaaggtccattcaggtggacggcaagacaatcaaggcccagatctgggacaccgccggccaggagagatatcgggcaatcacctcagcctactatcggggagcagtgggtgctttgctcgtttatgatattgcaaagcaccttacgtacgagaacgtggagagatggttgaaggagctgagagaccatgcagactccaacatcgtgataatgttggtgggcaataagtcagacctccgccacctcagagcagtgcctactgacgaagctcgagcattcgccgaaaaaaataatcttagttttatcgagacgtcagcactcgacagcacgaacgtagaagaggcttttaagaatattctgactgaaatttatagaatagtttcacaaaagcagattgccgaccgcgccgctcacgacgaatctccgggcaataatgtggtggacatctctgtacctcctaccaccgacggtcaaaaaccgaacaagttgcagtgttgtcaaaatctctag

SEQ ID NO: 144333 - DNA, 657 bp, Artificial Sequence
  derived and/or modified sequence
atgggaacccgtgacgatgagtacgactacctgtttaaagtagttctgatcggggactccggggtgggtaagtccaacttactgtctagattcaccagaaacgagttcaatctggagtccaaaagcactataggagtggaatttgcaacacgatccatccaagtggatgggaagaccatcaaagcccagatctgggataccgccggacaagagaggtaccgggctatcacctccgcctactatcgaggcgctgtcggagcattattggtctatgacatagccaagcacctcacctacgaaaatgtcgaacgttggctaaaggagttgcgggaccacgccgacagcaacatcgtgatcatgctcgttggaaataaaagcgatctgcggcacctgcgagcagtgcccactgatgaagccagagcattcgcggagaagaacaatcttagttttatagaaacctctgccttggacagcactaatgtcgaggaagcctttaaaaacatcctgactgagatctacaggattgtgtcccagaagcagattgctgatcgggctgcccatgatgagagtccaggcaacaacgtagtagatattagtgtgccgccaacaacggatggccagaagcccaataaactgcagtgctgtcagaacctctag

SEQ ID NO: 144334 - DNA, 1624 bp, Artificial Sequence
  derived and/or modified sequence
cattcaaccgccgctctgcgcggcgccggctccgcccccgtcgggtgtttgtggtggggctgcggagtcgccgatcccgccggaagcgccaggacaatggggacccgggacgacgagtacgactacctattcaaagtggtgctcatcggggactcaggcgtgggcaagagcaacctgctgtcgcgcttcacccgcaacgagttcaacctggagagcaagagcaccatcggcgtggagttcgccacccgcagcatccaggtggacggcaagaccatcaaggcgcagatctgggacaccgctggccaggagcgctaccgcgccatcacctccgcgtactaccgtggtgcagtgggcgccctgctggtgtacgacatcgccaagcacctgacctatgagaacgtggagcgctggctgaaggagctgcgggaccacgcagacagcaacatcgtcatcatgctggtgggcaacaagagtgacctgcgccacctgcgggctgtgcccactgacgaggcccgcgccttcgcagaaaagaacaacttgtccttcatcgagacctcagccttggattccactaacgtagaggaagcattcaagaacatcctcacagagatctaccgcatcgtgtcacagaaacagatcgcagaccgcgctgcccacgacgagtccccggggaacaacgtggtggacatcagcgtgccgcccaccacggacggacagaagcccaacaagctgcagtgctgccagaacctgtgacccctgcgcctccacccagcgtgcgtgcacgtcctccgcccgcccccgccacggtatcctctggcccctccctgctgtccctctgtggccggctcgttccagccctcccagtgagctctgcacggccgggccggggcccaggaaggacaggagccagtgctaccccgtcctgcccggggaaaagctagaagccccggtttgctgcacccatgaaactcgggtccccacagcgtcttggcggggtggggagggcggcaggatggacggggctggccagaggcgaggaggacgggcggacggcgccgccttctccccttttccttggccgactctagggagcgattgcctccctccctccgtgaccgggtggcccagccagcccgtcgtccccacccagaaccgtgctctgggccaaagcccgaagaaccaggcagcgggggccggggcaggcggaccccccgggctctcagcgcccacccgctcctccgcacacagcagctcgcacaggcctcccacctctgcctgttgattgatgcagggagaagcccgtccccccctctcccctctcccctcccctctcctgcacgcaacgcgccctctcggccctccctgtccccctcctctgtctcgtctccccatctggtctggaacctgtttgcaagtgaagcaatatctccgtgttttgtatatacaaccgctcttgtagcctttggtttttgttaatgtagagaaacacagattctttatacactttgtaagatttacgccaaaccccagctctcgatctcttcttctccctgtggcccctgcgctgttgccccgtccccgtcaccccgcccgttactgaaatgtataatctgacttcctgtac

SEQ ID NO: 144335 - protein, 153 aa, Artificial Sequence
  derived and/or modified sequence
MMASMRVVKELEDLQKKPPPYLRNLSSDDANVLVWHALLLPDQPPYHLKAFNLRISFPPEYPFKPPMIKFTTKIYHPNVDENGQICLPIISSENWKPCTKTCQVLEALNVLVNRPNIREPLRMDLADLLTQNPELFRKNAEEFTLRFGVDRPS

SEQ ID NO: 144336 - protein, 87 aa, Artificial Sequence
  derived and/or modified sequence
MIKFTTKIYHPNVDENGQICLPIISSENWKPCTKTCQVLEALNVLVNRPNIREPLRMDLADLLTQNPELFRKNAEEFTLRFGVDRPS

SEQ ID NO: 144337 - protein, 65 aa, Artificial Sequence
  derived and/or modified sequence
MIKFTTKIYHPNVDENGQICLPIISSENWKPCTKTCQVLEALNVLVNRPNIREPLRMDLADLLTQ

SEQ ID NO: 144338 - DNA, 462 bp, Artificial Sequence
  derived and/or modified sequence
atgatggccagcatgagagtggtgaaggagctggaggacctgcagaagaagccccccccctacctgagaaacctgagcagcgacgacgccaacgtgctggtgtggcacgccctgctgctgcccgaccagcccccctaccacctgaaggccttcaacctgagaatcagcttcccccccgagtaccccttcaagccccccatgatcaagttcaccaccaagatctaccaccccaacgtggacgagaacggccagatctgcctgcccatcatcagcagcgagaactggaagccctgcaccaagacctgccaggtgctggaggccctgaacgtgctggtgaacagacccaacatcagagagcccctgagaatggacctggccgacctgctgacccagaaccccgagctgttcagaaagaacgccgaggagttcaccctgagattcggcgtggacagacccagctag

SEQ ID NO: 144339 - DNA, 462 bp, Artificial Sequence
  derived and/or modified sequence
atgatggcctccatgagggtcgtgaaggagcttgaggacctacagaagaaaccgcccccatacctccggaacctttcctccgatgatgctaacgtgttagtgtggcacgctctcctactcccggatcagcccccataccatttaaaggcattcaatttgcgtatcagttttccgccggagtacccatttaagcctcccatgattaagtttacgactaaaatttaccacccaaatgtggacgaaaatggacagatctgtcttccaataatctcttccgagaattggaaaccttgtacaaagacttgtcaggtgctggaggcactgaatgtgctggttaaccggccgaatatccgggaacctctgcgtatggacctcgccgatttgctgacccagaatcccgagctgttcaggaaaaacgctgaggaatttactcttagattcggggtggaccgcccgtcctag

SEQ ID NO: 144340 - DNA, 462 bp, Artificial Sequence
  derived and/or modified sequence
atgatggcctccatgagggtggtgaaggagctggaggacctgcagaagaagcccccaccctacctgaggaacctgagcagtgatgatgccaacgtgctggtgtggcacgccctgctgctgcctgaccagcccccctaccacctgaaggccttcaacctgcgcatctccttccccccagagtaccccttcaagccacccatgatcaagttcaccaccaagatctaccaccccaacgtggatgaaaatggccagatctgcctgcccatcatcagcagcgagaactggaagccctgcaccaagacctgccaggtgctggaggccctgaatgtgctggtgaaccggcccaacatccgggagcccctgaggatggacctggccgacctgctgacccagaaccctgagctgttcaggaagaatgctgaggagttcaccctgcgctttggagtggaccggcccagctag

SEQ ID NO: 144341 - DNA, 462 bp, Artificial Sequence
  derived and/or modified sequence
atgatggccagcatgcgggtggtgaaggagctggaggacctgcagaaaaaaccgccaccctatctgagaaacctgagctccgacgatgcgaacgtgttggtatggcatgccctactgctacctgatcagcccccctatcatctgaaggctttcaatctgagaatttcattcccacccgaatatccctttaagccccccatgattaaattcactaccaaaatctaccatccaaacgtagatgagaacggtcagatctgtcttcctatcataagcagtgagaactggaagccctgtaccaaaacatgccaggtgcttgaagcccttaacgtactggtaaacagaccaaatattagggaaccactgaggatggacctcgctgacctcctgacccagaaccccgaactcttccgaaaaaacgctgaggagttcaccttacggttcggtgtggatcgccccagttag

SEQ ID NO: 144342 - DNA, 462 bp, Artificial Sequence
  derived and/or modified sequence
atgatggcatctatgagagtcgtcaaagaacttgaagatttacaaaagaagcctcccccatacttaaggaacttgtcttccgacgacgccaatgtgctcgtgtggcacgctttacttttgcccgatcagcccccttaccatctgaaggcctttaacctacgcatctcatttcctcccgaatacccttttaagccacctatgataaaattcaccactaagatctaccaccctaatgtcgacgaaaacgggcagatatgcctgcctatcatctcaagcgagaattggaaaccctgtaccaagacctgccaagttttggaagctttgaacgtgctcgtgaacaggcctaatatccgcgagcctctacgcatggaccttgctgaccttctcacacagaatcctgagttgtttcgtaagaatgccgaagaattcacactccggtttggggtggatagacccagctag

SEQ ID NO: 144343 - DNA, 1354 bp, Artificial Sequence
  derived and/or modified sequence
ttgtccggcgggtcgtccttcgacggcctcctggcctcgccggagcgggtgcggggaggcccacgcagcgacggctggaggaggggtgggcggggctgccgggggtggggtccccggggcggggcggggcgcgctgtgtcgcgggtcggagctcggtcctgctggaggccacgggtgccacacactcggtcccgacatgatggcgagcatgcgagtggtgaaggagctggaggatcttcagaagaagcctcccccatacctgcggaacctgtccagcgatgatgccaatgtcctggtgtggcacgctctcctcctacccgaccaacctccctaccacctgaaagccttcaacctgcgcatcagcttcccgccggagtatccgttcaagcctcccatgatcaaattcacaaccaagatctaccaccccaacgtggacgagaacggacagatttgcctgcccatcatcagcagtgagaactggaagccttgcaccaagacttgccaagtcctggaggccctcaatgtgctggtgaatagaccgaatatcagggagcccctgcggatggacctcgctgacctgctgacacagaatccggagctgttcagaaagaatgccgaagagttcaccctccgattcggagtggaccggccctcctaactcatgttctgaccctctgtgcactggatcctcggcatagcggacggacacacctcatggactgaggccagagccccctgtggcccattccccattcatttttcccttcttaggttgttagtcattagtttgtgtgtgtgtgtggtggagggaagggagctatgagtgtgtgtgttgtgtatggactcactcccaggttcacctggccacaggtgcacccttcccacaccctttacattccccagagccaagggagtttaagtttgcagttacaggccagttctccagctctccatcttagagagacaggtcaccttgcaggcctgcttgcaggaaatgaatccagcagccaactcgaatccccctagggctcaggcactgagggcctggggacagtggagcatatgggtgggagacagatggagggtaccctatttacaactgagtcagccaagccactgatgggaatatacagatttaggtgctaaaccatttattttccacggatgagtcacaatctgaagaatcaaacttccatcctgaaaatctatatgtttcaaaaccacttgccatcctgttagattgccagttcctgggaccaggcctcagactgtgaagtatatatcctccagcattcagtccagggggagccacggaaaccatgttcttgcttaagccattaaagtcagagatgaa

SEQ ID NO: 144344 - DNA, 1573 bp, Artificial Sequence
  derived and/or modified sequence
acaaaggatccccgactgccggggagcggtgctcggagggcacaggtctacgccatcccccacgcagtttcggagatggagcgctgggcccatggagggaaggcggcaggctcggcggctccggcagcttgctggggcaggggctcaaggcggcagtccgatagtggaggccgctgagaactgtcacggagctgcgtctgtacagcgagcatcccttatttattcagggcgagtgtgtatttggggcggcgtgcagggggctgacaaagaccggagagctcccggtgcggccgccggcggagcgaagactggaacccgtatgagcgccccccagcgcccctgagcgctcgccgccggtgcacggcgcaccccgcgggaggcagggatcagcaaagccgtgcgccccgaggcccgcccccgtctccgcacaaagaccgagctggaggatcttcagaagaagcctcccccatacctgcggaacctgtccagcgatgatgccaatgtcctggtgtggcacgctctcctcctacccgaccaacctccctaccacctgaaagccttcaacctgcgcatcagcttcccgccggagtatccgttcaagcctcccatgatcaaattcacaaccaagatctaccaccccaacgtggacgagaacggacagatttgcctgcccatcatcagcagtgagaactggaagccttgcaccaagacttgccaagtcctggaggccctcaatgtgctggtgaatagaccgaatatcagggagcccctgcggatggacctcgctgacctgctgacacagaatccggagctgttcagaaagaatgccgaagagttcaccctccgattcggagtggaccggccctcctaactcatgttctgaccctctgtgcactggatcctcggcatagcggacggacacacctcatggactgaggccagagccccctgtggcccattccccattcatttttcccttcttaggttgttagtcattagtttgtgtgtgtgtgtggtggagggaagggagctatgagtgtgtgtgttgtgtatggactcactcccaggttcacctggccacaggtgcacccttcccacaccctttacattccccagagccaagggagtttaagtttgcagttacaggccagttctccagctctccatcttagagagacaggtcaccttgcaggcctgcttgcaggaaatgaatccagcagccaactcgaatccccctagggctcaggcactgagggcctggggacagtggagcatatgggtgggagacagatggagggtaccctatttacaactgagtcagccaagccactgatgggaatatacagatttaggtgctaaaccatttattttccacggatgagtcacaatctgaagaatcaaacttccatcctgaaaatctatatgtttcaaaaccacttgccatcctgttagattgccagttcctgggaccaggcctcagactgtgaagtatatatcctccagcattcagtccagggggagccacggaaaccatgttcttgcttaagccattaaagtcagagatgaattctgg

SEQ ID NO: 144345 - DNA, 668 bp, Artificial Sequence
  derived and/or modified sequence
ggtttcaatttcgcttttcctgcctgaaacttgtgataacaactgggtgcatctccagtgcaggaaaagtccttggcatcttggtgccaggcattctgctactgctggtggtgggttatgaacacagatgaccaggatgaagtccttgccttggaataagcccatagcccatcccataatttgatgcctgtattactagagtcctgagaaacacggaatgctgattagaatttgggacaaagttccctgagtattctctggaggaaaagatgcggaggtggacctggaaggcctcctggagagctggaggatcttcagaagaagcctcccccatacctgcggaacctgtccagcgatgatgccaatgtcctggtgtggcacgctctcctcctacccgaccaacctccctaccacctgaaagccttcaacctgcgcatcagcttcccgccggagtatccgttcaagcctcccatgatcaaattcacaaccaagatctaccaccccaacgtggacgagaacggacagatttgcctgcccatcatcagcagtgagaactggaagccttgcaccaagacttgccaagtcctggaggccctcaatgtgctggtgaatagaccgaatatcagggagcccctgcggatggacctcgctgacctgctgacacagaa

SEQ ID NO: 144346 - protein, 617 aa, Artificial Sequence
  derived and/or modified sequence
MGPTLAVPTPYGCIGCKLPQPEYPPALIIFMFCAMVITIVVDLIGNSMVILAVTKNKKLRNSGNIFVVSLSVADMLVAIYPYPLMLHAMSIGGWDLSQLQCQMVGFITGLSVVGSIFNIVAIAINRYCYICHSLQYERIFSVRNTCIYLVITWIMTVLAVLPNMYIGTIEYDPRTYTCIFNYLNNPVFTVTIVCIHFVLPLLIVGFCYVRIWTKVLAARDPAGQNPDNQLAEVRNFLTMFVIFLLFAVCWCPINVLTVLVAVSPKEMAGKIPNWLYLAAYFIAYFNSCLNAVIYGLLNENFRREYWTIFHAMRHPIIFFSGLISDIREMQEARTLARARAHARDQAREQDRAHACPAVEETPMNVRNVPLPGDAAAGHPDRASGHPKPHSRSSSAYRKSASTHHKSVFSHSKAASGHLKPVSGHSKPASGHPKSATVYPKPASVHFKADSVHFKGDSVHFKPDSVHFKPASSNPKPITGHHVSAGSHSKSAFSAATSHPKPTTGHIKPATSHAEPTTADYPKPATTSHPKPTAADNPELSASHCPEIPAIAHPVSDDSDLPESASSPAAGPTKPAASQLESDTIADLPDPTVVTTSTNDYHDVVVIDVEDDPDEMAV

SEQ ID NO: 144347 - protein, 194 aa, Artificial Sequence
  derived and/or modified sequence
MVILAVTKNKKLRNSGNIFVVSLSVADMLVAIYPYPLMLHAMSIGGWDLSQLQCQMVGFITGLSVVGSIFNIVAIAINRYCYICHSLQYERIFSVRNTCIYLVITWIMTVLAVLPNMYIGTIEYDPRTYTCIFNYLNNPVFTVTIVCIHFVLPLLIVGFCYVRIWTKVLAARDPAGQNPDNQLAEPTSTAASTL

SEQ ID NO: 144348 - DNA, 1951 bp, Artificial Sequence
  derived and/or modified sequence
tgtttgctgtctggacctggctgctgatcctgagcctgctgggagatcttaacgatccccaggagcaacatggggcccaccctagcggttcccaccccctatggctgtattggctgtaagctaccccagccagaatacccaccggctctaatcatctttatgttctgcgcgatggttatcaccatcgttgtagacctaatcggcaactccatggtcattttggctgtgacgaagaacaagaagctccggaattctggcaacatcttcgtggtcagtctctctgtggccgatatgctggtggccatctacccataccctttgatgctgcatgccatgtccattgggggctgggatctgagccagttacagtgccagatggtcgggttcatcacagggctgagtgtggtcggctccatcttcaacatcgtggcaatcgctatcaaccgttactgctacatctgccacagcctccagtacgaacggatcttcagtgtgcgcaatacctgcatctacctggtcatcacctggatcatgaccgtcctggctgtcctgcccaacatgtacattggcaccatcgagtacgatcctcgcacctacacctgcatcttcaactatctgaacaaccctgtcttcactgttaccatcgtctgcatccacttcgtcctccctctcctcatcgtgggtttctgctacgtgaggatctggaccaaagtgctggcggcccgtgaccctgcagggcagaatcctgacaaccaacttgctgaggttcgcaattttctaaccatgtttgtgatcttcctcctctttgcagtgtgctggtgccctatcaacgtgctcactgtcttggtggctgtcagtccgaaggagatggcaggcaagatccccaactggctttatcttgcagcctacttcatagcctacttcaacagctgcctcaacgctgtgatctacgggctcctcaatgagaatttccgaagagaatactggaccatcttccatgctatgcggcaccctatcatattcttctctggcctcatcagtgatattcgtgagatgcaggaggcccgtaccctggcccgcgcccgtgcccatgctcgcgaccaagctcgtgaacaagaccgtgcccatgcctgtcctgctgtggaggaaaccccgatgaatgtccggaatgttccattacctggtgatgctgcagctggccaccccgaccgtgcctctggccaccctaagccccattccagatcctcctctgcctatcgcaaatctgcctctacccaccacaagtctgtctttagccactccaaggctgcctctggtcacctcaagcctgtctctggccactccaagcctgcctctggtcaccccaagtctgccactgtctaccctaagcctgcctctgtccatttcaaggctgactctgtccatttcaagggtgactctgtccatttcaagcctgactctgttcatttcaagcctgcttccagcaaccccaagcccatcactggccaccatgtctctgctggcagccactccaagtctgccttcagtgctgccaccagccaccctaaacccaccactggccacatcaagccagctaccagccatgctgagcccaccactgctgactatcccaagcctgccactaccagccaccctaagcccactgctgctgacaaccctgagctctctgcctcccattgccccgagatccctgccattgcccaccctgtgtctgacgacagtgacctccctgagtcggcctctagccctgccgctgggcccaccaagcctgctgccagccagctggagtctgacaccatcgctgaccttcctgaccctactgtagtcactaccagtaccaatgattaccatgatgtcgtggttattgatgttgaagatgatcctgatgaaatggctgtgtgaaaaatgctctcgtaggtggccaggcagt

SEQ ID NO: 144349 - DNA, 864 bp, Artificial Sequence
  derived and/or modified sequence
gctgtcatttgctctctgactctcagagagggaggcacgctttcctggagctcctggtgacagaacaggtgtttgctgtctggacctggctgctgatcctgagcctgctgggagatcttaacgatccccaggagcaacatggggcccaccctagcggttcccaccccctatggctgtattggctgtaagctaccccagccagaatacccaccggctctaatcatctttatgttctgcgcgatggttatcaccatcgttgtagacctaatcggcaactccatggtcattttggctgtgacgaagaacaagaagctccggaattctggcaacatcttcgtggtcagtctctctgtggccgatatgctggtggccatctacccataccctttgatgctgcatgccatgtccattgggggctgggatctgagccagttacagtgccagatggtcgggttcatcacagggctgagtgtggtcggctccatcttcaacatcgtggcaatcgctatcaaccgttactgctacatctgccacagcctccagtacgaacggatcttcagtgtgcgcaatacctgcatctacctggtcatcacctggatcatgaccgtcctggctgtcctgcccaacatgtacattggcaccatcgagtacgatcctcgcacctacacctgcatcttcaactatctgaacaaccctgtcttcactgttaccatcgtctgcatccacttcgtcctccctctcctcatcgtgggtttctgctacgtgaggatctggaccaaagtgctggcggcccgtgaccctgcagggcagaatcctgacaaccaacttgctgagcctacttcaacagctgcctcaacgctgtga

SEQ ID NO: 144350 - DNA, 585 bp, Artificial Sequence
  derived and/or modified sequence
atggttattctcgccgtgaccaaaaataaaaagctccgaaattctgggaacatcttcgtggtttccctgtccgtggctgatatgctggtggctatatatccgtatcccttgatgctgcacgcaatgagcattgggggctgggacctttctcaactgcagtgccagatggtcggctttatcacaggtctgtctgtggtaggttctatattcaatatcgtggctatcgccatcaaccggtactgctatatatgccactcacttcagtacgagaggatcttctcagtgcgcaatacatgcatttacctggtgatcacttggatcatgaccgtgctggcagttctgccaaatatgtatatcggcacgattgagtatgatcctaggacgtatacttgtatcttcaattacctgaacaaccccgtatttaccgtaaccattgtctgtatccatttcgtgctgcccctgcttatagtgggcttttgctatgtgcgaatctggacaaaagtcctagcagccagagatcctgccggccagaaccccgataaccagctagctgaaccaacctccactgctgcctcgaccctgtag

SEQ ID NO: 144351 - DNA, 1854 bp, Artificial Sequence
  derived and/or modified sequence
atgggtcccaccctggctgtacccacaccttacggttgtatcggatgcaaactcccgcagcctgagtatccacctgccctgattatcttcatgttttgtgccatggtcatcacaatcgttgtcgatttgattggaaattcaatggtgattctggcggttaccaaaaataagaaattgcgtaactcaggcaatatcttcgttgtgagcctgtcggtggcagatatgctggtggccatttatccctatcccctaatgttgcatgctatgtcaatcggcggatgggacctctctcagctgcagtgtcaaatggtgggtttcatcacaggcctatccgtggtggggagtatctttaacatcgtggccattgcaattaatcgttactgttatatttgccacagcttgcagtatgagcgcattttttccgtgcgcaatacatgtatctaccttgtgattacttggatcatgaccgtccttgctgtgctgcccaatatgtatatagggactatcgagtacgatccccgtacctacacgtgtatcttcaattatttgaacaaccccgttttcacggtgaccatagtgtgcatacacttcgtgctcccgctactgattgtgggattttgctacgtgcgaatctggactaaggttctggcagcccgtgacccagcgggtcagaaccccgacaatcaactcgctgaggtgcggaactttttgactatgttcgtaatttttttgttattcgctgtgtgttggtgcccaataaatgtcctgactgtgctggtggccgtcagtcccaaggagatggctggaaagatccccaattggctgtacctcgctgcgtatttcatcgcatacttcaatagctgcctgaatgctgtgatctacggactgctgaatgagaacttcaggcgggagtactggacaattttccatgccatgcgacacccaatcatattcttctccgggctgatctcagatatacgtgagatgcaagaagcaaggacgttagcaagggcacgcgcacacgctcgagatcaggctcgcgagcaagatcgagcccacgcctgtcctgccgtggaggaaactcccatgaatgtgaggaacgtgcccctgcctggtgatgcagcagctggccatcctgatcgtgcttccggccatccgaagcctcactcaaggtcatcgtcagcctatcgcaagtccgccagcacacaccataaaagtgtgttctcgcacagcaaggctgctagcgggcacctgaaacctgtatccggccattccaagcccgcgtctggccaccctaaaagtgccaccgtttaccctaaaccggcttcagtccacttcaaggccgacagcgtccactttaaaggtgattcggtacattttaaacctgatagcgtgcactttaagccggcctcctccaaccctaaacccattacaggacatcatgtatctgccggcagtcacagtaaaagcgctttctctgccgccaccagccatccaaaaccgacgaccgggcacatcaagcccgctaccagccacgccgaacctacgacggcagattacccaaagcccgcaactacctcccaccctaagccaacggcagccgacaacccagaactgtctgcctcccattgcccggagatccctgccatcgctcaccccgtcagcgacgatagtgacttgccagaatctgccagctccccagcagctggcccaacgaaaccagccgcatcccagctggagtccgacacaatagcagatctaccggaccccaccgtggtgactacctctacgaacgattaccacgacgtggtcgtgatcgatgtggaagacgacccagacgaaatggcggtgtag

SEQ ID NO: 144352 - DNA, 585 bp, Artificial Sequence
  derived and/or modified sequence
atggtgatcctggccgtgaccaagaacaagaagctgagaaattctggcaacatctttgtggtgtccctgtctgtggccgacatgctggtggccatctacccctaccccctgatgctgcacgccatgagcatcggcggctgggacctgagccagctgcagtgccagatggtgggcttcatcaccggcctgtctgtggtgggcagcatcttcaacatcgtggccatcgccatcaaccgctactgctacatctgccacagcctgcagtatgagcgcatcttctctgtgaggaacacctgcatctacctggtgatcacctggatcatgacagtgctggccgtgctgcccaacatgtacatcggcaccatcgagtatgaccccaggacctacacctgcatcttcaactacctgaacaaccctgtgttcaccgtgaccatcgtgtgcatccactttgtgctgcccctgctgattgtgggcttctgctacgtgcgcatctggaccaaggtgctggccgcccgggaccctgctggccagaacccagacaaccagctggccgagcccaccagcacagctgccagcaccctgtag

SEQ ID NO: 144353 - DNA, 1854 bp, Artificial Sequence
  derived and/or modified sequence
atgggccccaccctggccgtgcccaccccctacggctgcatcggctgcaagctgccccagcctgagtaccccccagccctgatcatcttcatgttctgtgccatggtgatcaccatcgtggtggacctgattggcaacagcatggtgatcctggccgtgaccaagaacaagaagctgaggaacagcggcaacatctttgtggtgtccctgtctgtggccgacatgctggtggccatctacccctaccccctgatgctgcacgccatgagcattggaggctgggacctgagccagctgcagtgccagatggtgggcttcatcaccggcctgtctgtggtgggcagcatcttcaacatcgtggccatcgccatcaaccgctactgctacatctgccacagcctgcagtatgaaagaatcttctctgtgaggaacacctgcatctacctggtgatcacctggatcatgacagtgctggccgtgctgcccaacatgtacatcggcaccattgaatatgaccccaggacctacacctgcatcttcaactacctgaacaaccctgtgttcaccgtgaccatcgtgtgcatccactttgtgctgcccctgctgattgtgggcttctgctacgtgcgcatctggaccaaggtgctggccgcccgggaccctgctggccagaacccagacaaccagctggccgaggtgaggaacttcctgaccatgtttgtgatcttcctgctgtttgctgtgtgctggtgccccatcaacgtgctgactgtgctggtggccgtgagccccaaggagatggccggcaagatccccaactggctgtacctggccgcctacttcatcgcctacttcaacagctgcctgaatgctgtgatctacggcctgctgaatgaaaacttccggcgggagtactggaccatcttccacgccatgaggcaccccatcatcttcttcagcggcctcatcagtgacatccgggagatgcaggaggcccggaccctggcccgggcccgggcccacgcccgggaccaggcccgggagcaggaccgggcccacgcctgcccagctgtggaggagacccccatgaatgtgagaaatgtgcccctgcctggagatgctgctgctggccacccagaccgggccagcggccaccccaagccccacagccgcagcagcagcgcctacaggaagagcgccagcacccaccacaagagcgtcttcagccacagcaaggccgccagcggccacctgaagcctgtgtctggccacagcaagccagccagcggccaccccaagagcgccaccgtgtaccccaagccagcctctgtgcacttcaaggctgacagcgtgcacttcaagggggacagcgtgcacttcaagccagacagcgtgcacttcaagccagccagcagcaaccccaagcccatcaccggccaccacgtgtctgctggcagccacagcaagagcgccttctctgctgccaccagccaccccaagcccaccaccggccacatcaagccagccaccagccatgctgagcccaccacagctgactaccccaagccagccaccaccagccaccccaagcccacagctgctgacaaccctgagctgagcgccagccactgcccagagatcccagccatcgcccaccctgtgtctgatgacagcgacctgcctgagagcgccagcagccctgctgctggccccaccaagccagctgccagccagctggagagtgacaccatcgctgacctgcctgaccccaccgtggtgaccaccagcaccaatgactaccatgatgtggtggtgattgatgtggaggatgatcctgatgagatggctgtgtag

SEQ ID NO: 144354 - DNA, 585 bp, Artificial Sequence
  derived and/or modified sequence
atggtgatcctggccgtgaccaagaacaagaagctgcggaacagcggtaacatctttgtggtaagccttagcgtggctgatatgctcgtcgctatttacccctatccactgatgctgcatgcgatgagcatcggaggatgggatttatcgcaactgcagtgtcaaatggttggtttcatcactggcctgagcgtggtagggtcaatttttaatatcgtggctatcgccatcaatcgctattgttatatatgtcatagtcttcagtatgaaaggattttctcagtgaggaacacctgtatatatttagtaattacatggatcatgacggtgctcgcagtgctgcccaatatgtacattggaaccattgaatatgaccccagaacctatacttgtatctttaactacctgaacaacccggtgttcacagtgaccattgtctgtattcatttcgttcttccgctcctaatcgtcggattttgctacgtgaggatctggaccaaagttctggctgcacgcgaccccgcaggacagaatcccgacaatcaactggcagagccgacgagtactgccgcctccactttatag

SEQ ID NO: 144355 - DNA, 1854 bp, Artificial Sequence
  derived and/or modified sequence
atgggccccaccctggccgtgcccaccccctacggctgcatcggctgcaaactgcctcagcccgagtatcctcccgccctaattatcttcatgttctgcgccatggtgattaccatagttgtcgatctgataggcaatagcatggtcatactagcagtcaccaagaataagaagctcagaaactccggtaatatctttgtggtcagtctgagcgtcgccgatatgcttgtggcaatttacccatatccattgatgctgcatgccatgagcatcggcggatgggatctgtcccagctgcagtgccagatggttggctttatcacaggactctcggtggtgggcagcatctttaatattgtagcaatcgctattaaccgctactgctatatttgccattcattacagtacgagcggatcttttctgtgcggaacacttgcatttacctcgtcatcacttggattatgaccgtgctcgcggtgttgccgaatatgtacatcggtactattgagtacgacccccggacttatacttgtatcttcaactatctgaacaatcccgtgtttaccgtcacgattgtctgcattcatttcgtcctgcccttactgattgtgggattttgttatgtgcgaatctggacaaaggtgctggctgctcgcgaccccgcgggtcaaaatcctgacaaccagctggccgaggtgcgcaacttcctaacaatgttcgtgatctttctcctgtttgccgtctgttggtgtcctataaacgttctgacggttctcgtggcggtttcccccaaagaaatggcaggcaaaatccccaattggctgtatctagctgcctatttcatcgcctattttaactcttgcctgaatgccgtgatttatggcctgctgaacgaaaactttagacgggaatattggactattttccacgccatgcgtcacccaatcatttttttttccggattgatttccgacatcagagaaatgcaggaggctcggaccctggcacgggcccgtgctcacgcacgtgatcaggctcgggaacaggatcgggcacacgcctgtcctgccgttgaggagaccccaatgaatgtccgaaacgtccctctgccaggtgacgcagcagcaggacaccccgatagggctagcggccatcctaagccgcactcaaggtccagctcggcttaccgaaagagcgcttcaactcaccacaaatccgtattctctcattcaaaagctgcaagcggccacctgaagccagtatccggacactcgaaacccgccagtggacatccaaagtcagcgactgtttaccctaaaccggcatccgtccatttcaaggcggacagcgtacacttcaagggagattctgtgcactttaaacccgatagcgttcacttcaagccagcatctagtaatcctaaacctatcaccggccatcacgtaagcgccggctctcatagtaaatctgcattcagtgccgcaacctcacaccccaagccaactaccggccacatcaaacccgctacctcacatgccgagcccacaacagcggactaccccaagccggccactactagccaccccaaacctaccgcagccgataatcctgagctttctgccagtcactgccccgagatccctgcaattgcccatcccgttagcgacgattcagatttgcccgagtctgccagcagccccgcagctggacccaccaaacccgcagcatctcaacttgaaagcgacacaatcgcagaccttcctgaccccacagtggtgacgacaagcaccaacgattatcatgacgtcgtggtgatcgatgtggaggacgatcccgatgagatggccgtatag

SEQ ID NO: 144356 - DNA, 585 bp, Artificial Sequence
  derived and/or modified sequence
atggtcattcttgctgtcacaaaaaataagaaactgcggaattccggtaacatctttgtggtaagcctttcagtcgctgacatgttggtcgcaatttatccatatccattaatgctgcacgcgatgtccatcggcggttgggacttgtcccaactgcaatgtcaaatggtgggctttatcaccggactgagcgtggttgggtcaatttttaatatcgtggccatcgcgatcaatagatattgttacatctgccattcattgcagtacgagcgcattttctctgtgagaaacacatgcatctacttggttatcacttggatcatgaccgttttagccgtattaccgaacatgtatatcggaactatcgaatacgaccccagaacctacacttgtatctttaattacttgaacaaccctgtgttcacagtgaccattgtgtgtattcattttgttctgcccctgttgatcgtcgggttttgctatgtgcggatttggactaaagtgttggctgctcgggatcccgcagggcagaaccccgacaaccaactggccgagccaacgagcacagccgcttcaacactgtag

SEQ ID NO: 144357 - DNA, 1854 bp, Artificial Sequence
  derived and/or modified sequence
atgggacctacactggctgttccgacaccctacgggtgcattggctgcaagctgcctcagccagagtacccacccgctttgatcatcttcatgttctgcgccatggtgattacaatcgtggtcgatctcattggcaactcaatggtgatccttgccgttacgaaaaacaagaaattaaggaacagcggtaacatctttgtcgtgtctctcagcgtggccgatatgctggttgcaatttacccctaccctctgatgctgcatgcaatgtccattggcggatgggacctcagtcagctgcagtgtcaaatggttggattcatcactgggctttccgtcgtgggaagcattttcaatattgtagctatcgcaatcaacaggtactgctatatctgccacagtctacagtacgaaaggatcttttctgtgaggaacacctgcatctacttagtgataacatggatcatgacagtcctcgccgtgttacctaacatgtatataggaacaatcgaatatgatccgaggacctatacctgcatcttcaactaccttaataatcctgtcttcacagttactatcgtttgtattcatttcgtcttacccttgctgattgtcggcttctgttacgtgcgcatctggaccaaagtactggccgctcgtgatcctgcaggacaaaaccctgacaaccagttagccgaggttcggaacttcttaactatgtttgtgatttttctgctattcgcggtgtgctggtgtcccatcaatgtcctgaccgtcctcgttgccgtgtctcctaaggaaatggccggaaaaatccctaactggttatacttagccgcttacttcatcgcctacttcaacagttgtttgaatgccgtcatctacggtctccttaatgaaaactttcgacgcgagtactggactattttccacgctatgcggcaccccattatcttttttagtgggcttatctccgatattcgcgagatgcaggaggccagaacacttgctagggctagggctcacgcacgcgatcaggccagggaacaggacagggcacatgcctgtcccgcagttgaggaaacaccaatgaacgttaggaatgtccccctcccaggcgacgccgctgcaggccacccagaccgcgcatccggacatcccaaaccacatagtaggagcagctcagcatataggaagtccgcctcgacacaccacaaaagtgtgttctcccactcaaaggctgcctcggggcatctaaaaccagtgtccggacatagtaaacctgcaagtggccaccctaagtctgccaccgtgtaccctaaaccagcctctgtccattttaaggcggactccgttcattttaagggggactccgtgcattttaaacctgattcggtccattttaagccggctagttcaaaccccaagccaatcacagggcaccacgtatctgccggatctcatagtaagagcgcattttccgctgccaccagccacccaaagcccactaccggccacatcaagcccgcaactagtcacgctgagccaacaaccgcagattatccgaaacctgctaccaccagccacccaaaaccaactgcggctgacaacccagagctcagtgcttcccactgccccgaaattccagccatcgcccaccccgtttcagacgactccgacctccccgagtccgcgtcatcacctgcagctggacccacaaaacccgcagccagccaactggagagcgatactatcgcagacctgcccgatccaacagttgtgaccacatcaactaatgactaccacgacgtagtggttattgatgtagaggacgatcctgacgagatggctgtgtag

SEQ ID NO: 144358 - DNA, 585 bp, Artificial Sequence
  derived and/or modified sequence
atggtgatcctggccgtgaccaagaacaagaagctgagaaacagcggcaacatcttcgtggtgagcctgagcgtggccgacatgctggtggccatctacccctaccccctgatgctgcacgccatgagcatcggcggctgggacctgagccagctgcagtgccagatggtgggcttcatcaccggcctgagcgtggtgggcagcatcttcaacatcgtggccatcgccatcaacagatactgctacatctgccacagcctgcagtacgagagaatcttcagcgtgagaaacacctgcatctacctggtgatcacctggatcatgaccgtgctggccgtgctgcccaacatgtacatcggcaccatcgagtacgaccccagaacctacacctgcatcttcaactacctgaacaaccccgtgttcaccgtgaccatcgtgtgcatccacttcgtgctgcccctgctgatcgtgggcttctgctacgtgagaatctggaccaaggtgctggccgccagagaccccgccggccagaaccccgacaaccagctggccgagcccaccagcaccgccgccagcaccctgtag

SEQ ID NO: 144359 - DNA, 1854 bp, Artificial Sequence
  derived and/or modified sequence
atgggccccaccctggccgtgcccaccccctacggctgcatcggctgcaagctgccccagcccgagtacccccccgccctgatcatcttcatgttctgcgccatggtgatcaccatcgtggtggacctgatcggcaacagcatggtgatcctggccgtgaccaagaacaagaagctgagaaacagcggcaacatcttcgtggtgagcctgagcgtggccgacatgctggtggccatctacccctaccccctgatgctgcacgccatgagcatcggcggctgggacctgagccagctgcagtgccagatggtgggcttcatcaccggcctgagcgtggtgggcagcatcttcaacatcgtggccatcgccatcaacagatactgctacatctgccacagcctgcagtacgagagaatcttcagcgtgagaaacacctgcatctacctggtgatcacctggatcatgaccgtgctggccgtgctgcccaacatgtacatcggcaccatcgagtacgaccccagaacctacacctgcatcttcaactacctgaacaaccccgtgttcaccgtgaccatcgtgtgcatccacttcgtgctgcccctgctgatcgtgggcttctgctacgtgagaatctggaccaaggtgctggccgccagagaccccgccggccagaaccccgacaaccagctggccgaggtgagaaacttcctgaccatgttcgtgatcttcctgctgttcgccgtgtgctggtgccccatcaacgtgctgaccgtgctggtggccgtgagccccaaggagatggccggcaagatccccaactggctgtacctggccgcctacttcatcgcctacttcaacagctgcctgaacgccgtgatctacggcctgctgaacgagaacttcagaagagagtactggaccatcttccacgccatgagacaccccatcatcttcttcagcggcctgatcagcgacatcagagagatgcaggaggccagaaccctggccagagccagagcccacgccagagaccaggccagagagcaggacagagcccacgcctgccccgccgtggaggagacccccatgaacgtgagaaacgtgcccctgcccggcgacgccgccgccggccaccccgacagagccagcggccaccccaagccccacagcagaagcagcagcgcctacagaaagagcgccagcacccaccacaagagcgtgttcagccacagcaaggccgccagcggccacctgaagcccgtgagcggccacagcaagcccgccagcggccaccccaagagcgccaccgtgtaccccaagcccgccagcgtgcacttcaaggccgacagcgtgcacttcaagggcgacagcgtgcacttcaagcccgacagcgtgcacttcaagcccgccagcagcaaccccaagcccatcaccggccaccacgtgagcgccggcagccacagcaagagcgccttcagcgccgccaccagccaccccaagcccaccaccggccacatcaagcccgccaccagccacgccgagcccaccaccgccgactaccccaagcccgccaccaccagccaccccaagcccaccgccgccgacaaccccgagctgagcgccagccactgccccgagatccccgccatcgcccaccccgtgagcgacgacagcgacctgcccgagagcgccagcagccccgccgccggccccaccaagcccgccgccagccagctggagagcgacaccatcgccgacctgcccgaccccaccgtggtgaccaccagcaccaacgactaccacgacgtggtggtgatcgacgtggaggacgaccccgacgagatggccgtgtag

SEQ ID NO: 144360 - protein, 1052 aa, Artificial Sequence
  derived and/or modified sequence
MAGMDSGNLKTARLWRDAALRARKLRSNLRQLTLTAAGACPGAGADALESPASPQLVLPANLGDIEALNLGNNGLEEVPEGLGSALGSLRVLVLRRNRFARLPPAVAELGHHLTELDVSHNRLTALGAEVVSALRELRKLNLSHNQLPALPAQLGALAHLEELDVSFNRLAHLPDSLSCLSRLRTLDVDHNQLTAFPRQLLQLVALEELDVSSNRLRGLPEDISALRALKILWLSGAELGTLPAGFCELASLESLMLDNNGLQALPAQFSCLQRLKMLNLSSNLFEEFPAALLPLAGLEELYLSRNQLTSVPSLISGLGRLLTLWLDNNRIRYLPDSIVELTGLEELVLQGNQIAVLPDHFGQLSRVGLWKIKDNPLIQPPYEVCMKGIPYIAAYQKELAHSQPAVQPRLKLLLMGHKAAGKTLLRHCLTEERVEGCPGGGDKEKCYPPSPPPVSKGIEVTSWTADASRGLRFIVYDLAGDESYEVIQPFFLSPGALYVLVVNLATYEPRHFPTTVGSFLHRVGARVPHAVVCIVGTHADLCGERELEEKCLDIHRQIALQEKHDAEGLSRLAKVVDEALARDFELRSASPHAAYYGVSDKNLRRRKAHFQYLLNHRLQILSPVLPVSCRDPRHLRRLRDKLLSVAEHREIFPNLHRVLPRSWQVLEELHFQPPQAQRLWLSWWDSARLGLQAGLTEDRLQSALSYLHESGKLLYFEDSPALKEHVFHNLTRLIDILNVFFQRDPSLLLHKLLLGTSGEGKAEGESSPPMARSTPSQELLRATQLHQYVEGFLLHGLLPAHVIRLLLKPHVQAQQDLQLLLELLEKMGLCYCLNKPKGKPLNGSTAWYKFPCYVQNEVPHAEAWINGTNLAGQSFVAEQLQIEYSFPFTFPLGLFARYSVQINSHVVHRSDGKFQIFAYRGKVPVVVSYRPARGVLQPDTLSIASHASLPNIWTAWQAITPLVEELNVLLQEWPGLHYTVHILCSKCLKRGSPNPHAFPGELLSQPRPEGVAEIICPKNGSERVNVALVYPPTPTVISPCSKKNVGEKHRNQ

SEQ ID NO: 144361 - DNA, 3159 bp, Artificial Sequence
  derived and/or modified sequence
atggccggcatggacagcggcaacctgaagaccgccagactgtggagagacgccgccctgagagccagaaagctgagaagcaacctgagacagctgaccctgaccgccgccggcgcctgccccggcgccggcgccgacgccctggagagccccgccagcccccagctggtgctgcccgccaacctgggcgacatcgaggccctgaacctgggcaacaacggcctggaggaggtgcccgagggcctgggcagcgccctgggcagcctgagagtgctggtgctgagaagaaacagattcgccagactgccccccgccgtggccgagctgggccaccacctgaccgagctggacgtgagccacaacagactgaccgccctgggcgccgaggtggtgagcgccctgagagagctgagaaagctgaacctgagccacaaccagctgcccgccctgcccgcccagctgggcgccctggcccacctggaggagctggacgtgagcttcaacagactggcccacctgcccgacagcctgagctgcctgagcagactgagaaccctggacgtggaccacaaccagctgaccgccttccccagacagctgctgcagctggtggccctggaggagctggacgtgagcagcaacagactgagaggcctgcccgaggacatcagcgccctgagagccctgaagatcctgtggctgagcggcgccgagctgggcaccctgcccgccggcttctgcgagctggccagcctggagagcctgatgctggacaacaacggcctgcaggccctgcccgcccagttcagctgcctgcagagactgaagatgctgaacctgagcagcaacctgttcgaggagttccccgccgccctgctgcccctggccggcctggaggagctgtacctgagcagaaaccagctgaccagcgtgcccagcctgatcagcggcctgggcagactgctgaccctgtggctggacaacaacagaatcagatacctgcccgacagcatcgtggagctgaccggcctggaggagctggtgctgcagggcaaccagatcgccgtgctgcccgaccacttcggccagctgagcagagtgggcctgtggaagatcaaggacaaccccctgatccagcccccctacgaggtgtgcatgaagggcatcccctacatcgccgcctaccagaaggagctggcccacagccagcccgccgtgcagcccagactgaagctgctgctgatgggccacaaggccgccggcaagaccctgctgagacactgcctgaccgaggagagagtggagggctgccccggcggcggcgacaaggagaagtgctacccccccagccccccccccgtgagcaagggcatcgaggtgaccagctggaccgccgacgccagcagaggcctgagattcatcgtgtacgacctggccggcgacgagagctacgaggtgatccagcccttcttcctgagccccggcgccctgtacgtgctggtggtgaacctggccacctacgagcccagacacttccccaccaccgtgggcagcttcctgcacagagtgggcgccagagtgccccacgccgtggtgtgcatcgtgggcacccacgccgacctgtgcggcgagagagagctggaggagaagtgcctggacatccacagacagatcgccctgcaggagaagcacgacgccgagggcctgagcagactggccaaggtggtggacgaggccctggccagagacttcgagctgagaagcgccagcccccacgccgcctactacggcgtgagcgacaagaacctgagaagaagaaaggcccacttccagtacctgctgaaccacagactgcagatcctgagccccgtgctgcccgtgagctgcagagaccccagacacctgagaagactgagagacaagctgctgagcgtggccgagcacagagagatcttccccaacctgcacagagtgctgcccagaagctggcaggtgctggaggagctgcacttccagcccccccaggcccagagactgtggctgagctggtgggacagcgccagactgggcctgcaggccggcctgaccgaggacagactgcagagcgccctgagctacctgcacgagagcggcaagctgctgtacttcgaggacagccccgccctgaaggagcacgtgttccacaacctgaccagactgatcgacatcctgaacgtgttcttccagagagaccccagcctgctgctgcacaagctgctgctgggcaccagcggcgagggcaaggccgagggcgagagcagcccccccatggccagaagcacccccagccaggagctgctgagagccacccagctgcaccagtacgtggagggcttcctgctgcacggcctgctgcccgcccacgtgatcagactgctgctgaagccccacgtgcaggcccagcaggacctgcagctgctgctggagctgctggagaagatgggcctgtgctactgcctgaacaagcccaagggcaagcccctgaacggcagcaccgcctggtacaagttcccctgctacgtgcagaacgaggtgccccacgccgaggcctggatcaacggcaccaacctggccggccagagcttcgtggccgagcagctgcagatcgagtacagcttccccttcaccttccccctgggcctgttcgccagatacagcgtgcagatcaacagccacgtggtgcacagaagcgacggcaagttccagatcttcgcctacagaggcaaggtgcccgtggtggtgagctacagacccgccagaggcgtgctgcagcccgacaccctgagcatcgccagccacgccagcctgcccaacatctggaccgcctggcaggccatcacccccctggtggaggagctgaacgtgctgctgcaggagtggcccggcctgcactacaccgtgcacatcctgtgcagcaagtgcctgaagagaggcagccccaacccccacgccttccccggcgagctgctgagccagcccagacccgagggcgtggccgagatcatctgccccaagaacggcagcgagagagtgaacgtggccctggtgtacccccccacccccaccgtgatcagcccctgcagcaagaagaacgtgggcgagaagcacagaaaccagtag

SEQ ID NO: 144362 - DNA, 3159 bp, Artificial Sequence
  derived and/or modified sequence
atggcaggaatggactctggcaatctaaagaccgcccggctgtggcgggatgccgctcttcgggctcgcaagctgcggagcaatctccgccaactgacgttgacagcagccggagcttgtcccggggccggagccgatgcgctggaatccccagcttctccacagcttgtacttccagccaatttaggagacatcgaggccctgaacctgggaaacaatgggctggaggaggtgcccgaaggcctggggtccgctctagggagcttaagggtcctggtgctcagacgcaatcgcttcgcgaggctcccccccgccgtagcagagctcgggcaccacctgacagagctagatgtgtctcacaacaggctgaccgccctgggtgccgaggtagtctctgctctgagagagttgcgtaaactcaatctcagccataatcaactgccagccctccctgcccagctaggggctctcgcccatcttgaggagctggatgtcagctttaaccggttggcacacttgccagatagcctctcttgcctctctcgtctcagaactctagacgtggaccataaccagctgactgctttcccccgccagttgttacagctcgtggcactggaagagctggacgtatcttctaatagactgcgggggcttccagaagatatctctgcgctgcgtgcacttaaaatcctatggctgagcggagccgagctgggcacactgccagctgggttctgcgagctcgccagccttgagtcactgatgctggacaataatgggcttcaggcactgccagctcagttctcttgcctgcagcggttgaaaatgttgaatctcagttctaacctgttcgaggaatttcctgctgcactactcccactggccggcctggaagaactgtacctaagtagaaaccagctgacttccgtcccctctctgattagtggcctcggcaggctgctgaccctgtggctagacaacaacaggattagatatcttcccgattccattgtggaactgacgggtctggaagagctggtcctccagggcaatcagatcgctgtcctccccgaccatttcgggcagctaagccgggtagggctgtggaagatcaaagacaatcctctgattcagcccccctatgaggtttgtatgaagggcatcccatacatcgctgcctaccagaaagagttggcgcacagccagcctgcagtgcaacctagactgaaattgctcctcatgggacataaggcagctgggaaaactctactgagacattgtctgaccgaggagagagtagaaggatgccctggaggaggggataaagagaaatgttatcccccttcaccaccccccgtttcaaagggaattgaggtgacctcgtggacagcagacgcaagcagaggtctgcgcttcattgtgtacgatctggccggtgacgagagctatgaagtaattcagcctttcttcctctccccaggagcattgtatgtgttagtcgtgaatttggcgacgtacgagccaaggcatttcccaacgacagtcggctccttcttacaccgagtgggggcccgcgtccctcatgctgtggtgtgcattgtaggcacccatgctgatttatgcggggagcgggaactagaagagaagtgcctcgacatccacaggcagatagctttgcaggaaaaacacgacgcagaaggcctctcacggctagccaaggtagttgatgaagccctggcccgcgactttgagctgcgctccgcttcgccccatgcagcctattacggagtgtccgataagaatcttcgcagacgaaaggcccattttcaatacctgctcaatcataggctacagatcctgtcaccagtcctgcccgtgagctgccgcgatcctcgacacttgcgacggcttagggacaaactgttaagcgtggcagagcatagagagattttcccaaatctccatcgcgtattgccacgatcctggcaggtgctggaagagttacattttcagcccccccaggcacagagattatggctgagctggtgggacagcgcaaggcttggcctgcaagctggactgaccgaggatcgactgcagagtgcccttagttatttgcatgaaagtggaaaactgctctacttcgaagattctccagccctgaaagagcacgtattccataatctcacccgcttgatcgatatcttaaatgtttttttccaacgtgatccgagccttctcctgcataagttgctcttgggcacaagcggggaaggcaaggccgagggcgaaagctccccaccaatggctcgctccaccccatcgcaagagctactgcgagcgacgcagctgcatcaatacgtcgagggcttcctgttgcacggactcctaccggcgcacgtaattcgactgctgctgaaacctcacgtgcaggctcaacaggatctgcagcttttgctcgaactcctggagaaaatgggactgtgctactgcctcaataaacccaaggggaagccgctaaatggctctacagcctggtacaagttcccctgctatgtacaaaatgaggtgccgcatgcagaggcatggattaacggcacgaacctggccggccagagctttgtcgccgaacaactccaaatcgagtactcattcccattcacctttcctctgggattgtttgccagatattccgtgcagatcaactcccatgtcgtccaccggagtgacgggaaatttcagatattcgcttatagggggaaggtgcctgtggtagtgagctaccggccagctagaggcgtacttcagcccgacacactctccatcgcaagccacgcaagtctacccaacatctggactgcttggcaggccatcaccccattagtagaggagcttaatgtgcttcttcaagaatggccagggctgcattacaccgtgcacatcttatgcagcaaatgtctgaagagaggttcccccaacccgcacgccttccccggcgagctgctgtcacagccccgccccgagggcgtggccgagattatctgtccaaaaaatgggtcagagcgagtgaatgtcgcacttgtgtatccaccaacccccactgtgatctctccctgttccaagaaaaacgtgggtgaaaagcaccggaaccagtag

SEQ ID NO: 144363 - DNA, 3159 bp, Artificial Sequence
  derived and/or modified sequence
atggccggcatggacagcggcaacctgaagacagcccggctgtggagagatgctgccctgcgggccaggaagctgcggagcaacctgcggcagctgaccctgacagctgctggggcctgccctggagctggagcagatgccctggagagccctgccagcccccagctggtgctgcctgccaacctgggggacatcgaggccctgaacctgggcaacaacggcctggaggaggtgcctgagggcctgggcagcgccctgggcagcctgcgggtgctggtgctgcggaggaacagatttgcccggctgcccccagctgtggccgagctgggccaccacctgacagagctggatgtgagccacaaccggctgacagccctgggcgctgaggtggtgtctgccctgcgggagctgaggaagctgaacctgagccacaaccagctgcctgccctgcctgcccagctgggcgccctggcccacctggaggagctggatgtgtccttcaaccggctggcccacctgcctgacagcctgagctgcctgagccggctgcggaccctggatgtggaccacaaccagctgacagccttcccccggcagctgctgcagctggtggccctggaggagctggatgtgagcagcaaccggctgcggggcctgcctgaggacatcagcgccctgcgggccctgaagatcctgtggctgtctggagctgagctgggcaccctgcctgctggcttctgtgagctggccagcctggagagcctgatgctggacaacaacggcctgcaggccctgcctgcccagttcagctgcctgcagaggctgaagatgctgaacctgagcagcaacctgtttgaggagttccctgctgccctgctgcccctggccggcctggaggagctgtacctgagcaggaaccagctgacctctgtgcccagcctcatcagcggcctgggccgcctgctgaccctgtggctggacaacaaccgcatccgctacctgcctgacagcatcgtggagctgaccggcctggaggagctggtgctgcagggcaaccagattgctgtgctgcctgaccacttcggccagctgagccgggtgggcctgtggaagatcaaggacaaccccctcatccagcccccctatgaggtgtgcatgaagggcatcccctacatcgccgcctaccagaaggagctggcccacagccagcctgctgtgcagccccggctgaagctgctgctgatgggccacaaggccgccggcaagaccctgctgcggcactgcctgacagaggagcgggtggagggctgccctgggggcggggacaaggagaagtgctacccacccagccccccacctgtgtccaagggcatcgaggtgacctcctggacagcagatgccagccggggcctgcgcttcatcgtgtatgacctggccggagatgagagctatgaggtgatccagcccttcttcctgagccctggggccctgtatgtgctggtggtgaacctggccacctatgagcccaggcacttccccaccaccgtgggcagcttcctgcaccgggtgggcgcccgggtgccccatgctgtggtgtgcatcgtgggcacccatgctgacctgtgtggggagcgggagctggaggagaagtgcctggacatccaccggcagatcgccctgcaggagaagcatgatgctgagggcctgagccggctggccaaggtggtggatgaggccctggcccgggactttgagctgcggagcgccagcccccatgctgcctactacggcgtgtctgacaagaacctgcggcggaggaaggcccacttccagtacctgctgaaccaccggctgcagatcctgagccctgtgctgcctgtgtcctgccgggaccccaggcacctgcggcggctgcgggacaagctgctgtctgtggccgagcaccgggagatcttccccaacctgcaccgggtgctgcccaggtcctggcaggtgctggaggagctgcacttccagcccccccaggcccagaggctgtggctgtcctggtgggacagcgcccggctgggcctgcaggccggcctgacagaagatcggctgcagagcgccctgagctacctgcacgagagcggcaagctgctgtactttgaggacagccctgccctgaaggagcacgtgttccacaacctgacccggctgattgacatcctgaatgtgttcttccagagggaccccagcctgctgctgcacaagctgctgctgggcaccagcggggagggcaaggccgagggggagagcagcccccccatggcccggagcacccccagccaggagctgctgcgggccacccagctgcaccagtatgtggagggcttcctgctgcacggcctgctgcctgcccacgtgatccggctgctgctgaagccccacgtgcaggcccagcaggacctgcagctgctgctggagctgctggagaagatgggcctgtgctactgcctgaacaagcccaagggcaagcccctgaatggcagcacagcctggtacaagttcccctgctacgtgcagaatgaggtgccccatgctgaggcctggatcaatggcaccaacctggccggccagagctttgtggccgagcagctgcagatcgagtacagcttccccttcaccttccccctgggcctgtttgcccgctacagcgtgcagatcaacagccacgtggtgcacagaagtgatggcaagttccagatctttgcctaccggggcaaggtgcctgtggtggtgtcctacagacctgcccggggcgtgctgcagcctgacaccctgagcatcgccagccacgccagcctgcccaacatctggacagcctggcaggccatcacccccctggtggaggagctgaatgtgctgctgcaggagtggccaggcctgcactacacagtgcacatcctgtgcagcaagtgcctgaagaggggcagccccaacccccacgccttccctggagagctgctgagccagcccaggcctgagggcgtggccgagatcatctgccccaagaatggaagtgagcgggtgaatgtggccctggtgtacccacccacccccaccgtcatcagcccctgcagcaagaagaatgtgggggagaagcacaggaaccagtag

SEQ ID NO: 144364 - DNA, 6414 bp, Artificial Sequence
  derived and/or modified sequence
ccggcgggcggcgctgccgcttcccaatcgcgccctcccagcgccggggacgcggcgcccgcgctcccgcccgagcccggggaaacggagacaaggaggcgccgccgccccctccccgcggctgcgccccagccctgcgcccgcagcatgcccgccgccgggccgagcgccgccctcccccaggagctcgaggaggcgacgccgctgccggccgcgggaccgcggctgcgagggtagcggggccggagccgggccccccgaggcgccgcgcggcgggcggagagggaggaggagcaggcatcctccgcggcgcgcgggcggcggccctgctgcccggcgcgcccatggcccggccgcagggagaatgcaagctgctctccacgcgctcggcgtcccccggagccgctcgcgtcgccgccgccccctagccgccagcgctcggccgctggctgcgctaggacccgcggccgccggccgccgagcgcgggagggcaggcaggggcaggagccggagggcccggggcgcggcgcggcatgtagctgcgggctcccgcgtccgcgtgaggctgtcggcccggggccccgccatggctgggatggacagtggcaacctgaagaccgcgaggctgtggcgggacgccgccctgcgtgccaggaagctgcggagcaacctgcgccagctcacgcttaccgccgccggggcctgccccggggccggggccgacgcgctcgagtcccccgcctccccccagctcgtgctgccggccaacctcggggacattgaggcactgaacctggggaacaacggcctggaggaggtacccgaggggctggggtcggcgctgggcagcctgcgcgtcctggtcctgcgcaggaaccgcttcgcccggctgcccccggcggtggccgagctcggccaccacctcaccgagctggacgtgagccacaaccggctgaccgccctgggcgcggaggtggtgagtgctctgagggagctgcggaagctcaacctcagccacaaccagctgcccgccctgcccgcccagctgggcgctctcgctcacctggaggagctggatgtcagctttaaccggctggcgcacctgcctgactccctctcctgcctctcccgcctgcgcaccctggacgtggatcacaaccagctcactgccttcccccggcagctgctgcagctggtggccctggaggagctggacgtgtccagcaaccggctgcggggcctgcctgaggatatcagtgccctgcgtgccctcaagatcctctggctgagtggggccgagcttggcacgctgcccgccggcttctgcgagctggccagtttggagagcctcatgctagacaacaacgggctgcaggctctgcccgcccagttcagctgcctgcagcggctcaaaatgctcaacctctcctccaacctcttcgaggagttccctgccgcgctgctgcccctggctggtctggaggagctctaccttagtcgcaaccagctcacctcggtgccatcccttatctcgggcctgggccggcttctcaccttgtggctggataataaccgcatccgctacctgccggactccatcgtggagctgaccggcctggaggagctcgtgctgcaggggaaccagatcgcggtgctgcccgaccactttggccagctctcccgggtgggtttgtggaagatcaaagacaacccactgatccagcccccctacgaggtctgcatgaaggggatcccctacatcgcagcctaccagaaggaactggctcattcccagccggcggtgcagccccggctcaagctgctcctgatggggcataaggctgcaggaaagactttgctgcgccactgcctcaccgaggagagagtggagggatgcccaggaggaggggacaaggagaagtgctacccaccgtcacctccccctgtgagcaagggcatcgaggtgaccagctggacggccgatgcctcccggggcctgcggttcatcgtgtatgacttagctggggatgaaagttatgaggtgatccagcccttcttcctgtccccaggggccctatacgtgctggtggtcaacttggccacctatgagcctcgccactttcctaccaccgtgggctccttcttgcatcgggtcggggcgagagtgccccacgcggtggtgtgcatcgtgggcacccacgcagacctgtgcggagagcgtgagctggaggagaaatgtctggacattcaccgccagatcgccctgcaggagaagcacgacgcggagggactgagccgcttggccaaggtggtggacgaggcactggcccgggacttcgagctgcgctctgccagcccccacgcagcctactatggcgtttcggacaagaaccttcgacggcgcaaggcccattttcaatacctgctcaaccaccggctgcagatcctctcccccgtgttgcctgttagctgcagggacccgcgccacttacgacgccttcgggacaagttgctgtcagttgctgagcaccgagagatcttccccaacttacacagagtactgcctcgatcctggcaggtgctggaggaactgcatttccagccacctcaggcccagcgactgtggctaagctggtgggactcggcgcgcttgggcctgcaggcgggtctgaccgaggaccgactgcagagtgccctctcctacctgcatgagagcggcaagctactctactttgaggacagtccggctctcaaggagcacgtcttccacaacctcacccgcctcatcgacatcctcaatgtcttcttccagagggatccctctttgctgctgcataagctgctcctagggaccagtggagagggcaaggcggagggggaaagctccccgcccatggcgcggtccacccccagccaggaactgctccgggccacccagctccatcagtatgtggagggctttctgttgcatgggctcttgccagctcatgtcattcggttgctgcttaagcctcatgtccaggcccagcaggacttgcagctgttgctggagctgctggagaagatgggactctgttactgcctcaataaacccaagggcaagcctttgaatgggtccacagcttggtacaagttcccatgctatgtgcagaacgaggtgccccatgcagaagcctggattaatgggaccaacctagctgggcagtcttttgtggctgagcagttgcagattgaatatagctttccttttacttttccacttgggttgtttgcacgctacagtgtccagatcaacagccatgtggtgcacaggtcggatggtaaatttcagatctttgcctatagagggaaagttcctgtggttgtgagttacagacctgccaggggagtcctgcagccagacaccctgtccattgctagccatgcatcattaccaaatatatggaccgcatggcaagccataacccccttggtggaggaactgaatgtcctacttcaggaatggcctggactgcactacaccgtgcacattctctgttctaagtgccttaagagaggatcgcccaatccacatgcttttccaggggagttgctgagtcagcccagaccggaaggagtggcagagatcatttgccccaagaacggcagcgagcgagtaaatgttgccttggtttacccacccacgccgactgtgatcagcccctgttccaagaagaatgttggtgaaaagcacagaaaccagtgacgtttgtggctgtggaatttccatggagaaaagagagcatctgaacacctggaccatcttttgcacctggcagaccctctgcactcaccccagcgtgttctgtgaacttgagtgacaacgcgtgcttgcagggtgctttttggacgactggggaagaggtggggagggggtggtggggggaagcatggacgagaacatggagcaaatgttttacaacctgaacctcagaactgtgatcctccaaggagcgcgctacttgaagaaaagaaaaaaaaaaaaaaaaagtcgaatggcttctcagggattttgttttccgtgcacatataagccatagttacagtacaggtggcagtatttagagcactcagatttcagttctgttaaatgtgaaagagggatcgactgacgttcattgctgttccataactagtgtaaaatatgtatatgtttatctttatttttataatatgcaaatacatttaaatttatacagtttgaagcttctagcgttagttcacactgggtgcaatattctgcatgagaactgtgccaagatggggctgatttcttattttagtataagacttttttgttttttctttattctttaatcctcttcacattaaaaaaaaaatctctctgttagcccatggattaagtgttggttcatagagattgccaataatcagaaagaaccttaaatgtgcatttaagacagtgtcccttcccttcttttcaatgaaggtccctgcctatataaatcatctggcacgctggtgggaaatcctttgctcttccaacgtgttattagtgctgggcagagatggggcacactcaggggccaaagaggacaaaaagtccatgcaaaacttgagtcttttaatggcttaagataatcaggagtcagttctgaatcttacaaagtgctctgcttaataagtaccttacttagcagagcactttgcaaacatattacttattagcagagctctttgtagaccttccacatctggctgtcagatcttaaggttgtgaatttaggctccagttacattcactggagagcataatcccacacgggttatttataaatacagagcctctgattggacggtctcctgccaagaactagtaatacccttgttttaaaatcttcacaaggtaaaacttaaaaagccaaccaaacaaattgctctccattctacttttaattgggccaaacagcatatgctacagtagtaacatgtttttcggagagtgtaaaaaactctgtttacatttgcctcctccgtgggttgatcgaaaatgtataaaactgactgcttctcgccagcctcagacaagaagagtgagttgctggtactcgctactcttttacttcttttgtaaagtattgactcttggaaggctacagtatacaaagtctcaacatgttttttaaaagaaataaggagcaagcgactgccctgctagaaatcacaaaccgatttttgtagaatattttgtgccccaggcattaatttcactgactccagaacctgcagttcagagaatgatttcttatgatgataaaaatcgaatgggatcagacgatgtttgcatttttttaatacttgaataggacacctcaagtttgagatttcattttcttttagaacacagtcacaagattaatctggtgaatccttttgtcacagttctcgtgtgtgtgtgcgcgtctccgtgtgtgtgtgtgtgcatgtgtgtaaaactgaatggtcacatttaattgctttttggaccattgaatagttgggaagtaagaattttttaattggcatgagacggttcctcaactgttaaattaaccaactttgacctgtctttagaaaaaggcttatttgtatgattttgggctaactccccggggaccatattaaatgacaaaaatgctcctttgggtgacacaccctacaaagtatttgctgttacgaacataaacgcccacattcttaatatctaatatttttgaccagtgatgttttatgctgtcatctgaaccctagagaagcagtgtcagaggaaaccttggtgtcacatgtgtcttagcaaaagggttaccatgatcgagggtcatgtgaccaaaagatgctccagagaagcttgagaatttgtttcaagttgggaggagggttggagatacaaaaatcactctgctctacaggactcttcagctgtctatgcaagaaattccgttttctctttcagcacctggaaagacacagcagcccaccgaggcgataggtgattcactaagcacaagaggaatgttttctaagcaaggcgtcccttgcctctcaaacaaatgccctccaagtttgttagggtttctattcctgcaacttgtggtatcaaaaccacttcctggaattgtcaaagcactgccaaaataaatgtttttcccccttctaagaaaaaaaaaatgacagtgctcatatttgacacttgtgtattggactctcttttgaatgaataaaaaggaaaaggggtttggtgtaattcctgatggggtgcgtgttgtttttcatgccatggtttgtgaattttaattgtggtttcccatttcgttgttgtaactgggcagaaattaaaaaagaaaaatcaataaaaatacaaagaaatggttaaa

SEQ ID NO: 144365 - DNA, 3159 bp, Artificial Sequence
  derived and/or modified sequence
atggccggcatggacagcggcaacctgaagaccgcccggctgtggcgtgacgctgctctcagagcaaggaagctcagaagcaatttgagacagctgacgctgacagcagccggggcctgtccaggcgccggagccgatgccctcgagtcccctgcttctcctcaactcgtgcttcctgccaatctgggcgacatagaggctctcaatttaggtaacaatggtctggaggaagtgcccgagggacttgggtctgctttgggcagccttcgagtgctcgtgctccgcaggaaccgttttgctcggctgcccccagccgtagccgagctggggcatcacctcaccgagcttgatgttagtcacaatcggttaaccgccctaggggctgaagtggtgtccgccctccgggaactgcgcaaactcaacctgtctcataatcagcttcccgcacttcccgctcagcttggagccctggctcatttggaggagctagacgtgtcattcaatcgattggcgcatctgcccgattcgctgtcctgtctttcacgcctgcggacactggatgtggaccacaaccagttaacggcctttcctcgccagctgctgcagctggtcgcgctggaggagctagacgtatcatctaaccgcttgcggggcctgcccgaggatattagtgccctcagagcccttaaaatcttgtggctcagcggtgctgagctggggacactcccggcggggttctgtgaacttgcttcactggaatcgctcatgttggacaataatggtctccaggccctgcccgctcagttcagttgcctgcaacgcctgaaaatgctcaatttaagttccaacctgttcgaagagttccctgccgcactcttgcctctcgctggcctcgaggaactgtatttatcgcgcaatcagctgactagcgtgccttccctgatcagcggactcggccggctcctgaccctttggttagataataatcgcattcgctacctgcctgactccatagtggagttgacggggctcgaggagcttgtgctgcaggggaaccaaattgcggtactgcctgaccatttcgggcagctctcccgtgtagggttgtggaaaattaaggataatccactgattcaaccaccgtacgaggtctgtatgaagggcataccatatattgccgcctatcagaaggagctggctcactcacaacctgccgtccagccccgacttaaacttcttctgatgggtcataaagcagctgggaagacactactccgacattgtctgaccgaggagagagtagaagggtgtcccggagggggcgacaaggaaaaatgctacccacctagcccaccccctgtgagcaagggcattgaggtgacttcttggaccgcagatgcctctagggggctccgattcatagtgtacgacttggccggagatgagtcctacgaggtgatccagcccttcttccttagccctggtgccctgtacgtgctggtcgtgaacctagcgacctatgagcctcgccacttccccaccactgttggctcgttcctccatagggtgggagcacgcgttcctcacgcagtggtctgcattgtaggcacacacgcagacctttgcggtgagcgcgagcttgaggagaaatgcctcgatatacaccggcagatagcccttcaggagaagcatgacgccgagggactgtcgcgcctggccaaggtggtggatgaagcattagctagagacttcgagctacggtccgcttcacctcatgctgcatattacggcgttagcgataagaatctgcgccgtaggaaggcccactttcagtatctactgaaccaccggctgcaaatcctttcccccgtgctgcccgtgagctgccgagatccaagacatcttagaagacttcgcgacaaactgctgtctgttgcagagcacagagagatattccccaacctgcacagagtgctcccccggtcctggcaggtgctcgaagaactgcattttcaacctcctcaagcccagcgcctgtggctgtcctggtgggatagtgctaggctgggactgcaagccggactgaccgaggatcgtctgcagtcagcgctgtcataccttcatgagtccgggaagctgctatacttcgaagactcacccgcgttgaaagagcacgtgtttcacaatcttacacgattgatcgacatcttaaacgtctttttccagcgcgacccaagtctgctcctgcacaagttactcttggggaccagtggggagggcaaggccgagggagaatcctccccgcctatggctcggtctacgccatcgcaagagctgttgcgcgcgactcagctgcaccagtatgtggaaggatttctgctgcacgggctgttgcccgcccatgtgattagattactgttgaagccccatgtgcaggcgcagcaggatttgcagctgctcttggagttactcgagaaaatgggcctttgctactgtctcaacaagccaaagggcaaacctctgaacgggtcaaccgcgtggtataagttcccttgctatgtgcaaaacgaagtgccccacgccgaggcatggataaacggcaccaacctggctgggcagtcctttgtggcggagcagttgcagatcgaatatagctttccgtttacattcccactggggctgttcgcccggtactctgtgcagataaatagccacgtggtgcatcggtccgatggcaagttccagatcttcgcctacagaggaaaggtccctgtggtcgtgtcctaccgtccagctagaggcgtgttgcagcctgataccctgagcatagccagtcacgccagtttgccaaacatctggacggcatggcaggctataaccccacttgtggaagagctgaacgtgctgctgcaggagtggcccggactgcactacaccgtgcatatattatgctccaagtgcctgaaaagggggagtcccaacccacacgcttttcctggcgagctgttatcgcaaccccgccccgagggtgtggctgaaattatctgccctaagaacggatcagagagggtcaatgtggccctcgtgtacccacccacccctaccgtgatatcaccatgttctaagaaaaacgtaggtgaaaaacataggaatcagtag

SEQ ID NO: 144366 - DNA, 3159 bp, Artificial Sequence
  derived and/or modified sequence
atggcaggaatggattccgggaacctgaaaaccgccaggttgtggcgagatgcagcactccgtgcccgaaagttacgctcaaatctccgtcaacttactctgacagctgccggagcgtgtcccggtgccggtgcagatgccctcgagtcccccgcatctccccagttggtgctcccagcgaacctgggcgacatcgaagctttaaacctgggcaataacggtctggaagaggttcccgagggtttggggagcgccttgggctctctgcgggtccttgtactcagaaggaaccgcttcgcgagactgcctccagccgtggcggaacttggccaccatctcactgaattagacgtgagccataaccggcttaccgcgctcggggctgaggtagttagcgcactaagagagcttcgtaagctaaacctgagtcataaccagctgccggctctacctgcccagcttggcgcactggcacatctggaggaactggacgtctcattcaaccggctcgcccatctcccggactctctttcttgtctttcccgcctccgcacccttgacgtcgaccacaatcagctgaccgccttcccaagacagcttttgcagttagtggcactcgaggagctcgatgtttcttccaatcgtcttcggggattgcccgaagatatctccgctctccgagctctaaaaattttgtggctttctggggctgaattaggcaccctccctgctggcttctgtgagctcgcctcactggagagcctgatgctggataataacgggctgcaggccttacctgcccagttttcttgtctgcaaagactgaagatgctgaatttgagctctaatttgtttgaggagttccccgcagctctgctccccctggccggtctcgaagagctttacttatcaaggaatcagctgacctctgttccgagtctgatctctggcttagggcgtctgctaactttatggttggataacaatcgaattcgatacttgccagacagtatcgtcgagttaaccggacttgaagagctcgttttacagggaaaccagattgccgtccttcccgatcatttcggacagcttagcagagtgggcctgtggaagatcaaggataacccgctcatccaaccaccttatgaagtgtgtatgaaggggatcccttacatcgctgcctaccagaaagaattagctcactcgcaaccagctgtgcagcccaggctgaaactccttttgatggggcacaaggcagccggaaaaactcttttgcgccactgcctgacagaggaaagggtcgagggatgccctgggggtggagacaaagaaaaatgctacccccctagcccgccacccgtgagcaagggcatcgaagttacttcttggactgcggacgcttccagagggctgcgcttcattgtctacgatctggctggcgacgagagctatgaggtcattcagcctttttttttgtctcccggtgcactctatgtactagtggtgaatcttgcgacatatgaacccaggcattttcccacaacagtcgggagtttcttacacagagtgggagcaagggtacctcatgctgtggtctgcattgttgggactcacgccgacttgtgtggcgagcgggagctcgaagaaaaatgcctggatatccatcgtcagatcgcacttcaggaaaagcacgacgccgaaggtttgtctaggctggctaaagtggtggacgaggccctggctcgcgactttgaactaaggagtgcaagcccccacgccgcatattatggcgtttcggacaaaaatctgagaaggcgtaaggctcactttcagtacctattaaaccacagactgcaaattctaagccccgttctgcccgtttcgtgccgtgatccgagacacctgcggagacttcgagataagctgttaagcgttgcagaacacagggagatctttccaaacctgcatcgcgtgttgcccaggtcatggcaggtgctggaagagctccactttcaaccccctcaggcccagaggctgtggctgagctggtgggacagcgcgagactggggctacaggccggtctgactgaagataggctccaatcggctctcagttacctccacgagagcggaaaactcttatattttgaggactctcctgcactgaaggagcacgttttccacaacctgacacggctgattgatatccttaacgtcttctttcagagggacccgtccctcttgctccataaactcctgcttggcactagtggcgaaggtaaagctgagggagagtcttcccccccaatggctaggagcacccccagtcaggagctgttgcgcgcaactcaactgcaccaatacgtggagggattcctcctgcacggtctgctacccgcacacgtgatcaggctcttgctcaagcctcacgttcaggctcagcaggatctccagctgctgctggaattgctggagaagatgggactctgttattgtctgaataagcccaagggaaagcctcttaatggcagtacggcttggtacaaatttccctgttacgtccagaacgaggtgcctcatgcggaggcatggattaacgggacaaatctcgcagggcagagtttcgttgctgaacagcttcagattgaatatagttttccctttacttttccactgggactgtttgcgagatacagtgtacagatcaattcccacgtggtgcataggtcagatggaaagttccagatattcgcttaccgcggaaaggtgccagtggtggtgtcatatcggccagcccgaggcgtgctgcaaccagacactttgagcattgctagtcatgcgtcactcccgaatatttggaccgcctggcaggcaatcactccactcgtcgaagaactcaacgtcttactccaagagtggcccggactccactataccgtgcatatcctgtgcagtaagtgcctgaagaggggctcaccgaacccccacgcgttccccggagagctcttatcacaaccacgcccagaaggagtggccgagatcatctgccccaaaaatgggtccgagagagtgaacgtcgccctagtgtatccacctacacctactgttatttctccctgctcgaagaagaacgtgggtgagaaacaccgaaaccagtag

SEQ ID NO: 144367 - protein, 372 aa, Artificial Sequence
  derived and/or modified sequence
MSRRRFDCRSISGLLTTTPQIPIKMENFNNFYILTSKELGRGKFAVVRQCISKSTGQEYAAKFLKKRRRGQDCRAEILHEIAVLELAKSCPRVINLHEVYENTSEIILILEYAAGGEIFSLCLPELAEMVSENDVIRLIKQILEGVYYLHQNNIVHLDLKPQNILLSSIYPLGDIKIVDFGMSRKIGHACELREIMGTPEYLAPEILNYDPITTATDMWNIGIIAYMLLTHTSPFVGEDNQETYLNISQVNVDYSEETFSSVSQLATDFIQSLLVKNPEKRPTAEICLSHSWLQQWDFENLFHPEETSSSSQTQDHSVRSSEDKTSKSSCNGTCGDREDKENIPEDSSMVSKRFRFDDSLPNPHELVSDLLC

SEQ ID NO: 144368 - protein, 67 aa, Artificial Sequence
  derived and/or modified sequence
MSRRRFDCRSISGLLTTTPQIPIKMENFNNFYILTSKELGRGKFAVVRQCISKSTGQEYAAKFLKKR

SEQ ID NO: 144369 - DNA, 204 bp, Artificial Sequence
  derived and/or modified sequence
atgagcagaagaagattcgactgcagaagcatcagcggcctgctgaccaccaccccccagatccccatcaagatggagaacttcaacaacttctacatcctgaccagcaaggagctgggcagaggcaagttcgccgtggtgagacagtgcatcagcaagagcaccggccaggagtacgccgccaagttcctgaagaagagatag

SEQ ID NO: 144370 - DNA, 1119 bp, Artificial Sequence
  derived and/or modified sequence
atgagtcgaaggaggttcgattgccgcagcatctctgggttgttgacgaccactcctcaaattcccatcaagatggagaatttcaataacttttacatcctgacgtctaaagaactggggagggggaagtttgcagtggtgcgtcaatgcattagtaagagcacaggtcaagagtatgcagccaaattcttaaaaaaaagacgaaggggtcaagactgccgggccgaaatcctgcatgaaatagccgtgctggagctcgcgaagtcatgccccagagtcattaacctgcacgaagtgtatgaaaataccagcgaaattatccttatcctcgagtacgcggccggaggagaaatcttttctctgtgtctgcccgagctggcagagatggtaagcgagaacgatgtcatcagactaattaagcaaatcctcgagggagtgtactacctccatcagaacaatattgtgcatctcgatctaaagccccagaatattctgttgtccagtatctaccccctcggcgacataaagattgtggatttcgggatgtccagaaaaatcgggcacgcttgcgaattaagagagataatgggaactccagagtatctggccccagaaatactgaactacgatccaattacgacagccactgatatgtggaacatagggatcatagcctatatgctcttgacacacacttcaccgttcgtcggcgaagataaccaggagacgtaccttaatatcagtcaggtgaatgttgactatagcgaagagacgttcagctctgtgtcccagcttgccaccgatttcatacaaagcctgctagtcaaaaatcccgagaagagaccaaccgcagagatctgcctgtctcactcctggttacagcagtgggattttgagaacctctttcatccagaggaaacatcctcctcctctcaaacacaggaccactctgtccgaagcagcgaggacaaaacgtccaaaagcagttgtaatggcacttgtggtgacagggaggacaaagaaaatatccccgaagacagctctatggtgtcaaagagatttagattcgatgacagcctgcctaaccctcacgaattggtctcagacttgctatgctag

SEQ ID NO: 144371 - DNA, 1119 bp, Artificial Sequence
  derived and/or modified sequence
atgtcaagaaggcgctttgactgtcggtctatcagcggcctgctcacaacaactccacagatccctattaagatggagaactttaacaacttctatatcctgacttctaaagagttgggcagaggtaagtttgccgtggtacggcagtgcatctccaagtctacagggcaggagtacgccgctaagttccttaagaagaggcgcagaggacaggattgcagagccgagattctgcacgaaattgctgtactggaactggctaagtcttgcccacgggttattaacttacatgaagtctacgaaaacacttctgaaataatcctgatcctcgaatatgccgccggcggcgaaatattcagtctctgcctgccagaactcgctgagatggtatctgagaacgatgtaattaggctcatcaaacagatcctggagggtgtgtattacctgcatcagaataatatagtgcacctggatctgaagcctcagaatatactgctgtcaagcatctaccctcttggcgacatcaaaatcgtagactttggcatgagcaggaaaattggacatgcctgtgaactccgcgagattatgggcactccagagtatttggccccagagatcttaaattacgatcccattacgaccgctaccgacatgtggaatatcggcattatagcctatatgctcctcacccatacatctcctttcgtgggagaagacaaccaagaaacttacctgaacatttctcaggtaaacgtagactattccgaagagacatttagcagcgtgagtcaactggctaccgacttcattcagtcgttgcttgtgaagaatccagagaagcggcccacggccgaaatatgtctgtctcatagctggttacagcagtgggacttcgagaacctgttccaccctgaggaaacatcaagctcctcccagacccaggaccactcagttagatcatcagaggataaaacatcaaagagtagctgcaacggcacctgtggcgaccgcgaagataaagaaaacattccggaggactcaagcatggtttccaaacggttccggttcgacgatagtttgcctaatcctcacgaattggtttccgacctcctgtgttag

SEQ ID NO: 144372 - DNA, 204 bp, Artificial Sequence
  derived and/or modified sequence
atgagtcggcgtaggttcgactgtagatccatttcagggctgttaacaactaccccccaaatacccatcaagatggaaaatttcaacaatttctatatcctgacatccaaagagctgggaaggggtaaattcgctgtggtgaggcagtgtatttctaagagcactgggcaggaatacgccgccaaatttctgaagaagcgctag

SEQ ID NO: 144373 - DNA, 1119 bp, Artificial Sequence
  derived and/or modified sequence
atgagcagaagaagatttgactgccgcagcatcagcggcctgctgaccaccaccccccagatccccatcaagatggagaacttcaacaacttctacatcctgaccagcaaggagctgggccggggcaagtttgctgtggtgcggcagtgcatcagcaagagcacaggccaggagtatgctgccaagttcctgaagaagagaagaagaggccaggactgcagagctgagatcctgcatgaaattgctgtgctggagctggccaagagctgccccagggtcatcaacctgcacgaggtgtatgagaacaccagcgagatcatcctgatcctggagtatgctgctggaggagagatcttcagcctgtgcctgcctgagctggccgagatggtgtctgaaaatgatgtgatccgcctcatcaagcagatcctggagggcgtgtactacctgcaccagaacaacatcgtgcacctggacctgaagccccagaacatcctgctgagcagcatctaccccctgggggacatcaagatcgtggactttggcatgagcaggaagattggccacgcctgtgagctgcgggagatcatgggcaccccagagtacctggcccctgagatcctgaactatgaccccatcaccacagccacagacatgtggaacatcggcatcatcgcctacatgctgctgacccacaccagcccctttgtgggggaggacaaccaggagacctacctgaacatcagccaggtgaatgtggactacagcgaggagaccttcagctctgtgtcccagctggccacagacttcatccagagcctgctggtgaagaaccctgagaagaggcccacagctgagatctgcctgagccacagctggctgcagcagtgggactttgaaaatctcttccaccctgaggagaccagcagcagcagccagacccaggaccacagcgtgcgcagcagcgaggacaagaccagcaagagcagctgcaatggcacctgtggggaccgggaggacaaggagaacatccctgaggacagctccatggtgtccaagcgcttccgctttgatgacagcctgcccaacccccatgagctggtgtctgacctgctgtgctag

SEQ ID NO: 144374 - DNA, 204 bp, Artificial Sequence
  derived and/or modified sequence
atgagcagaagaagatttgactgccgcagcatcagcggcctgctgaccaccaccccccagatccccatcaagatggagaacttcaacaacttctacatcctgaccagcaaggagctgggccggggcaagtttgctgtggtgcggcagtgcatcagcaagagcacaggccaggagtatgctgccaagttcctgaagaagaggtag

SEQ ID NO: 144375 - DNA, 1119 bp, Artificial Sequence
  derived and/or modified sequence
atgagccggcggcggttcgactgccggagcatcagcggcctgctgactacgacaccacaaatacctattaagatggagaacttcaataacttctatatcctcactagcaaggagctgggcagaggaaagtttgccgtcgtccggcagtgtatcagcaaaagcacaggacaagagtacgccgccaaattcctgaaaaaaaggcggcgcgggcaggattgtagagctgaaattctgcacgaaatagcggttctggaacttgccaagtcttgtcccagggtcatcaacctccatgaagtgtacgagaacacaagcgaaataattctcatcctagaatacgctgccggaggcgaaatctttagcctttgcttaccagagctggcagaaatggtgtcagagaacgacgtgatccggttgatcaaacagatcctggagggagtgtactatctgcaccagaacaatattgtgcacctagacttgaaaccccagaacattcttctctcatctatttatccactgggagatatcaagatcgtcgacttcggcatgagtagaaagatcggccacgcatgcgagttgagagaaatcatgggtacaccagagtatttggcccccgagattttgaactatgaccctatcactacagccaccgacatgtggaacataggaataattgcgtacatgctacttacacatacaagccctttcgtgggagaagataatcaagagacatatttgaatatctcgcaggtgaatgtggattactcagaggagacgttttcttctgtttcacagctggccacggactttattcagtctctcctggtcaagaatccggaaaagaggccgactgctgaaatatgccttagccattcatggctacagcagtgggactttgaaaacctctttcaccccgaggaaacctcatcctcctctcagactcaggatcacagcgtaagaagtagcgaggacaagacatccaagagctcatgtaacggaacctgtggggatcgagaagataaggagaatattcctgaagattccagcatggtgtctaaacggtttcgatttgacgattccctgcctaaccctcacgagcttgtatcagacctcctgtgctag

SEQ ID NO: 144376 - DNA, 1119 bp, Artificial Sequence
  derived and/or modified sequence
atgagccggcggcggttcgactgccggagcatcagcggcctgctgactaccacacctcagataccgataaaaatggagaatttcaacaatttttacatcctgactagcaaagagctggggcgcgggaaatttgccgtcgttagacaatgtattagcaaaagcactggacaagaatatgcagctaaattcttgaaaaaaaggagaagaggacaggactgtagggcagaaatcctccacgaaatcgctgtcctggagctggccaagagctgtcccagagtcattaacctgcacgaggtttacgaaaacactagcgagatcattttgattttggagtatgcagcaggtggtgaaatattttcactgtgccttccagagctcgcagagatggtgagtgagaacgatgtgataagactcattaagcagatcctcgagggagtgtattatctgcaccagaacaacattgtacacctggatctcaagccccagaacatactactttcgagcatctatcccctcggcgacataaaaatcgtggattttggaatgtccagaaaaatcggccatgcctgcgaactgagagaaatcatgggaacacctgagtatttggcaccagaaattcttaactacgacccgatcacaaccgcaaccgacatgtggaatatcggcattattgcttatatgctgctaacccacacatcaccatttgtgggagaggataaccaagaaacctacttaaatatctcacaggtcaacgttgattatagcgaagaaaccttttcctccgtgtcccaactggcaacagactttatccagtccctcctggtgaaaaatcccgagaagcgccctaccgccgagatttgcttgagccacagctggctgcaacagtgggactttgagaatctctttcaccccgaggagacatcctcaagttcccagacacaggaccacagcgtgcgatcctctgaggataagacctccaaaagttcatgcaacgggacgtgcggcgatagggaagacaaagaaaacatccctgaggactctagcatggtgagcaagaggttccggtttgacgacagcctgccaaaccctcacgaactggtgtctgacctgctctgttag

SEQ ID NO: 144377 - DNA, 204 bp, Artificial Sequence
  derived and/or modified sequence
atgagccggcggcggttcgactgccggagcatcagcggcctgctgacaaccacaccgcaaatacccattaaaatggagaacttcaataatttttatattctgacatccaaggagctcgggcgcgggaagtttgctgtggtgaggcaatgtatctcaaaaagtaccgggcaggaatacgctgccaagtttctgaaaaagcgttag

SEQ ID NO: 144378 - DNA, 1441 bp, Artificial Sequence
  derived and/or modified sequence
ctctttctctctcacagcttctcacgaggtagaactttagagcctggtgtgtttgtggctggagcatagcagctcttctacaactttactgtagtttctactgaatattttggtttgcaaatataaaggattctctgaagcacaaccttaaataacgtgtggtagacacctgggagaggaaaactgcagacagaaaaatgtggccggatgctctgtgggcgggcggcagcgatgttcggccaggtggctccaaggagaggaagcagtgatgcattgaggtaaaaataagtgactaaagaagcagacctgggaatcacctaacatgtcgaggaggagatttgattgccgaagtatttcaggcctactaactacaactcctcaaattccaataaaaatggaaaactttaataatttctatatacttacatctaaagagctagggagaggaaaatttgctgtggttagacaatgtatatcaaaatctactggccaagaatatgctgcaaaatttctaaaaaagagaagaagaggacaggattgtcgagcagaaattttacacgagattgctgtgcttgaattggcaaagtcttgtccccgtgttattaatcttcatgaggtctatgaaaatacaagtgaaatcattttgatattggaatatgctgcaggtggagaaattttcagcctgtgtttacctgagttggctgaaatggtttctgaaaatgatgttatcagactcattaaacaaatacttgaaggagtttattatctacatcagaataacattgtacaccttgatttaaagccacagaatatattactgagcagcatataccctctcggggacattaaaatagtagattttggaatgtctcgaaaaatagggcatgcgtgtgaacttcgggaaatcatgggaacaccagaatatttagctccagaaatcctgaactatgatcccattaccacagcaacagatatgtggaatattggtataatagcatatatgttgttaactcacacatcaccatttgtgggagaagataatcaagaaacatacctcaatatttctcaagttaatgtagattattcggaagaaactttttcatcagtttcacagctggccacagactttattcagagccttttagtaaaaaatccagagaaaagaccaacagcagagatatgcctttctcattcttggctacagcagtgggactttgaaaacttgtttcaccctgaagaaacttccagttcctctcaaactcaggatcattctgtaaggtcctctgaagacaagacttctaaatcctcctgtaatggaacctgtggtgatagagaagacaaagagaatatcccagaggatagcagcatggtttccaaaagatttcgtttcgatgactcattacccaatccccatgaacttgtttcagatttgctctgttag

SEQ ID NO: 144379 - DNA, 1119 bp, Artificial Sequence
  derived and/or modified sequence
atgagccgcaggcggtttgattgtcggagcatctcaggactactcacaacaacccctcagattcctataaagatggagaattttaacaacttctacattctgacctctaaagagctaggacggggaaaatttgccgttgtgcgtcagtgtatcagcaaaagtacaggtcaggagtatgcggcaaagtttctgaaaaagcggaggcgcggacaagactgccgagctgagatcctccacgaaatcgctgtcttggagttggcaaagagttgtccccgtgttattaacctccatgaagtctacgaaaatacctccgaaattattctcatcttggagtatgccgcagggggagagatattctccctatgcctgccggagttggccgagatggtgtcagaaaacgatgtaatccgcctcattaagcagattctggagggtgtgtattatttgcatcagaataacattgtgcacctggacctaaagccacaaaacatcctgctgagctccatttatccactgggtgacatcaagatcgtggacttcggtatgtctcgtaagatcggtcacgcttgcgagctgcgagaaatcatgggcacccctgagtacttggcccctgaaatcttgaattacgatccgatcactactgcaacagatatgtggaatattgggatcatagcatatatgctactcacccacacctcccctttcgttggagaagacaaccaggagacctatctgaatatctcgcaggttaatgtggattactccgaagaaacattctcgtcagtgtcccagctcgcgaccgattttatacagagtctgcttgtgaagaacccggaaaagcgcccaaccgccgaaatctgtctctcccactcatggttgcaacagtgggactttgagaatctgttccaccccgaagagacctcttcttcttcccaaacccaggatcacagcgtgcggtcctcagaggataagactagcaagagcagctgtaacgggacatgtggtgatagagaggacaaagagaacataccagaagattcaagcatggtgagcaaaagattccgctttgatgatagcctgccaaacccccacgaattggtttctgatctactgtgctag

SEQ ID NO: 144380 - DNA, 507 bp, Artificial Sequence
  derived and/or modified sequence
aggaaaactgcagacagaaaaatgtggccggatgctctgtgggcgggcggcagcgatgttcggccaggtggctccaaggagaggaagcagtgatgcattgagggagtaaacatggaatcggtgagaatcactttccttgatcattatgtggtcagtatgcggtgactgacttgatgtgactggggaaggtcccttccctggacagaatatggtgagtgtcgtgccattaccggagaggatcaccttccctggccacatgtggtaaaaataagtgactaaagaagcagacctgggaatcacctaacatgtcgaggaggagatttgattgccgaagtatttcaggcctactaactacaactcctcaaattccaataaaaatggaaaactttaataatttctatatacttacatctaaagagctagggagaggaaaatttgctgtggttagacaatgtatatcaaaatctactggccaagaatatgctgcaaaatttctaaaaaagagaa

SEQ ID NO: 144381 - DNA, 1119 bp, Artificial Sequence
  derived and/or modified sequence
atgtcccggagaaggttcgactgtcggtccatttcgggactgctgacaacaacgcctcaaattcctatcaaaatggaaaattttaacaatttctacatccttaccagcaaggagctgggcagaggaaagttcgccgtcgtcaggcagtgtatctctaaatccaccggccaggagtatgctgcgaaatttctgaagaaaagaaggcggggtcaggactgccgtgccgagatactgcatgagatcgccgttctggagctggccaagagttgtccgcgtgtcataaatcttcatgaagtatatgagaatacttccgaaatcattttgatacttgagtacgcggctggcggagagatctttagtttgtgtctccccgagttagccgaaatggtgtctgagaacgatgtaatcagattaattaaacaaatactcgagggcgtgtattatttgcatcaaaacaacatagtgcaccttgacctgaagcctcagaacattctcctgtcatcaatttatccactgggggacataaagatcgtcgattttgggatgtcacgcaaaatcggtcacgcctgtgagctcagggaaatcatgggtactcctgagtacctggccccagagatcctcaactatgacccaatcaccacagcaaccgatatgtggaatatcgggatcatcgcttatatgttgctgacacatacctctccttttgtaggtgaggataaccaggaaacctatctcaatattagtcaggtaaacgtggattactccgaggaaactttttctagtgtatctcaactggcaacagactttatccagtcgctgcttgtcaaaaacccagagaagagacccaccgcagagatttgcctctcacattcatggctgcagcagtgggatttcgagaacctctttcaccctgaggaaacgtcgagctccagtcagacccaagaccatagcgttagatctagcgaggataagactagcaagtcctcctgtaatggcacttgtggtgatagggaggataaggagaacattcccgaggattcatccatggtcagcaaaagattcagattcgacgacagcctgcctaatccccacgaactggtaagcgacttactgtgttag

SEQ ID NO: 144382 - DNA, 204 bp, Artificial Sequence
  derived and/or modified sequence
atgtccaggcggaggtttgattgcagaagtatttccgggttgctgacaaccacaccccagattcctatcaagatggaaaacttcaataacttttacatcttgacctctaaagaactcgggaggggcaaatttgctgtggtccgccagtgtatttccaagagcaccggacaggagtacgccgcaaagtttctcaagaagcgctag

SEQ ID NO: 144383 - DNA, 5287 bp, Artificial Sequence
  derived and/or modified sequence
ccgcgactgcaagcttcggtagtcctctccgctgctgtcgccaggagtcacttcacgagaagccaggtcacaaccgtcggcccttgtctggaaaagtaaaagtggatcctgccacgttcggagctccctggcgcctcgcccggctggagctagagaactcgtcctgtggcggcccccggcgtggggcgggacagcggccccctggagggggcagtcccgggagaacctgcggcggccggagcggtaaaaataagtgactaaagaagcagacctgggaatcacctaacatgtcgaggaggagatttgattgccgaagtatttcaggcctactaactacaactcctcaaattccaataaaaatggaaaactttaataatttctatatacttacatctaaagagctagggagaggaaaatttgctgtggttagacaatgtatatcaaaatctactggccaagaatatgctgcaaaatttctaaaaaagagaagaagaggacaggattgtcgagcagaaattttacacgagattgctgtgcttgaattggcaaagtcttgtccccgtgttattaatcttcatgaggtctatgaaaatacaagtgaaatcattttgatattggaatatgctgcaggtggagaaattttcagcctgtgtttacctgagttggctgaaatggtttctgaaaatgatgttatcagactcattaaacaaatacttgaaggagtttattatctacatcagaataacattgtacaccttgatttaaagccacagaatatattactgagcagcatataccctctcggggacattaaaatagtagattttggaatgtctcgaaaaatagggcatgcgtgtgaacttcgggaaatcatgggaacaccagaatatttagctccagaaatcctgaactatgatcccattaccacagcaacagatatgtggaatattggtataatagcatatatgttgttaactcacacatcaccatttgtgggagaagataatcaagaaacatacctcaatatttctcaagttaatgtagattattcggaagaaactttttcatcagtttcacagctggccacagactttattcagagccttttagtaaaaaatccagagaaaagaccaacagcagagatatgcctttctcattcttggctacagcagtgggactttgaaaacttgtttcaccctgaagaaacttccagttcctctcaaactcaggatcattctgtaaggtcctctgaagacaagacttctaaatcctcctgtaatggaacctgtggtgatagagaagacaaagagaatatcccagaggatagcagcatggtttccaaaagatttcgtttcgatgactcattacccaatccccatgaacttgtttcagatttgctctgttagcacttttttctttgactcatttggactgaatttgaaattttatatccactccagtgagattatgatttgtagcttcatatatgacatgtttatattgtaaatgcacttttccatggaataatttagggaagtgttttaatgttaaattactagttgctagcatgttatgatttcatatcctgagatagctctgcagataagaaaatatttaaatatatgacaaaaagtaaaattgtacatgtgagtttacatgttaatgaaataattcaacttcaaatgaacttaccagaatgttttgcatatcaacaaaaaaagtggcttgagttttattatagttggtgtaaactgaacacagtgaagacattggaatttaataggttctctctctaaggtgactcttataccatgcctctatcaacataatttgtttaggaaagcagtatgaagtttaagccaaaataatttctactttatagatgctcaagagacattttacaattgaaaatgtctttcaattacaaatattttgaaacttcgtaagattttcattctctgtggtctgttatatgagagagatcctttaactagagcaaagagggagttagaaacctgatcagggatattctttacaagttggagcagaggaaagagtagcatgccttcgtattttaacgcaaatgtctttttcctcctcccaacctacttgagatctgataaggtctggaagatggagatatttggtatgcaagtgtagagttttttaatcctccagaatttctagagtagaagatacttaggtatagttaaatattctgtatttttagtcaaacatatttattaattgaatatagaagaaaatgttgacacactcagacagcttactgaattttagatgtcttctgcatcttagaatacaagccagtcattcagagttctaaaagtatgcataaaaaattacagcaccggtaggtctattaacacagtgcccgagtcagcggtagcaagactgatgtgatcataaaacatgacatcaggctcgtctgaagttcttgtgtgaaattcctagtgagtgaggaggctcagcttaaagccatctgcagagtggcccctcattgtggtcttttgctgggaccaatgcaagagactagggagagcaaaatgtttgcttatggctagagactatatccagccctaatgatggggaaagttagtccttttcgggtaatcttttatgaattttcacctgatgaccgttatattggtctgttatcatgttacgataactgtgatctcatgaccatgttgctgtatcagaagaaatagtttgacaaatggtaacaacaacctgatgttccccctttagacctttaacttctcaaaattttggtaagtttccaaattctttaataataacttaaaactttttgaataactatcaggtcactttatttgaccacatggtgaattcctttaatgtcttcagcatttgttaaggaaaagttttctctacttgtgtgtgtatgtgtgcacatgtgtgtatgtacaggtgtatgtatatatctatagatagatacaatacattctttagacacttttcaagattctttgctgtggtatattgtgctcaactcaggtgccaaaggagctttttttttttttttttttttttgagatggagttttgctctgtctctcaggctggagtgcagtggcatgatctcagctcacggcaacctctgcctcccgggttcaagcaattctcctgtctcagcctcctgagtagttgggattacaggcgcatgccaccgtgcccagctaatttttgtatttttagtagagacggggtttcaccatgttggccaggctggtcacaaactcctgacttcaagtgatccacccgcctcggcctcccaaagtgctgggattacaggcgtgagccactgcgcccccgcccaggagctcttttcttatgacatataaattatgacatttatattctttatatgactttatgttctcttcttatgacatttaaattctttaagtagtttgttggtccaataaactagacgttgtataatctaaattgagcccttgtatatctaaaactgatgagttgtttctaaattgttgattgtccatttacttgcctttggtattaagataatgcaagtaaagtttagtaagtcattggataatgaaatgattatgtttctgaagaccatattatatttttaatttttagaggaatcatgccatcccccaaaaaatcaagaaatatttgaattttaaattataagttcatttgttaaaagacatttttacaaatgtctgaaaatcttaaaatactttacatctacctttaagtagtagaatacagagctgtaaatttccatgccttttttcctgatattaagttttatagtaaaaaagcaactagtgattgcacaaagaatataaaaatccactctttttacaaaggtgtgaatttaaataacgttattgattggaatatgaaaatagaccaatcatttaagagctttttagcaaatgattcaattcttactctttttctcccaagattgaaaagcataatgtatttctctaaagtaggaatctagagagcccctgtgagtggacaaatgtcagtaacacttgaacacatgagaagataagtgttatgttgtgataatttaaagttaaatttgctttttgggtaggatccctaaatagatgggatttttaaatagatgatatatagatgacaattgcaattgtcattttaattattttccctacagtaaagaacctagctctgagcagtgaaattgtaatggcactttaaaggaagtaagccgttaactgttctctagtggagcgatctccaactgttttggcactagggacgggttttgtggaagaaaatttttccacaggactgggggtttagggggatggtttcaggatgattcaagtacattacatttatcattagattctcataaggagcatgcaacctagatctcttgcacgtgtggttcacagcaggattcgagctcctttgagaatctaatgccatggctgatctaacaggaaactgagctcaggcagtaatgcttggcaccgccccccaccttctatgcagcccggtcgtggcctggggactggggacccctgctctagtcagtaataaggtacttgtgccagaatataaatcaacacattgcttcctttatcaaagaagtcttgttatttaaaaaaagtcaactgagccagtatgattagtgatgtaattgattttcattctggcacaagcctctttcattctggacagctcacaaatagttaatggaccatgctttgaatagccttcctctaagcaacatttataaatactgatattttagaactgtttacatttcttctgtttatttttgaattttcagtttgatatcttgtccttattcattgttgtataaacaactgtactttaatttcaagtagtattaaaagtatttcacttcagtttggggggattattatcaatttataattttataaaagtattttaaagaataattgtaaattttccataaattacaacttcctgccatattttattaaataataatcttgcttaaggcatatagacagacattattatgagtattccagtaaaaaaaatctacatcaacttgaccattctggctaaaaattaaaaagcacttttttatatctgtggttgtcatttgtttcaaagcatttctaaatttattgttcttaaaagtatgtctgcatgttctagcctttgacctaggtcatctatgaaccctctttgtgtctaataaacatatctgtaaaggcatataaatctgaaaacaa

SEQ ID NO: 144384 - DNA, 1119 bp, Artificial Sequence
  derived and/or modified sequence
atgagcagaagaagattcgactgcagaagcatcagcggcctgctgaccaccaccccccagatccccatcaagatggagaacttcaacaacttctacatcctgaccagcaaggagctgggcagaggcaagttcgccgtggtgagacagtgcatcagcaagagcaccggccaggagtacgccgccaagttcctgaagaagagaagaagaggccaggactgcagagccgagatcctgcacgagatcgccgtgctggagctggccaagagctgccccagagtgatcaacctgcacgaggtgtacgagaacaccagcgagatcatcctgatcctggagtacgccgccggcggcgagatcttcagcctgtgcctgcccgagctggccgagatggtgagcgagaacgacgtgatcagactgatcaagcagatcctggagggcgtgtactacctgcaccagaacaacatcgtgcacctggacctgaagccccagaacatcctgctgagcagcatctaccccctgggcgacatcaagatcgtggacttcggcatgagcagaaagatcggccacgcctgcgagctgagagagatcatgggcacccccgagtacctggcccccgagatcctgaactacgaccccatcaccaccgccaccgacatgtggaacatcggcatcatcgcctacatgctgctgacccacaccagccccttcgtgggcgaggacaaccaggagacctacctgaacatcagccaggtgaacgtggactacagcgaggagaccttcagcagcgtgagccagctggccaccgacttcatccagagcctgctggtgaagaaccccgagaagagacccaccgccgagatctgcctgagccacagctggctgcagcagtgggacttcgagaacctgttccaccccgaggagaccagcagcagcagccagacccaggaccacagcgtgagaagcagcgaggacaagaccagcaagagcagctgcaacggcacctgcggcgacagagaggacaaggagaacatccccgaggacagcagcatggtgagcaagagattcagattcgacgacagcctgcccaacccccacgagctggtgagcgacctgctgtgctag

SEQ ID NO: 144385 - protein, 399 aa, Artificial Sequence
  derived and/or modified sequence
MDEDGGGEGGGVPEDLSLEEREELLDIRRRKKELIDDIERLKYEIAEVMTEIDNLTSVEESKTTQRNKQIAMGRKKFNMDPKKGIQFLIENDLLQSSPEDVAQFLYKGEGLNKTVIGDYLGERDEFNIKVLQAFVELHEFADLNLVQALRQFLWSFRLPGEAQKIDRMMEAFASRYCLCNPGVFQSTDTCYVLSFAIIMLNTSLHNHNVRDKPTAERFIAMNRGINEGGDLPEELLRNLYESIKNEPFKIPEDDGNDLTHTFFNPDREGWLLKLGGRVKTWKRRWFILTDNCLYYFEYTTDKEPRGIIPLENLSIREVEDPRKPNCFELYNPSHKGQVIKACKTEADGRVVEGNHVVYRISAPSPEEKEEWMKSIKASISRDPFYDMLATRKRRIANKK

SEQ ID NO: 144386 - protein, 314 aa, Artificial Sequence
  derived and/or modified sequence
MALPQLQTAMLAAFLWDPRDVVLTAQPGAEQCAESSQHIRILQPQFRLIRLRFWKLYIQRRVQAWQFLWSFRLPGEAQKIDRMMEAFASRYCLCNPGVFQSTDTCYVLSFAIIMLNTSLHNHNVRDKPTAERFIAMNRGINEGGDLPEELLRNLYESIKNEPFKIPEDDGNDLTHTFFNPDREGWLLKLGGRVKTWKRRWFILTDNCLYYFEYTTDKEPRGIIPLENLSIREVEDPRKPNCFELYNPSHKGQVIKACKTEADGRVVEGNHVVYRISAPSPEEKEEWMKSIKASISRDPFYDMLATRKRRIANKK

SEQ ID NO: 144387 - DNA, 1200 bp, Artificial Sequence
  derived and/or modified sequence
atggacgaggatggtgggggagaagggggaggcgtgcccgaggacttgagtcttgaggaacgcgaggagctgctcgacatcaggcggcgaaaaaaggagctcattgacgatatcgaacgactgaagtacgagattgctgaggtcatgacggagattgacaacttgacttctgtggaagagtccaagacaacacaacggaataagcaaatcgctatgggtaggaagaagtttaacatggatcctaaaaagggaattcagtttttaattgagaacgacttactacaaagttctcccgaagacgtcgcacagttcttgtataaaggagaaggtctgaataaaactgtgattggcgattacttgggtgagagggacgaatttaacatcaaggtacttcaggcttttgtcgagctgcacgaatttgccgatctgaaccttgttcaggcacttcgacagtttctttggagttttcgtctgcctggagaagcccaaaagatcgacagaatgatggaggcttttgcgagcaggtactgtctttgcaaccctggcgtatttcagagcacggacacttgctatgttctttcatttgctatcattatgctcaacactagcttgcacaatcacaatgtacgcgataaacctacagccgaaagatttatagccatgaaccgaggcataaacgagggtggggatttgcccgaagagctgctgcggaacctgtatgagagcatcaagaacgagccttttaagatacccgaggacgatggcaacgacttgacgcacacatttttcaatccggaccgggaagggtggctgttgaaattaggtgggcgcgtgaagacgtggaagagacgctggtttattctgaccgataattgtttgtactacttcgaatacaccacagacaaggagccccgcggaattatcccactggagaacctgtcgattagagaggtcgaggatccgagaaagcctaactgttttgaactgtataatcccagtcataaaggccaagtgattaaagcgtgtaaaaccgaggctgacggacgggtcgttgagggaaatcatgttgtctaccgcatctcagctccatcaccagaagagaaggaagaatggatgaagtccatcaaggcaagtatttcaagggatcctttctacgatatgctggctacaagaaaaagacggatcgctaacaaaaagtag

SEQ ID NO: 144388 - DNA, 945 bp, Artificial Sequence
  derived and/or modified sequence
atggcactgcctcagttacagacagccatgctggccgccttcctatgggaccccagggacgttgtgctgaccgcccagccaggggccgaacagtgcgccgaatccagtcaacacatccggattctgcagccccaattcaggcttattaggttgcggttctggaaactctacatccagcgaagagtacaggcttggcagttcctgtggagttttaggctccccggggaagcccaaaagatagatagaatgatggaggccttcgcctctagatactgcctgtgcaacccgggagtgttccagagcactgacacttgttacgtgttgtccttcgctattatcatgttgaataccagcctgcataaccacaatgtccgcgataagccaaccgctgagcgctttattgctatgaataggggaatcaacgagggaggagaccttcccgaggaactgcttagaaatctgtacgagtcaattaaaaatgagcctttcaagattcccgaggacgacggaaatgaccttactcacacattcttcaaccccgacagggagggttggttgttgaagctgggtggccgcgtgaagacatggaagagacgctggttcatcctgaccgacaactgcttgtactactttgagtatactactgacaaggaaccgcgcggtattatccccctcgaaaacctgtccataagggaagtggaagatcctcggaaacctaattgcttcgaactgtacaaccccagtcataaaggccaagtcataaaggcctgtaaaaccgaggcagatggcagagtcgtcgagggcaatcatgtggtatacagaatcagcgctcccagccctgaggaaaaagaagaatggatgaaatctattaaggcctccatctctagggatcctttctatgatatgctcgctaccagaaagcggaggatagctaacaagaaatag

SEQ ID NO: 144389 - DNA, 1200 bp, Artificial Sequence
  derived and/or modified sequence
atggatgaagatggcggcggggagggcggcggcgtgcctgaggacctgagcctggaggagcgggaggagctgctggacatcagaagaaggaagaaggagctgattgatgacatcgagcggctgaagtatgaaattgctgaggtgatgacagaaattgacaacctgacctctgtggaggagagcaagaccacccagaggaacaagcagatcgccatgggcaggaagaagttcaacatggaccccaagaagggcatccagttcctgattgaaaatgacctgctgcagagcagcccagaagatgtggcccagttcctgtacaagggggagggcctgaacaagacagtcatcggggactacctgggggagagagatgagttcaacatcaaggtgctgcaggcctttgtggagctgcacgagtttgctgacctgaacctggtgcaggccctgcggcagttcctgtggagcttccggctgcctggagaggcccagaagattgacaggatgatggaggcctttgccagccgctactgcctgtgcaaccctggggtcttccagagcacagacacctgctacgtgctgagctttgccatcatcatgctgaacaccagcctgcacaaccacaacgtgcgggacaagcccacagctgagcgcttcatcgccatgaacagaggcatcaatgaaggaggagacctgcctgaggagctgctgaggaacctgtatgagagcatcaagaatgagcccttcaagatcccagaagatgatggaaatgacctgacccacaccttcttcaacccagaccgggagggctggctgctgaagctgggcggccgggtgaagacctggaagaggcgctggttcatcctgacagacaactgcctgtactactttgagtacaccacagacaaggagccccggggcatcatccccctggagaacctgagcatccgggaggtggaggaccccaggaagcccaactgctttgagctgtacaaccccagccacaagggccaggtgatcaaggcctgcaagacagaagcagatggccgggtggtggagggcaaccacgtggtgtaccgcatcagcgcccccagccctgaggagaaggaggagtggatgaagagcatcaaggccagcatcagccgggaccccttctatgacatgctggccaccaggaagagaagaattgccaacaagaagtag

SEQ ID NO: 144390 - DNA, 945 bp, Artificial Sequence
  derived and/or modified sequence
atggccctgccccagctgcagacagccatgctggccgccttcctgtgggaccccagagatgtggtgctgacagcccagcctggagctgagcagtgtgccgagagcagccagcacatccgcatcctgcagccccagttccgcctcatccggctgcgcttctggaagctgtacatccagaggagagtgcaggcctggcagttcctgtggagcttccggctgcccggggaggcccagaagattgacaggatgatggaggcctttgccagccgctactgcctgtgcaaccctggggtcttccagagcacagacacctgctacgtgctgagctttgccatcatcatgctgaacaccagcctgcacaaccacaacgtgcgggacaagcccacagctgagcgcttcatcgccatgaacagaggcatcaatgaaggaggagacctgcctgaggagctgctgaggaacctgtatgagagcatcaagaatgagcccttcaagatcccagaagatgatggaaatgacctgacccacaccttcttcaacccagaccgggagggctggctgctgaagctgggcggccgggtgaagacctggaagaggcgctggttcatcctgacagacaactgcctgtactactttgagtacaccacagacaaggagccccggggcatcatccccctggagaacctgagcatccgggaggtggaggaccccaggaagcccaactgctttgagctgtacaaccccagccacaagggccaggtgatcaaggcctgcaagacagaagcagatggccgggtggtggagggcaaccacgtggtgtaccgcatcagcgcccccagccctgaggagaaggaggagtggatgaagagcatcaaggccagcatcagccgggaccccttctatgacatgctggccaccaggaagaggcgcatcgccaacaagaagtag

SEQ ID NO: 144391 - DNA, 1200 bp, Artificial Sequence
  derived and/or modified sequence
atggacgaggacggcggcggcgagggcggcggcgtgcccgaggacctctctctggaagagcgcgaggaactgttggatattcgacggaggaagaaagaactgatcgatgacattgagcgattgaagtacgagatcgccgaggttatgacagaaattgataacttgacttccgtggaggagtctaagaccacccagcgtaataaacagatcgccatgggacgcaaaaaattcaacatggacccaaagaaagggatacagttccttattgagaatgaccttctgcagagttcacccgaagatgtggctcagttcctgtataagggcgagggattgaataagacggtgatcggcgactacttaggcgaacgagacgagtttaacattaaagtcctgcaggctttcgtggagctgcatgagttcgcagaccttaacttagtgcaagctctcaggcaattcttatggtcttttcgccttcctggtgaggcacagaaaattgataggatgatggaagccttcgcctcaagatattgtctctgcaatcccggtgttttccagagcacggatacatgttacgtactgagcttcgccattatcatgctgaatacttccctgcacaatcataatgtgcgtgacaaacctaccgctgaacgctttatagccatgaaccggggcatcaacgaggggggtgatctgcccgaggaactgctgcgaaatctttatgaaagcatcaaaaacgaaccatttaaaatcccggaggatgacgggaatgaccttacgcacactttctttaatcccgatagagaggggtggctcctgaagttagggggaagagtcaagacctggaaacgcagatggttcattcttacagataattgcttgtattacttcgagtataccactgacaaggagcctagggggataattcctctcgagaatttgtctattcgcgaggtggaagatccaagaaaacccaattgtttcgaactttataaccccagccataagggccaggtcatcaaagcttgtaagactgaggccgacggacgtgtggtcgaaggcaatcacgtcgtgtataggatcagtgccccgagccctgaggaaaaagaagagtggatgaaaagcattaaggcgagtatctcgcgggaccctttctatgatatgttggccaccagaaaacgcagaatagcaaataagaagtag

SEQ ID NO: 144392 - DNA, 945 bp, Artificial Sequence
  derived and/or modified sequence
atggccctgccccagctgcagaccgccatgctggccgccttcctgtgggaccccagggatgtcgtcctcacagcccagcccggagccgagcaatgcgccgagtcatctcagcatattcgcattctccagccccagtttagacttatccggctgaggttttggaagctctatattcagaggagggtccaggcctggcagtttctgtggtcattcagactcccgggcgaggcccagaagattgacagaatgatggaagcatttgcaagtcgatactgcctgtgcaacccaggagtatttcagtctaccgatacatgctacgttttaagcttcgccatcattatgttgaacacttctttgcacaatcacaatgtgcgggacaaacctacagccgagaggtttatcgcgatgaacagagggatcaatgaaggcggggaccttccagaggagctccttaggaatttgtacgagtctatcaagaacgaaccatttaagatccccgaggacgacggcaacgacctcacccacaccttttttaaccctgaccgcgaaggctggctgctcaaattgggcgggcgcgtgaagacttggaaaagacggtggtttatattgacggacaattgcctatattactttgaatatacaaccgacaaagagccccgcggtataatcccattggagaacctatcaatccgcgaggttgaagatccacgcaagccaaattgcttcgaactgtataatccttcccacaaaggtcaggtgattaaagcttgtaaaaccgaggctgatggacgggtggtggagggcaatcacgtagtatacagaatctcagccccatctcctgaagagaaggaagagtggatgaaatccattaaagcgagtatttctcgcgaccccttttatgatatgctcgcgaccaggaaaaggcggattgcgaacaagaaatag

SEQ ID NO: 144393 - DNA, 1200 bp, Artificial Sequence
  derived and/or modified sequence
atggatgaagacggcggaggtgagggaggtggggtgcccgaagacctgtcactcgaggagagggaggaactgctggatatccggaggcgcaaaaaagagttaattgatgacatcgagcgcctgaaatacgagatagcagaggtgatgacggaaattgataacctcacctccgttgaggaaagcaaaaccactcaacgcaataagcagatagcaatgggtaggaaaaaatttaacatggatccaaagaaaggcattcagtttctgatcgaaaacgatctcctgcagtctagccctgaggatgtcgcccaatttctctataagggggaaggcctaaataaaaccgtgatcggtgactacctgggcgaaagagacgaattcaatataaaagtgctgcaggcattcgtagagttgcacgaattcgccgatctgaacctggttcaagcactcaggcaattcctgtggtcttttagattaccgggagaggcccagaagatagacaggatgatggaagcttttgcatcccgatattgcttatgtaatcctggcgtgttccaaagtaccgacacttgttacgttctgtcctttgccatcattatgctgaacacgagtttacataaccacaacgttcgggataagcccacagcagagagattcatcgcaatgaatcggggtatcaacgaaggtggcgatctgccggaggaattactccgtaatctttacgagtctataaagaacgagccattcaagatccccgaggatgacggcaatgatctgacccacaccttctttaacccagatagagaggggtggcttctgaagttggggggaagagtgaagacatggaagcggaggtggttcatactgacggacaactgcctctactattttgagtataccaccgataaggagcctcggggaattatcccattggaaaatttaagtataagggaggtagaagatccacgcaaacccaattgctttgagctttataacccttctcataagggacaagtgataaaggcatgcaagaccgaagctgacggtagagtcgtggaaggcaaccacgtcgtctaccgaatctccgccccatcacccgaagagaaggaggagtggatgaaatcaatcaaggcaagcatttctcgtgacccattttacgacatgttggctaccagaaaaaggaggatcgccaacaaaaaatag

SEQ ID NO: 144394 - DNA, 945 bp, Artificial Sequence
  derived and/or modified sequence
atggcacttccacagctgcagaccgccatgttggctgcatttctgtgggatccgagggatgtggttcttactgcccaaccaggcgctgagcagtgtgccgagagctctcagcatatccgaatattgcagccacagttcagactcatccgactcagattttggaagctgtacatccagcgacgcgtgcaggcctggcagttcctgtggagctttcggctcccaggtgaggcccagaaaattgataggatgatggaagctttcgcatccagatactgcctatgcaacccaggagttttccagtcaaccgacacctgttacgtgttgtcttttgccataatcatgttgaatacaagcctgcacaaccataacgtccgagataagcctaccgccgaaagatttattgccatgaatagaggcataaacgagggaggtgatctgcctgaggaactcctgcggaatttatatgaaagcattaagaacgagcccttcaaaattcctgaggacgatggcaacgatcttactcacaccttctttaacccagaccgcgagggctggttactgaaactaggcggtagggtgaagacctggaaaaggagatggttcatcctgaccgataactgtctgtactatttcgagtatactaccgataaggagccacgaggcatcattcctctggagaatctgtccatccgtgaggtggaggaccctagaaaacctaattgtttcgaattatacaatccctcgcataagggccaagtgattaaagcctgtaaaacggaggccgacggacgggtcgttgaggggaaccatgttgtgtaccgaatctccgcgcctagcccagaagagaaagaagaatggatgaagagtatcaaggcaagcatctcccgggacccattctacgacatgctggcaacgcgcaagagacgcatcgcaaataaaaagtag

SEQ ID NO: 144395 - DNA, 4505 bp, Artificial Sequence
  derived and/or modified sequence
ggaggaggcccggccgcgacccgggccgcgcgctgaggagccgcccggtcgcctgcgcgctccctccggcggcgtccccagcccgcggcccctctgctgccggcccccggctcgccggctgcgggagtggcctcaagatggatgaagacggcggcggcgagggtggtggcgtgcctgaagacctctcattagaagagagagaagaacttctagacattcgtcgaagaaaaaaggaacttattgatgacattgagaggctgaaatatgaaattgcagaggtgatgacagagatcgacaatctaacttccgtagaggagagcaaaacgactcagaggaacaaacagatagccatgggaagaaagaaattcaacatggatcccaaaaagggaattcagtttctaatagaaaatgacctgctacagagttccccagaagacgtcgcccagttcctttataaaggagaaggcctaaataagaccgtcattggggactacctgggtgaaagggatgaatttaatattaaagttcttcaagcctttgttgaactccatgagtttgctgatctcaaccttgtacaagccttaaggcagttcttatggagcttcaggctgcccggggaggcgcagaagattgatcgcatgatggaggctttcgcttctcgctactgcctgtgcaaccccggggtcttccagtccacagacacgtgctacgtgctgtcattcgccatcatcatgctcaacaccagcctccacaaccacaacgtgcgtgacaagcccacggcagaacggttcatcgccatgaaccgcggcatcaacgagggcggggacctccctgaggagctgctgaggaatttgtatgagagcattaagaacgagccatttaagatcccggaggacgacgggaacgacctgacccacaccttcttcaaccccgaccgcgagggctggctcctgaagctgggagggcgtgtgaagacctggaagcgccggtggttcatcctgaccgataactgcctctattactttgaatacacaacagataaggagcccaggggaatcatcccgttggaaaacctcagcatcagggaggtggaggacccccggaaacccaactgttttgagctctacaatcccagccacaaagggcaggtcatcaaggcctgtaagactgaggccgacggccgcgtggtagaggggaaccatgtggtgtaccggatctcagccccgagcccggaggagaaggaggagtggatgaaatccatcaaagccagtatcagcagagatcccttctatgacatgttggcaacgaggaaacgaaggattgccaataaaaaatagctttcctggctaaaagacccaggtaaaagacccaaccccagcagaaagacaccgcgggcggcccctccgcggaaggcgtggcagggaggcagtcgccctgcggtgcaagctgctgctccagagcataccgtggcccaggtggtatccccaaggcctcgtgccgtggctggggtcctgggaggtggtcgccctgcagtgcaagctgctgctccagagcgtaccgtggcccagactgatcctcgaggcctcctgccgtggctggggtcatggtcggctgcgcatgtccagaagcatttccttcctgcgaccatcccggcgcccctagggggagaagccaggacagcagcttccgctgtctccacagcagacacgggacggattccacagacgggagcctcattcgtaccatgccaaacgcattcactcggggcagtattaaccgttctagaaagccactgttttatagcaaaacaggaaaggaaaagctaccagttttttattcagaatttttctcagatatataggattatagcttttatatgcctttttatattctgaaattataacaaaagatactttctaacagtagtatttttagaatggcagctataaagttaactcctggacacaagtatatactgtgcactgaaaaaatatccatctacacagcacccaaggggagggctgggggcaccggcacgggggcagcgtgcagccctgccctgtcaggctgtcagacaagccccggggggcagcaggtgggctcgggacgggctgggggagggacggccatggcacttgggggctccagggtgactcccatgaggcctcccttcaaccaggctttttggccccacaaatactttaagcaaatcattaaaattataacagttaatggtttgggggtgtttaggctgtaactgctaactcctaggaaacagccttttccctggacacagatggtccatacgctgagccacgtgaaactgctgatgttttgtttagatgcacacacatggcagcgtttcatacaggtcagcaggttagaccggcttttgaccatattcatcgctatttaaaacctgtggcaaaatgaacgcttattttacagactttctaatttgaccagatttcttaatgaatagacacagaattaactaaaaacagtctcaccccatgtagtgcgccgtgtcctgagagaggtgccctccctacgaggagggaagaacaggccctggggtgcagaggcccggcacgtagagaacccagatagacgccggtggtggaactggtcaaactccacgcccgcctgggaggttgtcaggttgctgtggatgtaaggataggaggtgcccagtgctccgctcaaggaaggctggatctgggccccacctacagagagggctcagggctggaccgggggcattgtgtgcttgggccgacccgggccggtggcagacgctgttctctgtcgggagatttgcgtccccaggaccctgttacacagtgggctgttgggttggtggctggcttttcctctatggacttcctcttcctgccccacctgcataggcacacacaccttgaatctgcaccctctggagggcatctgtactcctgtgcaaaatgcccagtccagagacaaaacctcagactttgtgcacctaggtttccttctcagcagcggagactgttctttgagttgccttgaagtggaggccgagcggctgcgggcccttcgcctccctgcggctgaccttgatgtagctttaagtcacactagactgcagaggggtccgaggccagaaacccctgtcctgcatcagactttcattcccacgttcttaggctttgttactgatacctcaaatcggaagttttagttctgagaaaggcaagtcagcgttcttgaaatgcctgactggtagatatgcaactctggcctccagtcttccatgaaaataaatgctgcctggacccccacccagaccacacactgacggccggctccggcggtgcccacccctcaggctggcccggcacccaagactggccacagccagctctgtcagcatgttgtgctcggacaagctgtttccttcttctgaccaacccaggtgtgacctggggatgcagagctttctgttttgggtgttgggagaagcagcaggaaggagtcgccagatgatcaagctccccctttgctgtcatctgtgaatgagcttcgccaggtggtgggcacctgggagccatgcagaggctgtggtgctgagttagactccaggtactttgtggtcaaaggaaatcgcctagctccaggctgtgttaggacagtattagcatgaaggctgtgcgaccatcatgcctgctgatccttgaggcaggcctggtccagaaaactctgggtcagtgactgcgcagggccagccgctaccaggacggccctgaaacaggacacatctgttttttgtccctcaccctgggcaggccgcgtcacaatcacagtcctcctcctccccaccctgacgtctgagcgcagggcttgaattgttagtcccaactctggccaaagatacttttttccagagacagaggccaggaggcagtgaggggagccccgcggggaggcggcggcgactgccacagcccttccagcctgtcttgctggccgccctggttcatatttgagtttaattgtactgaccctggacccagataagcagcaactttgtgtctttggggtcacagaacattttggggcagtttaatgtggtaccaaactgaaaataggagctatttatagatggagcagcacttagtgcttcatagaaagcaatgcctatttttaaagttacaaacgcagatatctacatagatatgctttgctgagaagttaggtctgtggtagaccagaaaccacaaattgactttttttcttagaaaatatttctatttgcggtaaatatagtaatatgtaaataatgtacatctgttgatttctggagtgtctgttattcaatgatgtatatactcccacagctcgcatgaaggaacagcctctattgatacttggttgtaaagtgaagtaagattggagggtggatggctgtcagagctcttgcagatactgtgttcactaaataaaaatcacatgtattgttaaaacaa

SEQ ID NO: 144396 - DNA, 1171 bp, Artificial Sequence
  derived and/or modified sequence
agcactcagcagcatccgggggagaggaggcagggcttctggtgggagtcgcctcagccggcccttggactaagaaaatcaggccgcacctcgtcatcttctcaaatcttcggcttcataccttgttctcgtttacgtggactgtttgctcatggccttacctcaactgcagactgcaatgttggcagcgtttttgtgggaccctcgtgatgttgtgctcacagcgcagcctggggctgaacagtgcgctgagagttcgcaacatataagaatcctgcagccgcagttcaggcttatcagattgcgtttctggaagctgtacatccagagaagggtgcaggcctggcagttcttatggagcttcaggctgcccggggaggcgcagaagattgatcgcatgatggaggctttcgcttctcgctactgcctgtgcaaccccggggtcttccagtccacagacacgtgctacgtgctgtcattcgccatcatcatgctcaacaccagcctccacaaccacaacgtgcgtgacaagcccacggcagaacggttcatcgccatgaaccgcggcatcaacgagggcggggacctccctgaggagctgctgaggaatttgtatgagagcattaagaacgagccatttaagatcccggaggacgacgggaacgacctgacccacaccttcttcaaccccgaccgcgagggctggctcctgaagctgggagggcgtgtgaagacctggaagcgccggtggttcatcctgaccgataactgcctctattactttgaatacacaacagataaggagcccaggggaatcatcccgttggaaaacctcagcatcagggaggtggaggacccccggaaacccaactgttttgagctctacaatcccagccacaaagggcaggtcatcaaggcctgtaagactgaggccgacggccgcgtggtagaggggaaccatgtggtgtaccggatctcagccccgagcccggaggagaaggaggagtggatgaaatccatcaaagccagtatcagcagagatcccttctatgacatgttggcaacgaggaaacgaaggattgccaataaaaaatagctttcctggctaaaagacccaggtaaaagacccaaccccagcagaaagacaccgcgggcggcccctccgcggaag

SEQ ID NO: 144397 - DNA, 1200 bp, Artificial Sequence
  derived and/or modified sequence
atggacgaggacggcggcggcgagggcggcggcgtgcccgaggacctgagcctggaggagagagaggagctgctggacatcagaagaagaaagaaggagctgatcgacgacatcgagagactgaagtacgagatcgccgaggtgatgaccgagatcgacaacctgaccagcgtggaggagagcaagaccacccagagaaacaagcagatcgccatgggcagaaagaagttcaacatggaccccaagaagggcatccagttcctgatcgagaacgacctgctgcagagcagccccgaggacgtggcccagttcctgtacaagggcgagggcctgaacaagaccgtgatcggcgactacctgggcgagagagacgagttcaacatcaaggtgctgcaggccttcgtggagctgcacgagttcgccgacctgaacctggtgcaggccctgagacagttcctgtggagcttcagactgcccggcgaggcccagaagatcgacagaatgatggaggccttcgccagcagatactgcctgtgcaaccccggcgtgttccagagcaccgacacctgctacgtgctgagcttcgccatcatcatgctgaacaccagcctgcacaaccacaacgtgagagacaagcccaccgccgagagattcatcgccatgaacagaggcatcaacgagggcggcgacctgcccgaggagctgctgagaaacctgtacgagagcatcaagaacgagcccttcaagatccccgaggacgacggcaacgacctgacccacaccttcttcaaccccgacagagagggctggctgctgaagctgggcggcagagtgaagacctggaagagaagatggttcatcctgaccgacaactgcctgtactacttcgagtacaccaccgacaaggagcccagaggcatcatccccctggagaacctgagcatcagagaggtggaggaccccagaaagcccaactgcttcgagctgtacaaccccagccacaagggccaggtgatcaaggcctgcaagaccgaggccgacggcagagtggtggagggcaaccacgtggtgtacagaatcagcgcccccagccccgaggagaaggaggagtggatgaagagcatcaaggccagcatcagcagagaccccttctacgacatgctggccaccagaaagagaagaatcgccaacaagaagtag

SEQ ID NO: 144398 - DNA, 945 bp, Artificial Sequence
  derived and/or modified sequence
atggccctgccccagctgcagaccgccatgctggccgccttcctgtgggaccccagagacgtggtgctgaccgcccagcccggcgccgagcagtgcgccgagagcagccagcacatcagaatcctgcagccccagttcagactgatcagactgagattctggaagctgtacatccagagaagagtgcaggcctggcagttcctgtggagcttcagactgcccggcgaggcccagaagatcgacagaatgatggaggccttcgccagcagatactgcctgtgcaaccccggcgtgttccagagcaccgacacctgctacgtgctgagcttcgccatcatcatgctgaacaccagcctgcacaaccacaacgtgagagacaagcccaccgccgagagattcatcgccatgaacagaggcatcaacgagggcggcgacctgcccgaggagctgctgagaaacctgtacgagagcatcaagaacgagcccttcaagatccccgaggacgacggcaacgacctgacccacaccttcttcaaccccgacagagagggctggctgctgaagctgggcggcagagtgaagacctggaagagaagatggttcatcctgaccgacaactgcctgtactacttcgagtacaccaccgacaaggagcccagaggcatcatccccctggagaacctgagcatcagagaggtggaggaccccagaaagcccaactgcttcgagctgtacaaccccagccacaagggccaggtgatcaaggcctgcaagaccgaggccgacggcagagtggtggagggcaaccacgtggtgtacagaatcagcgcccccagccccgaggagaaggaggagtggatgaagagcatcaaggccagcatcagcagagaccccttctacgacatgctggccaccagaaagagaagaatcgccaacaagaagtag

SEQ ID NO: 144399 - protein, 1454 aa, Artificial Sequence
  derived and/or modified sequence
MAPVQLENHQLVPPGGGGGGSGGPPSAPAPPPPGAAVAAAAAAAASPGYRLSTLIEFLLHRAYSELMVLTDLLPRKSDVERKIEIVQFASRTRQLFVRLLALVKWANNAGKVEKCAMISSFLDQQAILFVDTADRLASLARDALVHARLPSFAIPYAIDVLTTGSYPRLPTCIRDKIIPPDPITKIEKQATLHQLNQILRHRLVTTDLPPQLANLTVANGRVKFRVEGEFEATLTVMGDDPDVPWRLLKLEILVEDKETGDGRALVHSMQISFIHQLVQSRLFADEKPLQDMYNCLHSFCLSLQLEVLHSQTLMLIRERWGDLVQVERYHAGKCLSLSVWNQQVLGRKTGTASVHKVTIKIDENDVSKPLQIFHDPPLPASDSKLVERAMKIDHLSIEKLLIDSVHARAHQKLQELKAILRGFNANENSSIETALPALVVPILEPCGNSECLHIFVDLHSGMFQLMLYGLDQATLDDMEKSVNDDMKRIIPWIQQLKFWLGQQRCKQSIKHLPTISSETLQLSNYSTHPIGNLSKNKLFIKLTRLPQYYIVVEMLEVPNKPTQLSYKYYFMSVNAADREDSPAMALLLQQFKENIQDLVFRTKTGKQTRTNAKRKLSDDPCPVESKKTKRAGEMCAFNKVLAHFVAMCDTNMPFVGLRLELSNLEIPHQGVQVEGDGFSHAIRLLKIPPCKGITEETQKALDRSLLDCTFRLQGRNNRTWVAELVFANCPLNGTSTREQGPSRHVYLTYENLLSEPVGGRKVVEMFLNDWNSIARLYECVLEFARSLPDIPAHLNIFSEVRVYNYRKLILCYGTTKGSSISIQWNSIHQKFHISLGTVGPNSGCSNCHNTILHQLQEMFNKTPNVVQLLQVLFDTQAPLNAINKLPTVPMLGLTQRTNTAYQCFSILPQSSTHIRLAFRNMYCIDIYCRSRGVVAIRDGAYSLFDNSKLVEGFYPAPGLKTFLNMFVDSNQDARRRSVNEDDNPPSPIGGDMMDSLISQLQPPPQQQPFPKQPGTSGAYPLTSPPTSYHSTVNQSPSMMHTQSPGNLHAASSPSGALRAPSPASFVPTPPPSSHGISIGPGASFASPHGTLDPSSPYTMVSPSGRAGNWPGSPQVSGPSPAARMPGMSPANPSLHSPVPDASHSPRAGTSSQTMPTNMPPPRKLPQRSWAASIPTILTHSALNILLLPSPTPGLVPGLAGSYLCSPLERFLGSVIMRRHLQRIIQQETLQLINSNEPGVIMFKTDALKCRVALSPKTNQTLQLKVTPENAGQWKPDELQVLEKFFETRVAGPPFKANTLIAFTKLLGAPTHILRDCVHIMKLELFPDQATQLKWNVQFCLTIPPSAPPIAPPGTPAVVLKSKMLFFLQLTQKTSVPPQEPVSIIVPIIYDMASGTTQQADIPRQQNSSVAAPMMVSNILKRFAEMNPPRQGECTIFAAVRDLMANLTLPPGGRP

SEQ ID NO: 144400 - DNA, 4365 bp, Artificial Sequence
  derived and/or modified sequence
atggctcccgtgcaacttgagaaccatcaactcgtgccacccgggggtggtggtggcgggtctggaggtccacctagtgcacccgctccccccccacctggtgccgcagtggcggctgccgccgctgccgcagcatcaccgggttacaggctgtccactctcattgagtttctgctgcatagggcttactcagaattgatggtactgacggatctgctccctagaaagtccgacgtggagagaaaaattgagattgtgcaatttgcaagcaggactcgtcaactgtttgtacggctgctcgccctggttaagtgggccaacaatgcaggcaaggttgagaaatgcgctatgatatccagtttcttggatcaacaggcaatactgtttgtcgacaccgcggatcgtctggcatccctcgcaagggacgccctggtgcatgcacgcctgccctcattcgctatcccgtacgcaatagatgtactgaccactgggagttatccgcggcttcccacttgtatacgcgacaagattatccctccagacccgatcaccaaaatcgaaaagcaggctacactgcatcagctgaaccagatactacgacatcggctggtgacaactgatcttccacctcagctcgcaaacttgacagtggccaatggacgcgtgaaattcagggttgagggcgagtttgaggcgacccttaccgtcatgggagatgaccccgatgtgccatggagattgctgaaattagagatacttgtagaggacaaggagacaggagacgggcgagccctggtccactctatgcaaatcagtttcatccaccagcttgtccagtctcgactgttcgctgatgaaaaaccattgcaggacatgtacaactgcctccatagcttctgtttatccctgcagttagaagtattgcactcacagacattaatgttaattagggagcgttggggtgacttagtgcaggtagaacgttatcacgctggtaagtgtctctccctgtctgtttggaatcagcaggtcctaggcaggaaaactggtactgcttccgttcataaggtaaccatcaagatagatgagaacgatgtgtctaaacctctccagatatttcacgatcccccactgccagccagtgactctaagcttgtggaaagagctatgaagattgaccacctctctatagagaagttgttgattgacagtgtgcacgctcgggcacaccagaaattacaggagttgaaagctatattgcgagggttcaacgccaacgaaaacagcagcatcgagactgctctgccagctcttgttgtgcctatcctcgaaccatgcggcaattctgagtgtcttcacatatttgtggatctgcacagcggcatgtttcagctcatgttgtatgggttagatcaagcgacactcgatgatatggagaaatccgtgaacgatgacatgaagagaatcatcccttggatccagcagctgaagttttggttaggccagcagcgctgtaaacagagcattaagcacttacccacaatctcgtctgaaaccttgcagctcagtaattacagcacgcaccctataggaaacctctccaaaaacaagttgttcatcaaactgacccgactgccccagtactacatagtcgtagagatgctcgaagttccaaataagccaacgcaactctcttacaagtactacttcatgtctgtgaatgccgcggaccgcgaagatagcccagcaatggcgctcctgctccagcaatttaaagaaaatatccaggatctcgtatttaggaccaagactggaaaacagacccgaacaaatgccaagagaaagctgtctgacgacccatgcccggttgaatccaagaaaaccaagagggcaggtgaaatgtgtgctttcaataaagtcttggcacactttgtcgcgatgtgtgacacaaacatgccctttgttgggctgagactggagctgtccaatctagaaattccgcatcagggggtgcaggtagagggagacggtttttctcacgcaatccgcctgctcaaaattcctccctgtaagggtatcacagaggagacgcagaaggccctcgaccggagtcttctagactgtacgttcaggttgcaaggtcgcaacaataggacatgggtagctgagcttgtctttgctaattgtcctctgaacggcacatctactagagagcaagggccttcccggcatgtttatctcacctacgagaatctactgtctgaaccggtgggtggccgaaaggtggtggaaatgttcctgaacgactggaactccattgctaggctgtatgagtgcgtgctggagtttgcaaggtccctgccagatatccccgcacacctcaacatcttttccgaggtgcgtgtctacaactatagaaagctgatcctttgctatgggacgacgaaggggagctccatctccattcagtggaatagcatacaccagaaatttcacattagtctcggcacagtcggaccgaattctggctgtagcaactgccataatacaattctgcaccagctgcaggaaatgttcaataagacccctaatgtggtacagttattgcaggtgctcttcgacacacaagccccccttaacgctatcaataagctgcccaccgttcctatgctaggactgacacaaaggacaaacacagcctaccagtgtttctccatcttgcctcagtcaagtacacatatcagattagcttttaggaacatgtactgtatagatatctactgcaggtccagaggggtggttgctataagagatggtgcttactctctgttcgataactccaagctggtggagggtttctatccagcccctggccttaaaacattcctcaatatgttcgtagatagtaaccaggacgcaaggaggaggtcggtgaacgaggacgacaaccccccgagtcccattgggggcgatatgatggactctctgatttctcaacttcagccccctccgcagcagcagcccttcccgaaacagcctggcacatcgggcgcgtaccccctcaccagcccccccacatcttaccattctactgtcaatcagagcccttctatgatgcacacccagtccccagggaatctccatgcagcgtcttctccttcaggcgcacttcgcgctccttcgcccgccagtttcgttcctacgccaccaccatcttcccacggcataagcattggtcccggagccagctttgcctccccacatggtactctcgatcctagcagcccctataccatggtctccccttcaggaagagccggaaattggcccggctcccctcaggtatctggaccctctccggcagccaggatgccaggtatgagccccgccaacccatctttgcactcaccagtgccggacgcttctcacagtcctcgagcaggtacatcttcacagactatgccaaccaacatgcctccacctaggaaactgccgcaaagatcctgggccgcaagcataccaaccatcttgactcatagcgccctgaatatcctcttactgcccagcccgactccaggccttgtccctgggttagctggttcttacctgtgttccccccttgagaggttcctggggagcgttatcatgcggcggcatctgcagaggattatccagcaggagactctgcagctgattaatagcaacgaaccgggagtgattatgttcaaaacagacgcactgaagtgccgcgttgcactctcccccaagaccaatcagacccttcagcttaaggttacccctgagaacgcaggacagtggaagcccgatgagttgcaggtattagagaagtttttcgaaacacgggtggcaggaccccccttcaaggccaataccctgatagcatttacaaaactgctaggcgccccgacccacatcctgcgggattgtgtgcatatcatgaagctcgagttgtttcctgatcaggccacacaactcaaatggaatgtgcagttctgcctcacaatcccgccctctgccccccctattgctccccccgggacacctgccgtggtactgaaaagcaagatgctgtttttcttgcagctaactcagaagaccagtgtccccccacaggaaccagtgagcattatagtgccaattatttacgacatggcatccggaaccacgcaacaggccgacatcccaaggcaacagaactcatccgtcgccgctcccatgatggtgtccaatatactcaagcggttcgcagagatgaatccgcctaggcagggcgagtgcaccatcttcgcagcagtgcgtgacttgatggccaaccttaccctgcctcccggcggtcgcccctag

SEQ ID NO: 144401 - DNA, 4365 bp, Artificial Sequence
  derived and/or modified sequence
atggcccctgtgcagctggagaaccaccagctggtgcccccaggcggcggcggcggcggcagcggcggcccccccagcgccccagcccctcctcctcctggagctgctgtggccgctgctgctgctgctgctgccagccctggctaccgcctgagcaccctgattgagttcctgctgcaccgggcctacagcgagctgatggtgctgacagacctgctgcccaggaagagtgatgtggagaggaagattgaaattgtgcagtttgccagcaggacccggcagctgtttgtgcggctgctggccctggtgaagtgggccaacaatgccggcaaggtggagaagtgtgccatgatcagcagcttcctggaccagcaggccatcctgtttgtggacacagctgaccggctggccagcctggccagagatgccctggtgcacgcccggctgcccagctttgccatcccctatgccattgatgtgctgaccaccggcagctacccccggctgcccacctgcatccgggacaagatcatccccccagaccccatcaccaagattgagaagcaggccaccctgcaccagctgaaccagatcctgcggcaccggctggtgaccacagacctgcccccccagctggccaacctgactgtggccaacggccgggtgaagttccgggtggagggggagtttgaggccaccctgactgtgatgggagatgatcctgatgtgccctggaggctgctgaagctggagatcctggtggaggacaaggagactggagatggccgggccctggtgcacagcatgcagatctccttcatccaccagctggtgcagagccggctgtttgctgatgagaagcccctgcaggacatgtacaactgcctgcacagcttctgcctgagcctgcagctggaggtgctgcacagccagaccctgatgctgatccgggagcgctggggagacctggtgcaggtggagcgctaccacgccggcaagtgcctgagcctgtctgtgtggaaccagcaggtgctgggcaggaagacaggaacagcctctgtgcacaaggtgaccatcaagattgatgaaaatgatgtgtccaagcccctgcagatcttccatgacccccccctgcctgccagtgacagcaagctggtggagcgggccatgaagattgaccacctgagcattgagaagctgctgattgacagcgtgcacgcccgggcccaccagaagctgcaggagctgaaggccatcctgcggggcttcaatgccaatgaaaacagcagcattgaaacagccctgcctgccctggtggtgcccatcctggagccctgtggcaacagcgagtgcctgcacatctttgtggacctgcacagcggcatgttccagctgatgctgtatggcctggaccaggccaccctggatgacatggagaagtctgtgaatgatgacatgaagaggatcatcccctggatccagcagctgaagttctggctgggccagcagcgctgcaagcagagcatcaagcacctgcccaccatcagcagcgagaccctgcagctgagcaactacagcacccaccccatcggcaacctgagcaagaacaagctgttcatcaagctgacccggctgccccagtactacatcgtggtggagatgctggaggtgcccaacaagcccacccagctgagctacaagtactacttcatgtctgtgaatgctgctgaccgggaggacagccctgccatggccctgctgctgcagcagttcaaggagaacatccaggacctggtgttccgcaccaagacaggcaagcagaccaggaccaatgccaagaggaagctgagtgatgacccctgccctgtggagagcaagaagaccaagagagctggggagatgtgtgccttcaacaaggtgctggcccactttgtggccatgtgtgacaccaacatgccctttgtgggcctgcggctggagctgagcaacctggagatcccccaccagggcgtgcaggtggagggagatggcttcagccacgccatccggctgctgaagatccccccctgcaagggcatcacagaggagacccagaaggccctggacaggagcctgctggactgcaccttccggctgcagggcaggaacaacagaacctgggtggccgagctggtgtttgccaactgccccctgaatggcaccagcacccgggagcagggccccagccgccacgtgtacctgacctatgagaacctgctgtctgagcctgtgggcggcaggaaggtggtggagatgttcctgaatgactggaacagcatcgcccggctgtatgaatgtgtgctggagtttgcccggagcctgcctgacatcccagcccacctgaacatcttcagcgaggtgcgggtgtacaactacaggaagctgatcctgtgctacggcaccaccaagggcagcagcatcagcatccagtggaacagcatccaccagaagttccacatcagcctgggcaccgtgggccccaacagcggctgcagcaactgccacaacaccatcctgcaccagctgcaggagatgttcaacaagacccccaacgtggtgcagctgctgcaggtgctgtttgacacccaggcccccctgaatgccatcaacaagctgcccaccgtgcccatgctgggcctgacccagaggaccaacacagcctaccagtgcttcagcatcctgccccagagcagcacccacatccggctggccttcaggaacatgtactgcatcgacatctactgccgcagccggggcgtggtggccatcagagatggagcctacagcctgtttgacaacagcaagctggtggagggcttctacccagcccctggcctgaagaccttcctgaacatgtttgtggacagcaaccaggatgccaggagaagatctgtgaatgaagatgacaacccccccagccccatcggcggggacatgatggacagcctcatcagccagctgcagcccccaccccagcagcagcccttccccaagcagcccggcaccagcggggcctaccccctgaccagcccccccaccagctaccacagcacagtgaaccagagccccagcatgatgcacacccagagccctggcaacctgcatgctgccagcagccccagcggggccctgcgggcccccagccctgccagctttgtgcccaccccaccacccagcagccacggcatcagcatcggccctggggccagctttgccagcccccacggcaccctggaccccagcagcccctacaccatggtgagccccagcggccgggccggcaactggccaggcagcccccaggtgtctggccccagccctgctgccaggatgcctggcatgagccctgccaaccccagcctgcacagccctgtgcctgatgccagccacagccccagggctggcaccagcagccagaccatgcccaccaacatgcccccacccaggaagctgccccagaggtcctgggccgccagcatccccaccatcctgacccacagcgccctgaacatcctgctgctgcccagccccaccccaggcctggtgcccggcctggccggcagctacctgtgcagccccctggagcgcttcctgggcagcgtcatcatgagaagacacctgcagaggatcatccagcaggagaccctgcagctgatcaacagcaatgaacctggggtcatcatgttcaagacagatgccctgaagtgccgggtggccctgagccccaagaccaaccagaccctgcagctgaaggtgaccccagaaaatgccggccagtggaagccagatgagctgcaggtgctggagaagttctttgagaccagggtggccggcccccccttcaaggccaacaccctcatcgccttcaccaagctgctgggcgcccccacccacatcctgcgggactgtgtgcacatcatgaagctggagctgttcccagaccaggccacccagctgaagtggaatgtgcagttctgcctgaccatccccccatctgccccacccatcgcccctcctggcaccccagctgtggtgctgaagagcaagatgctgttcttcctgcagctgacccagaagacctctgtgcccccccaggagcctgtgtccatcatcgtgcccatcatctatgacatggccagcggcaccacccagcaggccgacatcccccggcagcagaacagctctgtggccgcccccatgatggtgagcaacatcctgaagagatttgctgagatgaaccccccccggcagggcgagtgcaccatctttgctgctgtgcgggacctgatggccaacctgaccctgcccccaggcggccggccctag

SEQ ID NO: 144402 - DNA, 7984 bp, Artificial Sequence
  derived and/or modified sequence
cggcccggcggtaggcggtggcgactctgcccgctcccgtttcggcgcggtgaccgagcgcccgggaggctcgaggaccgcatcgtgtgccgttgcgccaagcccggtcctgcgccgccatggccccagtgcagctggagaaccaccagctggtcccgcccggaggcggcggcgggggcagcggcggacccccgtcagccccagcccctcctcccccgggagccgccgtggcggcggccgctgcagctgcggctagcccgggctaccggctgagcaccctcattgaatttctgctgcaccgggcctactcggagcttatggtgttgacggacctactgccaaggaaatctgatgtggaaaggaaaatagaaatagtgcagtttgctagccggacacgccaactcttcgttcgattattagctttagtgaaatgggctaataatgctggcaaagtggaaaaatgtgcgatgatttcaagctttttagatcagcaagccatcctgtttgtggacactgctgatcgcctggcctcgttagctagagatgctctggtccatgcacgcctgcctagttttgccatcccatatgccattgatgtactaactactggatcttacccacggctgccaacctgcattagggacaaaattattcctccagacccaattaccaaaattgaaaaacaagccacactccatcagctgaatcagattcttagacatcggcttgtaaccacagatcttcctcctcagttagcaaatcttacagttgcaaatggccgggtgaagtttcgtgttgaaggagaatttgaagccaccttgactgtgatgggagatgaccctgatgttccatggcgtcttctcaagctagaaattctagttgaggataaggaaacaggagatgggcgagctttggttcatagcatgcaaatcagcttcatccatcaactggtgcagtctaggctctttgctgatgagaaacctcttcaggatatgtacaactgcctacattctttctgtttatcacttcagttagaagtgttacattcccaaactctaatgttaatccgagaacggtggggagaccttgtgcaggtggaaaggtatcatgctggaaagtgcctctccctttcagtttggaatcaacaggttcttgggagaaaaactggaacagcatctgttcacaaagttacaattaaaattgatgagaatgatgtctccaagcctttacagatttttcacgatcctcctttgccagcttctgattccaaattagtagaaagagccatgaagatcgaccacttatcaatagaaaaactcctgattgacagtgtccatgcaagagctcatcagaagctccaagaactgaaggccattcttagaggcttcaatgccaatgaaaactcttccatagagactgcactcccagctcttgttgttcccatcttggagccctgtggtaattcagagtgtctgcacatttttgtagatttacattctggaatgtttcaattgatgctttatggacttgaccaggccactctggatgacatggagaagtctgtgaatgatgatatgaaacgaatcataccctggattcagcaacttaagttttggcttggacaacagcgttgcaagcagtctataaaacatctgcctacgataagcagtgaaacattgcagctttccaattactcaactcatcctattggaaacctttctaagaataaactgttcattaaacttacccgccttccacaatactacattgttgtggagatgttggaggttcccaataaacccacacaactgtcgtacaagtactactttatgtctgtgaatgctgcagatcgtgaagacagccctgcaatggcattgctgctgcagcagttcaaggaaaacattcaggacttggtttttcgtacaaaaaccgggaaacagaccagaaccaatgccaagcgcaagttgtctgatgatccatgtccagtagaatccaagaaaacaaaacgagcaggagaaatgtgtgccttcaataaagttttagcccacttcgtcgctatgtgtgatacaaatatgccatttgtaggacttcggttggagttgtccaatctggagattccacatcaaggagtgcaagtggaaggtgatggcttcagccatgcaattcgcttattaaaaattcctccctgtaagggtataactgaggaaacccaaaaggctctggaccgctctcttcttgattgcactttccgattacaaggtagaaataaccgcacttgggtagcagagttagtgtttgcaaattgtccacttaatggcacttctactagggagcaaggaccatcccggcacgtttacctgacatatgaaaatctgttgtctgagcctgttggtggtagaaaggtggttgaaatgtttcttaatgactggaatagcattgcacgattatatgagtgtgtgttggaatttgcacgttctctaccagacatacctgctcatctaaatattttctcagaagttcgtgtttataattaccgaaaacttatcttgtgttatggaaccaccaagggaagctcaattagtatccaatggaattcgatccatcaaaaattccacatttctttgggaactgttggcccaaactcaggttgcagtaactgtcacaataccattctccatcagcttcaagaaatgttcaacaaaacaccaaatgtggttcagttattacaggtactgtttgatactcaggctccattaaatgccatcaacaaactccccactgtgccgatgttgggcttgacccagagaaccaatactgcctaccagtgcttctccattctgccacagtcgtccacccacatcagactggccttcaggaacatgtattgcattgatatatactgccggagtcgaggtgttgtggcaatacgggatggtgcctatagtctttttgataacagcaaactagttgaaggtttctatcctgcaccaggactaaagacgttcctgaatatgtttgttgacagcaatcaggatgctcgaagaaggtctgtaaatgaggacgataatcccccttctcctataggaggagatatgatggattctttaatatcgcagctccagccaccaccccagcaacagccatttccaaagcagccaggaacatcaggtgcttatcctcttacttcaccccctacatcttatcatagcacagtcaatcagtctccctcaatgatgcacacacagtctccaggaaatctgcatgctgccagctcccccagtggggctttgagagccccatcaccagcgtcatttgttccaactcctcccccatcctcgcatggaatctcaataggaccaggggccagttttgctagtccacatggaactcttgaccctagttccccatacactatggtgtcaccaagtggacgagcagggaactggccaggatctcctcaagtgtctggcccctcaccagcagcacgcatgcctggaatgtcaccagccaacccctcactacattctccggttccagatgcttctcattcccctcgagctggaacaagttctcaaacaatgccaacaaacatgcctccacctcgtaaactacctcagcgctcttgggcggcatccatacctaccatcctcactcacagtgccttgaacattttactgctgccctctccaactccaggccttgtgcccggcctggcaggtagttacctttgttctccacttgagagattccttggatcagtcatcatgagacgacatcttcaaagaattattcaacaagaaacgctgcagctgataaattctaatgaacccggagtgatcatgtttaagactgatgcactgaaatgcagagtagctcttagtcccaaaaccaaccaaacgcttcagctaaaagtgacacctgaaaatgcaggacagtggaaacctgatgaacttcaagttttggagaaattctttgaaacaagagttgcaggaccaccatttaaagctaatacgttaatagccttcaccaagctattaggagctcctacacacatcctcagggattgtgtgcacattatgaagctggagctgttccctgaccaagcaacacagctaaaatggaatgttcagttttgcctgacgatccctcccagcgcgccgccgattgcacctcctgggacgcctgctgtggtgctgaaatccaaaatgctattttttcttcaactaactcagaaaacatcggtccctccccaagaacctgttagtattatagttccaatcatttatgacatggcttcaggtacaacccagcaggcagacattcccagacagcagaactcttctgttgctgctcccatgatggtcagcaacattctgaagaggtttgcagagatgaatccaccacgacaaggtgaatgcacaatatttgcagctgttcgtgatttaatggctaatcttacactgccccctggtgggcgtccatagacactattgtttttaaaccaggaaggctgacagatgagacaacaaaaaaaatctgaattcagccttcagtttaaaaaaggaaaaggactttttttttaaactttaagagctaaatattctaaactggcaaaaattttcagggtgcacttctttcatcaaaatgatcatccatcttttgtataatgaacttgtatagtgtgtttaaatgggacacatttcaaaggaaataaatcagtgtccgtttgccagtaataaatttaatattctgttttatactataaagttatgaaaatgccaaacttgtttatttaattgttttcttatgttttgggtgtaatagtccttttttggtttttgttttgttttttaaggcaggtctgtcatttttgaatactgtaaaactgtgataaactttatattgaagctgtattttaatatgaccgctttgaatccttacatgaaatgttctgggagttgttataaacacaccccaaggaagcaatatttaataaaactaggtcaaaaacaaaacaaaacagtgacactcacttgtgtgtatataaactctagagacatcttaggccctcccttcatctttaacctggtggatggagccagttattaatttataataatacatgtctgaaatttgaccaaaaacatcttctttatgtcaaggttaatatattttcttcagacattcctaacttgactagtggttaacatttagcaccttggttgtctttcaatatataggatttgggtgaaaaataaggaacttagtctttgagaagggacagtatgtggttcgtattgatcaaggatcccaaataatgcaatcattctcatctgttgaggatgtgggaacttttctgtcaggaaaatttagtttacagaatacttctgcatacaacattaattaggaaacaaagaactttaatgctgtacctctgcatgaagtttctgtgagctttctttatcttgcttaacttatcctcctttccttccccaccaaaattgggattgttctaaacaatttcaatttaattcattgtcaacaaaacgatagaatgttttgcttggaagaaacctggtccattcccctcattgtgaagaatcccgaatcctgggcctgtccagggtcaaatggagtttttggtattaatacatctctgcagggtttctttttggagcactgtgctgtctttcctagtcagtcagggacttttttaagcttcaaagaacatggtctgatgcaaaggtcttctaccgacttcatggtatttaggaaaaatttttaagtgataataccatgccgagttacctggtcactgtaatactggttctccattaaaatgtagatgctttgtctaattccacttcaagatgatttaattgagcttctataactatcaactatcaaattctagtttcaagtatctcactgtacctatatcatatctgttctcaactttgtttgattctccactcattttcaatcagagttgaagccttctttgcctttcttctttgtcttatttctgccttcatctcccacttctcacccaactctgccactgttcaggagcagttgactaaacttttatccttcctttaacttaatctttttatccttctgtttttagttcttacagtggtaatcacatcagtttggcaatctaagatgtctttatcaagggtcagcccttttctatttggagctgaatcttttctttcatgtagaaatctacatgtatatacaagaaatgtatttttatctgcaggataatattgtttcaaataattttattaagagttaactttttaggtattttcccttttaatgtggttttgaaatgttaattgcatttttacacatgatgcattcagtggacactcttttttcctaattataactcatctctgaatgcattgtgccaatcaagagtaagataggattcagtgcgcaaaatttgcttttgatgcttattaagagtaaacccatgaatttgaatttttatattatgcttggtacttggaattgatatataccttattaaagcttgaaaacatttagcatttgaatagtaagtttcatcacaaatcatgtcttttgcctcttttgttacccaggttcgatcaaggggactggatgcccaagtgattttctctaataatcgggttgggacttaactttaaggtgttttcaatgtgattttagtatttacagtaataaataaaatttatacaaagtttcagagaactaccaactctctagttaattttgatgaagatgttttcattaatagtctggtttagtattaatttaaccttgaaataagaaattggtcctgatttgccaccttcatttttccatctgctgaaatgccatttcagaatgtataaaagtactttcagaattagaagaaaagtgagagcttcagcagaacgtgtcaagtcgctaataacaggagtcgaaccttatgtttgaaaattaactgagtgagttaagtgcaagcataaactaaaatttatatgactttgaatttaagaaccactaataactgtgttctaattaacacagtaatctgttcagccaaaggatactaacagccattctttggactgtggttaatttgataacttcaagaagttataactttgctaccctggattctgatgcaatttcaatataaaaagttgttcctttcatagtttttccccccaaaagaagtgcctattacattttaccttaatgtttatttatcatccaagtgttcttgatataaaatcagtatacagaaaattttaagagaacttacattcaagggacatagagggaaaatgttaatgtgtatttcattgtttcttgtggaatttttttttcattcggtttgagaatggacagtgtgtctaaggatgtgatttaaatttacttaggatggatttagcattgaggttattaagacaaagttagcagaggccagccagcactgtgctgcacaactccaggaactccatggtatgctcacaattttctgcaagttgcctccacttccaagtggccagtgatttgttaaaataccttgcccaagaatataactgattgatgaaagggcatatttaggtcaatataaaataatagcaagtatttactgagagcttactgtgtgctaggcattttcttaatatttcaatgtgtatttaatcctcacaacaacccaatgtggtaggttattgatatcctcttcttaaaaatgagtaaatggaggcccagagaaatgtaatttgcctgagatcaaattaaggttgcttaagatcaaactgctaagaaggggcagtttgagtctgagctagtgctcctaaacactggacatttttgctgtgaaccacagtcgggaaggtttaatgtttagactctttcctcagaggcttttaactacacacaattttgacatgttttccaagctcagaaagctcattaaaaacaactaaaactg

SEQ ID NO: 144403 - DNA, 4365 bp, Artificial Sequence
  derived and/or modified sequence
atggcccccgtgcagctggagaaccaccagctggtgccccccggcggcggaggaggcggttcaggtggccctccttccgcccccgctccccccccccccggtgctgccgtggccgccgccgctgccgccgcagctagccccggctaccgcctgtccactctcatagaattcttgcttcaccgtgcatacagcgagcttatggtcctgaccgatcttctccccaggaagtccgacgttgaacgtaagatagaaatcgtgcagttcgcctcccgcacaaggcaacttttcgtgcgactcttggccctggtcaaatgggctaataacgcagggaaagttgagaaatgtgctatgatctcgtctttcctcgaccagcaggcaatcctgtttgtcgacaccgccgatcggctggcctctttggctagggacgcactcgtccacgctcgcctgccttcatttgcgattccctatgcaatagacgtgctcacaacaggaagctatcctagactgcctacctgtatacgagacaagatcatccccccagatcctatcaccaaaatcgaaaagcaggccaccctccatcagttaaatcaaatcctgagacatcggctagtcactacagacctgcccccccaactcgccaatctcacagttgcgaatgggcgagtcaagttccgagttgagggagaatttgaggccacgcttactgtaatgggcgacgatccagatgtcccatggaggctgctgaagcttgagattctggttgaggacaaggagactggggacggacgcgcgcttgtccattcaatgcaaatctcgttcatccaccaattagtgcaatcacgtctgtttgcagacgaaaaaccccttcaggacatgtacaattgcctacactccttctgcctctccttgcagctcgaggtactgcattctcagacattgatgctgatccgagagaggtggggggacttggtccaggtggaacggtaccacgccggaaaatgcttatcattatctgtatggaaccagcaagtcctggggcggaagacgggaacagcgtcagtgcataaagtgaccattaagatcgacgaaaacgatgtttcaaaacccctccaaatcttccacgaccctcccctcccagcttcagactccaagctggtcgaaagagcaatgaaaatcgaccacttgagcattgaaaagctgttgatcgattccgtgcatgcacgggcccaccagaagctccaggagttaaaggccattttgagaggattcaatgctaacgagaattccagtattgagacagcattacctgcactggttgtcccaatactcgaaccttgtggtaactccgagtgtcttcatatttttgttgacctgcactcaggaatgttccagctaatgctgtacggcctggaccaggcaaccctggacgatatggaaaaatccgtcaacgatgacatgaagagaatcattccatggatccaacaactaaagttctggctcgggcagcagagatgtaaacagagcatcaaacatcttcctaccatttcgtcagaaactttgcagctgtctaactactccactcatccaattggcaatctcagtaagaacaaactgtttatcaaactaactagactgccgcagtactatattgtggtagagatgttggaagtgccaaataagcctacccagttgtcctacaaatattactttatgagtgtaaatgccgccgaccgcgaagacagtcctgcaatggccctccttctccagcagttcaaagaaaacatccaggacttggtattcaggaccaagactggtaaacaaacgcgaacaaacgcaaagaggaaactctcagacgacccctgccctgtggaaagtaaaaaaactaagagggctggtgaaatgtgtgcctttaacaaggtgctggctcactttgtcgccatgtgcgacacgaatatgcctttcgtgggcttgaggcttgagctgtcgaatctggaaattccccatcagggggtacaggtggagggagacggcttcagtcatgccattagactgctgaaaattcccccttgtaaaggaattactgaggaaacccaaaaggcgcttgacagatccctgttagattgtacttttcgtcttcaggggcggaacaatcggacttgggttgcagagctggtgttcgccaattgtccactgaatggcactagtactagagagcaagggccttcaagacacgtgtatcttacctatgaaaacctgctaagcgaaccagtgggcggccggaaagtcgttgaaatgtttttaaatgactggaactctatcgcgcgtttgtatgagtgtgtgcttgagtttgcaagatccctccccgatattccagcacatttaaacatcttcagtgaagtccgggtgtacaattacagaaaactcatcctctgttatggtacgacaaagggctcttcgatctcgatccagtggaatagtattcaccagaagtttcatatctctttagggacagtgggacccaactcaggctgcagcaactgccacaacaccatcttacaccaactccaagaaatgtttaataagacacccaatgtcgtgcagttactacaggtgctatttgacacgcaggcccccctgaatgccatcaacaagctgcctacagtgcctatgctcgggttgactcaaaggaccaacaccgcatatcagtgcttcagtattctgccccagtcttctacacatatcaggctggcattccgaaacatgtattgtattgatatttattgtcgttcacggggagttgtagcaatccgggacggcgcctacagtctttttgacaacagtaagctagttgagggcttctaccctgccccagggttaaaaacctttctgaacatgtttgtggacagcaaccaagacgctaggaggaggagcgttaacgaagatgacaaccccccctctccgatcggaggagacatgatggactcactgatttctcagctgcaaccaccccctcagcagcagccctttcctaagcagcctggaacttcgggagcctatcccttaacgtcaccaccaacgtcataccactcgaccgtcaatcagagcccctcaatgatgcatactcagtctccaggaaacctgcatgctgcctcctccccctcaggtgccctgcgagcgccgtccccggcttcattcgtcccaaccccgcccccatccagccatggcatcagtatcggcccaggcgcctcatttgcatcgccacacggcactcttgatccttcctcaccgtataccatggtgtccccttcgggacgggccggaaactggcctgggagtccacaggtgtctgggccctcccctgctgcaaggatgcctggtatgtcacccgccaacccttccctgcactctccggtaccagacgcaagccactcacctagagcgggcacgtctagccagactatgcctacaaacatgccaccccctcggaagcttccgcagcgctcttgggctgctagtatcccgaccatcctgacacattcggcacttaatattctgctactgccctccccgacaccaggccttgtgcccggactcgccggctcctacctgtgctcacccttggaacgcttcctcgggtccgtcattatgcggcggcatctccagagaattattcagcaggagacactacagctgattaattctaatgagccgggcgtgatcatgttcaagaccgacgcccttaagtgcagagtggcgctttctcccaagacaaaccagaccttacagttgaaagtgacccccgagaatgccggccagtggaagcccgacgagctgcaggtgctcgagaagttcttcgagactcgtgtggcaggcccaccatttaaggccaacacattaatcgcctttaccaagttactgggagcccccacacatatcttgagagattgcgtccatataatgaagctcgagctttttccagaccaggccactcagcttaaatggaatgtgcaattctgtctcacaattccccccagtgctccacccattgccccacctgggacacctgccgtcgtgctgaaaagcaagatgttatttttcctccagctcacgcagaagacctcagtgccacctcaggagccagtatcaattatcgtgccgatcatctatgatatggcttccggtactacccagcaagcggacataccacgtcagcagaactcctccgtcgcagctccaatgatggtgagtaatattttaaaacgcttcgctgagatgaatcctccccggcagggcgaatgtacaatctttgccgcagtccgcgacctcatggccaatctgaccctaccccccgggggcaggccctag

SEQ ID NO: 144404 - DNA, 4365 bp, Artificial Sequence
  derived and/or modified sequence
atggcacctgtacagctcgagaatcaccaactggtgccgccagggggtggcggtggcggatcaggagggccaccaagcgcacctgcccctcccccaccaggcgcagcggtcgccgcagctgctgcggctgccgcatcacctggataccgcctatctaccctcattgagtttctcctgcatcgcgcatattctgagctcatggtgttaacagacctactcccacggaagagcgacgtggagcgaaagatcgagatagttcaattcgccagtagaaccagacagcttttcgtgcgtctattggcgcttgtcaaatgggccaacaatgcagggaaagtggaaaagtgtgctatgataagcagcttcctggatcaacaggccattctgttcgttgataccgctgatcgcttggcctcgctagccagggatgccctggtacacgctcggctgccatctttcgccataccctatgccatcgatgtgctgaccactggatcttatccccgactgcccacctgcatacgcgacaagatcattcctcccgatccgattaccaagatcgaaaaacaggccaccctccatcagttgaatcaaatcttacgtcacagactggttacgactgacctcccaccacaactagccaacctgaccgtggcaaatggacgagtgaaattccgcgtcgagggagagtttgaggccacccttaccgtcatgggggacgatcctgatgtgccatggagactgttgaagctggaaatcctggtcgaggacaaggagacaggcgacggcagagctctggtccatagtatgcaaataagttttatacatcagctcgtgcagagtcgactgtttgcagacgagaagcctctgcaggatatgtacaattgcctgcacagcttctgtctttcacttcaactcgaagtactccatagtcaaacactcatgctgatccgggagagatggggcgatttagtccaggtggaaagataccacgccggaaaatgtctttccctcagcgtatggaaccagcaggtgcttggcagaaaaaccgggaccgcctccgtgcataaagtcactatcaaaatcgacgaaaatgacgtgagcaagcctttgcaaatattccatgatccgcctctgccagctagcgactcaaagcttgttgaaagggctatgaagattgaccacctgtccatagaaaagctgctgatcgactccgttcacgctagagcgcaccagaaactgcaggagttgaaggctatcctgagaggatttaatgccaacgaaaactcctcaattgagactgccctgcccgcacttgtggtgcctatactcgagccgtgcggcaattcagaatgtctgcatatatttgttgatctccatagtggtatgtttcagctgatgctttacggacttgatcaggctaccctggatgatatggaaaagagcgtgaacgatgatatgaagcgcatcataccctggattcagcagctcaagttctggcttggacagcagagatgcaaacagagcattaaacacctgccaacaatttcctcagaaactctgcagctctccaactactccacgcaccctatcgggaacctgtctaaaaataagctgtttataaagttgactcgactgccacaatactacatcgtcgttgagatgctcgaggtgcctaacaaacctacgcagctgagctataagtactatttcatgtccgtaaacgctgcagacagagaggattcaccggcaatggccctcctgttacagcagtttaaagaaaatattcaggacctggtattcagaactaaaacaggcaagcagacaagaacgaatgccaaaagaaaactcagtgacgatccatgtcctgtggaatccaagaagaccaaacgtgcaggcgagatgtgtgcattcaataaagttctcgctcactttgtcgcaatgtgcgataccaatatgccgttcgtcggcctgaggttggaactgtctaatctggagattccccatcagggcgttcaagtggaaggtgatggttttagccacgccatccgcctattaaagattcccccatgcaaaggcatcactgaggaaacccagaaagcactagatcggtcacttctggattgtacatttcgtctgcagggtagaaataacagaacctgggtggccgaactggtcttcgctaactgtcccctgaacgggaccagcacaagagaacagggcccatctagacatgtctacctaacatatgagaacctgctctcggaaccggttggaggcagaaaagtggttgagatgttcctcaacgactggaactctatagccagactttatgaatgcgtgctggaatttgctcggagcctgcctgacatcccggcacatcttaacatcttttcagaagtgcgcgtgtataattatcggaaactcattttatgttatgggacaaccaaggggagttctatctcaatacagtggaacagtattcatcagaagttccatattagcctgggtactgtcgggccaaacagcggatgcagtaactgtcataacactatccttcatcaactgcaggagatgttcaacaaaactccgaacgtggtgcaactgctgcaggtcctgttcgatacgcaggccccactcaacgccatcaataagctgccaaccgtccccatgttagggctgactcagaggaccaatactgcataccagtgcttctcgattctcccgcagtcaagcacacatatacggttggcatttcgcaacatgtattgcatcgatatctattgtcgaagccgcggagtggtcgccatccgcgacggagcctactccctgttcgacaatagtaaactggtggaaggattttacccggctccgggtcttaagactttcttgaacatgtttgtcgattcaaatcaagacgctagacgaaggtcggtgaacgaggatgacaaccctcccagtcctatcggaggcgacatgatggacagcctcattagccagctccaaccccctccacagcagcagcccttccccaagcaaccgggtacaagcggggcttacccccttacatcaccacccacttcctaccatagcacagtcaatcagtccccaagcatgatgcacacccagtccccaggaaacttgcacgcggcaagcagcccttctggtgctcttagggctccctcccccgcatcttttgtcccgacccctccgccatcatctcacggtatcagtattggaccaggagcatcttttgcaagcccccacgggacactcgatccttcctccccttacaccatggtctcacctagtggcagagctgggaactggcccggatcacctcaagtgagcgggccatcacctgccgcacgaatgccaggcatgtcaccagcgaatcccagtttacatagtcctgtcccagatgcttcgcattcccctagggcaggtaccagctcccagaccatgccaaccaatatgccgcctcctcgcaaattgccacagcggagctgggccgcaagcatccctactattctcacccatagcgctctcaacatccttctgctgccttctcccacccccggtctcgttcccggtctggccggatcatacttgtgcagcccgttggagaggttcctgggtagcgtcattatgcgacgccatcttcagagaatcatccagcaggagacactgcagttgattaacagcaatgaacccggtgttatcatgttcaaaacagatgcccttaagtgccgggttgccctgtcccctaaaactaatcagaccttgcagttgaaggtcaccccggaaaacgcaggacagtggaaacccgatgaactccaggtcctcgagaagttcttcgaaaccagagtggctggacccccttttaaggccaacaccttgatcgcttttactaaactgctcggcgctccgacgcatatcctccgcgactgtgtacatattatgaagttggaactgttcccggatcaggccactcagttaaagtggaatgtgcagttttgcctgaccattcctcctagcgcaccccctatagcaccccctggcaccccggcagtggtgttgaagtctaagatgctgttcttcctgcagttgacacaaaagacatcggtgccccctcaggaacccgtgtccatcattgtgcctattatatatgacatggccagtgggactacccagcaagcagacatccccaggcaacagaattcatctgtggctgcgcctatgatggtatccaatatactaaaacggttcgcggaaatgaaccccccaaggcagggggagtgcaccatcttcgccgctgtgagggatctaatggctaacctcacactgccgcctggtggaaggccgtag

SEQ ID NO: 144405 - DNA, 4365 bp, Artificial Sequence
  derived and/or modified sequence
atggcccccgtgcagctggagaaccaccagctggtgccccccggcggcggcggcggcggcagcggcggcccccccagcgcccccgccccccccccccccggcgccgccgtggccgccgccgccgccgccgccgccagccccggctacagactgagcaccctgatcgagttcctgctgcacagagcctacagcgagctgatggtgctgaccgacctgctgcccagaaagagcgacgtggagagaaagatcgagatcgtgcagttcgccagcagaaccagacagctgttcgtgagactgctggccctggtgaagtgggccaacaacgccggcaaggtggagaagtgcgccatgatcagcagcttcctggaccagcaggccatcctgttcgtggacaccgccgacagactggccagcctggccagagacgccctggtgcacgccagactgcccagcttcgccatcccctacgccatcgacgtgctgaccaccggcagctaccccagactgcccacctgcatcagagacaagatcatcccccccgaccccatcaccaagatcgagaagcaggccaccctgcaccagctgaaccagatcctgagacacagactggtgaccaccgacctgcccccccagctggccaacctgaccgtggccaacggcagagtgaagttcagagtggagggcgagttcgaggccaccctgaccgtgatgggcgacgaccccgacgtgccctggagactgctgaagctggagatcctggtggaggacaaggagaccggcgacggcagagccctggtgcacagcatgcagatcagcttcatccaccagctggtgcagagcagactgttcgccgacgagaagcccctgcaggacatgtacaactgcctgcacagcttctgcctgagcctgcagctggaggtgctgcacagccagaccctgatgctgatcagagagagatggggcgacctggtgcaggtggagagataccacgccggcaagtgcctgagcctgagcgtgtggaaccagcaggtgctgggcagaaagaccggcaccgccagcgtgcacaaggtgaccatcaagatcgacgagaacgacgtgagcaagcccctgcagatcttccacgacccccccctgcccgccagcgacagcaagctggtggagagagccatgaagatcgaccacctgagcatcgagaagctgctgatcgacagcgtgcacgccagagcccaccagaagctgcaggagctgaaggccatcctgagaggcttcaacgccaacgagaacagcagcatcgagaccgccctgcccgccctggtggtgcccatcctggagccctgcggcaacagcgagtgcctgcacatcttcgtggacctgcacagcggcatgttccagctgatgctgtacggcctggaccaggccaccctggacgacatggagaagagcgtgaacgacgacatgaagagaatcatcccctggatccagcagctgaagttctggctgggccagcagagatgcaagcagagcatcaagcacctgcccaccatcagcagcgagaccctgcagctgagcaactacagcacccaccccatcggcaacctgagcaagaacaagctgttcatcaagctgaccagactgccccagtactacatcgtggtggagatgctggaggtgcccaacaagcccacccagctgagctacaagtactacttcatgagcgtgaacgccgccgacagagaggacagccccgccatggccctgctgctgcagcagttcaaggagaacatccaggacctggtgttcagaaccaagaccggcaagcagaccagaaccaacgccaagagaaagctgagcgacgacccctgccccgtggagagcaagaagaccaagagagccggcgagatgtgcgccttcaacaaggtgctggcccacttcgtggccatgtgcgacaccaacatgcccttcgtgggcctgagactggagctgagcaacctggagatcccccaccagggcgtgcaggtggagggcgacggcttcagccacgccatcagactgctgaagatccccccctgcaagggcatcaccgaggagacccagaaggccctggacagaagcctgctggactgcaccttcagactgcagggcagaaacaacagaacctgggtggccgagctggtgttcgccaactgccccctgaacggcaccagcaccagagagcagggccccagcagacacgtgtacctgacctacgagaacctgctgagcgagcccgtgggcggcagaaaggtggtggagatgttcctgaacgactggaacagcatcgccagactgtacgagtgcgtgctggagttcgccagaagcctgcccgacatccccgcccacctgaacatcttcagcgaggtgagagtgtacaactacagaaagctgatcctgtgctacggcaccaccaagggcagcagcatcagcatccagtggaacagcatccaccagaagttccacatcagcctgggcaccgtgggccccaacagcggctgcagcaactgccacaacaccatcctgcaccagctgcaggagatgttcaacaagacccccaacgtggtgcagctgctgcaggtgctgttcgacacccaggcccccctgaacgccatcaacaagctgcccaccgtgcccatgctgggcctgacccagagaaccaacaccgcctaccagtgcttcagcatcctgccccagagcagcacccacatcagactggccttcagaaacatgtactgcatcgacatctactgcagaagcagaggcgtggtggccatcagagacggcgcctacagcctgttcgacaacagcaagctggtggagggcttctaccccgcccccggcctgaagaccttcctgaacatgttcgtggacagcaaccaggacgccagaagaagaagcgtgaacgaggacgacaacccccccagccccatcggcggcgacatgatggacagcctgatcagccagctgcagccccccccccagcagcagcccttccccaagcagcccggcaccagcggcgcctaccccctgaccagcccccccaccagctaccacagcaccgtgaaccagagccccagcatgatgcacacccagagccccggcaacctgcacgccgccagcagccccagcggcgccctgagagcccccagccccgccagcttcgtgcccacccccccccccagcagccacggcatcagcatcggccccggcgccagcttcgccagcccccacggcaccctggaccccagcagcccctacaccatggtgagccccagcggcagagccggcaactggcccggcagcccccaggtgagcggccccagccccgccgccagaatgcccggcatgagccccgccaaccccagcctgcacagccccgtgcccgacgccagccacagccccagagccggcaccagcagccagaccatgcccaccaacatgcccccccccagaaagctgccccagagaagctgggccgccagcatccccaccatcctgacccacagcgccctgaacatcctgctgctgcccagccccacccccggcctggtgcccggcctggccggcagctacctgtgcagccccctggagagattcctgggcagcgtgatcatgagaagacacctgcagagaatcatccagcaggagaccctgcagctgatcaacagcaacgagcccggcgtgatcatgttcaagaccgacgccctgaagtgcagagtggccctgagccccaagaccaaccagaccctgcagctgaaggtgacccccgagaacgccggccagtggaagcccgacgagctgcaggtgctggagaagttcttcgagaccagagtggccggcccccccttcaaggccaacaccctgatcgccttcaccaagctgctgggcgcccccacccacatcctgagagactgcgtgcacatcatgaagctggagctgttccccgaccaggccacccagctgaagtggaacgtgcagttctgcctgaccatcccccccagcgccccccccatcgccccccccggcacccccgccgtggtgctgaagagcaagatgctgttcttcctgcagctgacccagaagaccagcgtgcccccccaggagcccgtgagcatcatcgtgcccatcatctacgacatggccagcggcaccacccagcaggccgacatccccagacagcagaacagcagcgtggccgcccccatgatggtgagcaacatcctgaagagattcgccgagatgaacccccccagacagggcgagtgcaccatcttcgccgccgtgagagacctgatggccaacctgaccctgccccccggcggcagaccctag

SEQ ID NO: 144406 - protein, 353 aa, Artificial Sequence
  derived and/or modified sequence
MGSLYSEYLNPNKVQEHYNYTKETLETQETTSRQVASAFIVILCCAIVVENLLVLIAVARNSKFHSAMYLFLGNLAASDLLAGVAFVANTLLSGSVTLRLTPVQWFAREGSAFITLSASVFSLLAIAIERHVAIAKVKLYGSDKSCRMLLLIGASWLISLVLGGLPILGWNCLGHLEACSTVLPLYAKHYVLCVVTIFSIILLAIVALYVRIYCVVRSSHADMAAPQTLALLKTVTIVLGVFIVCWLPAFSILLLDYACPVHSCPILYKAHYFFAVSTLNSLLNPVIYTWRSRDLRREVLRPLQCWRPGVGVQGRRRGGTPGHHLLPLRSSSSLERGMHMPTSPTFLEGNTVV

SEQ ID NO: 144407 - DNA, 1062 bp, Artificial Sequence
  derived and/or modified sequence
atgggcagcctgtacagcgagtacctgaaccccaacaaggtgcaggagcactacaactacaccaaggagaccctggagacccaggagaccaccagcagacaggtggccagcgccttcatcgtgatcctgtgctgcgccatcgtggtggagaacctgctggtgctgatcgccgtggccagaaacagcaagttccacagcgccatgtacctgttcctgggcaacctggccgccagcgacctgctggccggcgtggccttcgtggccaacaccctgctgagcggcagcgtgaccctgagactgacccccgtgcagtggttcgccagagagggcagcgccttcatcaccctgagcgccagcgtgttcagcctgctggccatcgccatcgagagacacgtggccatcgccaaggtgaagctgtacggcagcgacaagagctgcagaatgctgctgctgatcggcgccagctggctgatcagcctggtgctgggcggcctgcccatcctgggctggaactgcctgggccacctggaggcctgcagcaccgtgctgcccctgtacgccaagcactacgtgctgtgcgtggtgaccatcttcagcatcatcctgctggccatcgtggccctgtacgtgagaatctactgcgtggtgagaagcagccacgccgacatggccgccccccagaccctggccctgctgaagaccgtgaccatcgtgctgggcgtgttcatcgtgtgctggctgcccgccttcagcatcctgctgctggactacgcctgccccgtgcacagctgccccatcctgtacaaggcccactacttcttcgccgtgagcaccctgaacagcctgctgaaccccgtgatctacacctggagaagcagagacctgagaagagaggtgctgagacccctgcagtgctggagacccggcgtgggcgtgcagggcagaagaagaggcggcacccccggccaccacctgctgcccctgagaagcagcagcagcctggagagaggcatgcacatgcccaccagccccaccttcctggagggcaacaccgtggtgtag

SEQ ID NO: 144408 - DNA, 1062 bp, Artificial Sequence
  derived and/or modified sequence
atggggagcctgtattcagagtacttgaaccccaacaaggtccaggagcattacaactacactaaggagaccctggaaactcaggaaacaactagccgccaggtcgcctcagcgtttatcgtaatcttgtgttgtgctatcgtagtggagaatctgcttgtgcttattgctgtggcccggaattccaagttccactctgcaatgtacttgttccttggcaacttggcagcatctgacctgctggccggagtagccttcgtggccaacacactgctgagtggttcagttaccctccggctgactccagtccagtggtttgcgcgtgagggatctgcctttattaccctctcagcttctgtatttagtctcctggcaattgcaatagaacggcacgttgcaatcgccaaagtcaagctgtatgggagtgacaaatcttgcaggatgctactgctgataggtgcctcatggcttatttcactagtcctgggcggattgcctatcctggggtggaactgtctgggccatctggaagcatgctctactgtcctgcccctctatgcaaaacactatgtgctctgcgtcgtcaccatattctcaattatcctcctggctatcgtcgcgctgtatgtgcgaatctattgcgtcgtgaggtcgagccacgccgatatggcggctccacagactttggccctcctgaagacggtcaccattgtcctaggagtgtttatcgtttgctggttgcccgcttttagtatacttctgctcgactatgcctgtcctgtgcacagctgtcccatcctatacaaggcccattactttttcgctgtcagcaccctaaactctttattaaaccctgtaatttatacatggcggtcgagggaccttcgccgcgaggtcctcaggcccctccagtgttggaggcctggggtaggagtccaggggaggaggcggggcggcacaccaggccaccacttactccctctgcgaagctctagttccctggagcggggtatgcacatgccaacaagcccaacatttctagagggaaacacagtggtttag

SEQ ID NO: 144409 - DNA, 1062 bp, Artificial Sequence
  derived and/or modified sequence
atgggcagcctgtacagcgagtacctgaaccccaacaaggtgcaggagcactacaactacaccaaggagaccctggagacccaggagaccaccagccggcaggtggccagcgccttcatcgtcatcctgtgctgtgccatcgtggtggagaacctgctggtgctgattgctgtggccaggaacagcaagttccacagcgccatgtacctgttcctgggcaacctggccgccagtgacctgctggccggcgtggcctttgtggccaacaccctgctgagcggctctgtgaccctgcggctgacccctgtgcagtggtttgcccgggagggcagcgccttcatcaccctgagcgcctctgtgttcagcctgctggccatcgccatcgagagacatgtggccatcgccaaggtgaagctgtatggcagtgacaagagctgcaggatgctgctgctgattggagcctcctggctgatcagcctggtgctgggcggcctgcccatcctgggctggaactgcctgggccacctggaggcctgcagcacagtgctgcccctgtatgccaagcactacgtgctgtgtgtggtgaccatcttcagcatcatcctgctggccatcgtggccctgtatgtgcgcatctactgtgtggtgcgcagcagccatgctgacatggccgccccccagaccctggccctgctgaagacagtgaccatcgtgctgggcgtcttcatcgtgtgctggctgcctgccttcagcatcctgctgctggactatgcctgccctgtgcacagctgccccatcctgtacaaggcccactacttctttgctgtgtccaccctgaacagcctgctgaaccctgtgatctacacctggaggagccgggacctgcggcgggaggtgctgcggcccctgcagtgctggaggcctggggtgggcgtgcagggcagaagaagaggaggcaccccaggccaccacctgctgcccctgcggagcagcagcagcctggagcggggcatgcacatgcccaccagccccaccttcctggagggcaacacagtggtgtag

SEQ ID NO: 144410 - DNA, 1062 bp, Artificial Sequence
  derived and/or modified sequence
atgggcagcctgtacagcgagtacctgaaccccaacaaggtgcaggaacattataattacactaaggagaccctggagactcaggagacaacttctcgtcaggtggcgtctgcgtttattgtaatcctgtgctgcgctatagtcgtagaaaacctgctggtcctgatcgccgtagctaggaattcaaaatttcattccgctatgtacctcttcttgggtaaccttgccgcctctgacctgctggcaggagtggctttcgtggccaatacattactgtctggttctgtcacgttgcgtttgactcctgtccagtggtttgcccgggaggggtccgctttcatcactctgtccgccagcgtcttttctctgctggccatcgctatcgaacgccacgtggccattgcgaaggtaaagctctatggaagtgataaatcttgccggatgctgctgttaatcggtgcctcgtggctgattagtctggtgctcggcggactgccaatcctgggctggaattgcctgggccatctagaggcctgctccactgtattgccattgtatgcaaagcactacgtgctgtgcgtggtgactatcttctcaatcattctgctcgcaatcgtggccctctatgtgcgaatttattgtgtcgtgaggtcttcacatgccgatatggccgccccccaaactctagccctgctcaaaacagtgacaatcgtactgggagtgttcatcgtatgctggctccccgccttcagcatcctgctgttagactacgcctgcccagttcacagttgccctatcctctataaggcccattacttcttcgcagtcagcacactgaactcactgctgaatccagtgatctacacatggagaagtagagatttgagaagggaggttctcaggcctctgcaatgttggagacccggagttggggtgcaggggcgtaggaggggcggcacccctggccaccatctcctcccgttgaggagttcctctagcctggaacgcggaatgcacatgcccacgtccccaacctttctagagggaaacacagtggtctag

SEQ ID NO: 144411 - DNA, 1062 bp, Artificial Sequence
  derived and/or modified sequence
atgggatctttgtattcagagtacctgaatccaaataaggtgcaggagcactataattatactaaggaaacgctggagacacaggaaaccacatcgaggcaggtcgcctcagcatttatcgttatcttatgctgcgccattgtggtcgaaaacctgctggtcctgatcgccgttgctcgtaattcaaagtttcattccgccatgtaccttttcttgggcaacctcgcagcctccgacctcctcgccggagtggcatttgtggcaaacaccttgctatccggctcagtgacactgagactgactcccgtgcagtggttcgcccgagaaggttcagctttcattaccttgtccgcttctgtcttttccctcctggccatcgccattgaacggcatgtggcgattgcaaaggtcaaattatacggctcagacaagtcctgcaggatgctgctgctgatcggtgcttcctggctaatcagtctcgtccttggcggactgcctatcttgggctggaactgtctcgggcatctggaagcctgttcaacagtcctgccactctacgcgaaacattatgttctgtgcgtggtcaccatcttcagcataatcctgctggccatcgtagctctgtacgtacgtatctactgtgtggttagaagtagccatgcggacatggccgcacctcagactctggccctcttgaagacggtgacaatcgtgctgggggtgtttatagtgtgctggttgcccgctttctcaatcctgctgcttgattatgcttgtcccgtgcactcgtgtcctattctgtataaagcgcattattttttcgcagtatccaccttgaactcactgcttaacccagtgatctatacatggagaagtcgcgatctgaggagagaggtgctgcggccactgcagtgttggagacccggagttggagtgcagggaaggagacgcggagggacccctggccaccatctgctgcccctgcggagctcatcttcgttagaaaggggaatgcatatgcccactagccccacatttctagaagggaataccgtggtttag

SEQ ID NO: 144412 - DNA, 1173 bp, Artificial Sequence
  derived and/or modified sequence
cggccgccctggggacgcagacgccaaggcccctccggccagggccgggagccgggccggcctagccagttctgaaagccccatggccccagcaggcctctgagccccaccatgggcagcttgtactcggagtacctgaaccccaacaaggtccaggaacactataattataccaaggagacgctggaaacgcaggagacgacctcccgccaggtggcctcggccttcatcgtcatcctctgttgcgccattgtggtggaaaaccttctggtgctcattgcggtggcccgaaacagcaagttccactcggcaatgtacctgtttctgggcaacctggccgcctccgatctactggcaggcgtggccttcgtagccaataccttgctctctggctctgtcacgctgaggctgacgcctgtgcagtggtttgcccgggagggctctgccttcatcacgctctcggcctctgtcttcagcctcctggccatcgccattgagcgccacgtggccattgccaaggtcaagctgtatggcagcgacaagagctgccgcatgcttctgctcatcggggcctcgtggctcatctcgctggtcctcggtggcctgcccatccttggctggaactgcctgggccacctcgaggcctgctccactgtcctgcctctctacgccaagcattatgtgctgtgcgtggtgaccatcttctccatcatcctgttggccatcgtggccctgtacgtgcgcatctactgcgtggtccgctcaagccacgctgacatggccgccccgcagacgctagccctgctcaagacggtcaccatcgtgctaggcgtctttatcgtctgctggctgcccgccttcagcatcctccttctggactatgcctgtcccgtccactcctgcccgatcctctacaaagcccactactttttcgccgtctccaccctgaattccctgctcaaccccgtcatctacacgtggcgcagccgggacctgcggcgggaggtgcttcggccgctgcagtgctggaggccgggggtgggggtgcaaggacggaggcggggcgggaccccgggccaccacctcctgccactccgcagctccagctccctggagaggggcatgcacatgcccacgtcacccacgtttctggagggcaacacggtggtctga

SEQ ID NO: 144413 - DNA, 1062 bp, Artificial Sequence
  derived and/or modified sequence
atgggcagcctctattccgaatacttgaaccccaataaagtgcaggaacattataactacactaaagagactctggaaacccaagagactacatccagacaggtggcttcagcgtttatcgtgatcctgtgttgcgccatcgtggttgaaaatctgcttgtgctgatagctgtggcaagaaactcaaagttccattctgcgatgtatctctttctaggtaatctggcagctagtgatctcttggcaggcgtggcctttgtggccaacactctgctctcaggaagcgtcactctacgtctaacgccagttcagtggtttgcgcgggaaggtagcgcctttatcacccttagtgcctccgtgtttagccttctggctattgcaatcgagagacacgtggccatcgcaaaggttaaactatatggatcagataagagttgcagaatgctgctgctgatcggcgcatcgtggttaatatccctagtgctgggggggctccccatcttgggttggaactgcctgggccacttagaggcatgcagtaccgtgctccctctgtacgcaaaacactacgtcctgtgtgttgtcactatattcagtatcatattactggctatcgtggccctatacgtgaggatctactgcgtcgtgaggtcctcacatgccgatatggccgctcctcagactcttgccctgctcaaaacagtgacgatcgtactgggagtgtttatcgtatgctggttacctgcgttttccatcctgctgctagattacgcctgtcccgtgcatagttgtccgatactctataaagcccattactttttcgccgtctcaacactgaactccctcctgaatcctgtgatctacacctggcgcagcagagacctgagaagagaagttctgagaccgctgcagtgctggagaccaggtgtgggcgtgcaagggcggcgccggggaggaacaccaggccatcatctgctgcccctccgatccagctcatctctcgaacgcggaatgcacatgccaacttctccaacctttctggaaggtaatactgtcgtatag

SEQ ID NO: 144414 - DNA, 1062 bp, Artificial Sequence
  derived and/or modified sequence
atgggcagcctgtacagcgagtacctgaaccccaacaaggtgcaggagcattacaactataccaaggaaactctggaaactcaagagaccacctctcgccaggtggcttctgctttcattgtcattctctgttgtgcaattgtggtggaaaatctcctggtcttaattgccgtggctagaaacagcaagttccatagtgccatgtatttgttcttaggcaacttggctgcctctgatcttttagccggggtggcctttgtggccaataccctgctatcaggctccgttacactcaggctgacaccggtgcagtggtttgccagagagggctctgctttcattactcttagcgcatctgttttttccctcctcgcaattgccattgagagacacgtggcaatcgcaaaagtgaaactctacggcagcgacaagtcgtgtcggatgcttttactgattggtgctagctggttaatcagtctggtcttgggcggactgcccatacttgggtggaactgcctgggccatctggaggcgtgctccacagtcctgcccctctacgctaagcattacgtcctttgcgtcgtgacaattttctctataatcttactcgcaatcgtggcactgtatgtgagaatatactgcgtagtcaggtctagccacgccgacatggcagcaccccagactctggcactactcaaaaccgtcaccatcgttctgggcgtatttattgtctgctggctccccgccttttcaatcctattactcgattatgcttgcccagtccatagttgtcctatcttgtacaaggcccattacttttttgctgtaagcacccttaattcgctcttgaacccggtcatctacacctggcggtcgcgggatctgcggagggaggtgctgcggcctctgcagtgctggaggccaggcgtcggcgtccagggaagacggcgaggcggcacaccaggacaccatctgctacctttaaggtccagcagtagcctggagcggggcatgcacatgccgacctccccaacttttctcgaagggaatactgtggtgtag

SEQ ID NO: 144415 - DNA, 1062 bp, Artificial Sequence
  derived and/or modified sequence
atgggttcactctatagcgagtacctgaatccaaacaaggttcaggagcattataactacacaaaagagaccctggagacccaggaaactacctccaggcaagttgcctccgcctttattgtcattctgtgctgtgccattgtcgtagaaaacctactggttcttatcgccgtcgcccgaaacagcaagtttcacagcgccatgtatctgttcctgggcaacctggcggcttctgacctactcgctggcgtggcctttgtggccaataccttgttatctggctctgtgacgctgcgattaacgcccgtgcagtggttcgccagagaggggtcagctttcatcacactgtctgccagcgtgttctcattgttggctattgccattgaacgacatgttgcaatagcaaaggtcaaactgtatggtagcgacaaaagttgccgaatgctgctgctcattggcgctagttggctgatctcgttggttctggggggtctgcctatcctggggtggaattgtttagggcatctcgaagcctgtagcactgtgctccccctgtacgccaaacattacgtcttgtgcgtggtcacaatttttagtataatcctgcttgctatagttgctctttatgtcagaatctattgcgtggtccggtctagccatgccgacatggccgcaccccagacactcgctctactaaaaactgttacaattgtcttgggagtctttatagtgtgctggttaccggcattctcaatcctattactggactatgcctgccccgttcatagctgtccaatcctctacaaggcccactatttcttcgctgtctcaacactgaattcactcctgaaccctgtcatctacacttggcggtcacgagaccttcgcagggaggtcttgcggccactgcagtgttggcgcccaggcgtcggcgtgcagggcaggcggagaggcggaactcctggccaccatttattgccgctccggagctctagctcactggagcgcggaatgcacatgcctacaagcccaaccttcctggaggggaatacggttgtctag

SEQ ID NO: 144416 - DNA, 3584 bp, Artificial Sequence
  derived and/or modified sequence
cggccgccctggggacgcagacgccaaggcccctccggccagggccgggagccgggccggcctagccagttctgaaagccccatggccccagcaggcctctgagccccaccatgggcagcttgtactcggagtacctgaaccccaacaaggtccaggaacactataattataccaaggagacgctggaaacgcaggagacgacctcccgccaggtggcctcggccttcatcgtcatcctctgttgcgccattgtggtggaaaaccttctggtgctcattgcggtggcccgaaacagcaagttccactcggcaatgtacctgtttctgggcaacctggccgcctccgatctactggcaggcgtggccttcgtagccaataccttgctctctggctctgtcacgctgaggctgacgcctgtgcagtggtttgcccgggagggctctgccttcatcacgctctcggcctctgtcttcagcctcctggccatcgccattgagcgccacgtggccattgccaaggtcaagctgtatggcagcgacaagagctgccgcatgcttctgctcatcggggcctcgtggctcatctcgctggtcctcggtggcctgcccatccttggctggaactgcctgggccacctcgaggcctgctccactgtcctgcctctctacgccaagcattatgtgctgtgcgtggtgaccatcttctccatcatcctgttggccatcgtggccctgtacgtgcgcatctactgcgtggtccgctcaagccacgctgacatggccgccccgcagacgctagccctgctcaagacggtcaccatcgtgctaggcgtctttatcgtctgctggctgcccgccttcagcatcctccttctggactatgcctgtcccgtccactcctgcccgatcctctacaaagcccactactttttcgccgtctccaccctgaattccctgctcaaccccgtcatctacacgtggcgcagccgggacctgcggcgggaggtgcttcggccgctgcagtgctggaggccgggggtgggggtgcaaggacggaggcggggcgggaccccgggccaccacctcctgccactccgcagctccagctccctggagaggggcatgcacatgcccacgtcacccacgtttctggagggcaacacggtggtctgagggtgggggtggaccaacaaccaggccagggcagaggggttcatggagaggccactgggtgaccccagatagagacttggggctactgagccagatgcccccgccccacagacctgggtgatgttgcaaatatttcacacctggaaaggccagataaggcactgactagtcacatagcagtgttgcagtgcggtcctgagggccagtccagtggctagtgtgacccctttagaactggatcctggggaggccagggcaggggacctgtgaagagccagggtgagggcaggcagcatttaaggggagctcagggcaggagcactttaccacctggtacaaaggatttttttttttttttgagacggaatcttgcactgctgcccaggctggagtgcagtggcgtgatctcggctcaccgcaagctccgcctcctgggttcatgtcgttctcctgcctcagcctcccaagtagctgggactataggcgcctgccaccacacctggctaattttttgtacctttagtagagatggggtttcaccgtgttagccaggatggtcttgatctcctgacctcgtgatccgcccgcctcggcctcccaaagtgctgggattacaggcgtgagccaccgtgcccggctttttttttttttttttttttttttttttttttttttgagatgaagtctcgctctgttgcccaggctggagagtgcagtggtacggtctcagctcactgcaacctccacctcccaggttcaagcgattctccagcctgagcctcctgagtagctgggattacaggtgcctaccaccacgcccaggtaattttttttttttttgtatttttagtagagacggggtttcaccatgttggccaggctggtctcgaactcctgacctcatgatccgcccgtgttggcctcccaaagtgtgggattacaggcgtaagccacctcacctggcggtacaaagaatttctgcattttcttccctggcccctagtcctgcaccgatttctccttttcgaatgtattcctcctgccaccttctctgggcaacttcgtgcgactacagaaccactgtcctgaggagctagaggcctcctctctgaccatccagagcccaaatccacagcttccccaaatttcatcagctgccacttgacgacttctccccgtctctctgaggcccggaaaccacggctggaggtggggaggggatggcggctgaggtccattcctcattctcagacctcattgctcagttgcactatttggggcacagaataatcaccaaaagtgagaaaaacgagtttgggtggctggggaggactttgggactcttgatgcaaggcgcaacttgagaaaattctgggtgtgatatttgcacagacaccctcctttcaaaaacagccaccccccaagctattctcagctccacacctgcagccccagctaaggtaccaggtctcctgagcaaggcagagagaagccttgagccttctctgtgtcttctttcaagaaccccgctgtgtcttctttcaagattttttttttgagacagtttcaagatttttgttttgtttttgagatggagtctcactgtgtcacccaggctgaggtggcagtggttcaatctccgttcactgccacctccacctcccgggttcaagcgattctcctgcttcagcctctcgagtagctgggactacaggcacctgccaccatgtctggctaatttttgtatttttagtagagacagggtttcactacgttggccaggctggtctcaaactcctgacctcaagtgatccgcccgcctcggcctccccaattgctgggattacaggcgtgagccactgtgcccggccttcttctttcaagttatatagaatggagcatgggggtggcagtggctagggacatttcctggggacactctcccctaaccccccagaaggacttcacaaaaacctgtggataatggaagggatgttacggtacaaacgtatatttatgtgtgtgtgtgtgtatgtgtgtgcgcgcgcgcgtgtgcacataggcgtgatgtctgtgaccctcctctcctcgtcacatttcccccagaatgaatgctgtcctgtctgctcatgtttgtgttgaagctgccaaagtcggggagctctggtcctgcccagacccctttggaattgctggcccatcctcccactggagagctggggtgcagctcaccttggggaaggaaacctcatgcctcagagtaatttcttgtgaatgcaaagcctgggggagcgggtctttggggggcaaggagccagtcaggggcttgtttcccctcatagagctccccagacgtgcctccgcaatgcctgaaacccagacctaggctaataaacggttcaatttctgtt

SEQ ID NO: 144417 - protein, 119 aa, Artificial Sequence
  derived and/or modified sequence
MAGRGKLIAVIGDEDTVTGFLLGGIGELNKNRHPNFLVVEKDTTINEIEDTFRQFLNRDDIGIILINQYIAEMVRHALDAHQQSIPAVLEIPSKEHPYDAAKDSILRRARGMFTAEDLR

SEQ ID NO: 144418 - DNA, 360 bp, Artificial Sequence
  derived and/or modified sequence
atggccggcagaggcaagctgatcgccgtgatcggcgacgaggacaccgtgaccggcttcctgctgggcggcatcggcgagctgaacaagaacagacaccccaacttcctggtggtggagaaggacaccaccatcaacgagatcgaggacaccttcagacagttcctgaacagagacgacatcggcatcatcctgatcaaccagtacatcgccgagatggtgagacacgccctggacgcccaccagcagagcatccccgccgtgctggagatccccagcaaggagcacccctacgacgccgccaaggacagcatcctgagaagagccagaggcatgttcaccgccgaggacctgagatag

SEQ ID NO: 144419 - DNA, 360 bp, Artificial Sequence
  derived and/or modified sequence
atggccgggcgaggaaagctgatcgcagtgatcggcgacgaggacacagttactgggttcttattggggggtataggggagttgaataagaaccgtcatccgaactttctggtggttgaaaaggacactactatcaatgagatcgaagacacatttcggcagtttctgaatcgcgatgatattggtattatcctgattaaccaatacattgctgagatggtgcgccacgcactggacgctcaccagcagtctatcccggccgtgcttgagattccttctaaagagcatccatacgatgctgccaaggactcaattctgagaagagcgagaggaatgtttactgcagaagatcttagatag

SEQ ID NO: 144420 - DNA, 360 bp, Artificial Sequence
  derived and/or modified sequence
atggccggccggggcaagctgattgctgtgattggagatgaggacacagtgacaggcttcctgctgggcggcattggagagctgaacaagaacagacaccccaacttcctggtggtggagaaggacaccaccatcaatgaaattgaggacaccttccggcagttcctgaacagagatgacatcggcatcatcctgatcaaccagtacatcgccgagatggtgagacatgccctggatgcccaccagcagagcatcccagctgtgctggagatccccagcaaggagcacccctatgatgctgccaaggacagcatcctgcggcgggcccggggcatgttcaccgctgaggacctgaggtag

SEQ ID NO: 144421 - DNA, 360 bp, Artificial Sequence
  derived and/or modified sequence
atggccggccggggcaagctgatcgccgtgatcggcgacgaggacacagttacaggattccttttggggggcattggcgagctcaataagaatcgtcaccctaattttttagtggtggagaaggatactactattaacgagatcgaagatacatttcggcagttcctgaacagagatgacatcggaatcatcctgataaaccaatatatcgctgaaatggtgcgccacgccttggacgcccaccaacagtctatcccagcggtactcgaaatacccagtaaggaacatccctatgatgcagcgaaagattctattctgaggcgcgctcgcggaatgttcaccgccgaggatcttcggtag

SEQ ID NO: 144422 - DNA, 360 bp, Artificial Sequence
  derived and/or modified sequence
atggcaggcaggggtaaactcattgcagtgataggggacgaggacaccgtgactggcttcttactggggggaataggagaactgaataagaataggcatcctaacttcttggtggtggaaaaagacacgaccatcaacgagattgaggacacctttcggcagttccttaacagagacgatatcggaattatcctcatcaaccaatacatagccgaaatggttcgccacgcgcttgacgcccaccagcagtcaatcccagcagtattggaaattcctagcaaggagcatccttatgatgccgctaaagattctatcctaaggagagcacggggaatgtttaccgcagaagatctcaggtag

SEQ ID NO: 144423 - DNA, 704 bp, Artificial Sequence
  derived and/or modified sequence
gccgacggggcgccgtacggcggaggcggggtttcagtggcttctggtgctctagggtgagctctgcccggctgcagggatggcggggaggggtaagctcatcgcagtgatcggagacgaggacacggtgactggtttcctgctgggcggcataggggagcttaacaagaaccgccatcccaatttcctggtggtggagaaggatacaaccatcaatgagatcgaagacactttccggcaatttctaaaccgggatgacattggcatcatcctcatcaaccagtacatcgcagagatggtgcggcatgccctggacgcccaccagcagtccatccccgctgtcctggagatcccctccaaggagcacccatatgacgccgccaaggactccatcctgcgcagggccaggggcatgttcactgccgaagacctgcgctaggggactcctcatagccctcagcccttccctcgtttccaggcctctccccaggcttgccatcagccttctttactttttgagcctctgatttccaattccctgctccttcccactccattaagaggctaggtgaggcgcttctaggttgctggggctctgctggttaaggaacaggaagcctgaccatctccctccactacctcttccctgtgctgttacacagtgtcattgttgatgttaaattaaagtcatattcttgcttctc

SEQ ID NO: 144424 - protein, 205 aa, Artificial Sequence
  derived and/or modified sequence
MSRGLQLLLLSCAYSLAPATPEVKVACSEDVDLPCTAPWDPQVPYTVSWVKLLEGGEERMETPQEDHLRGQHYHQKGQNGSFDAPNERPYSLKIRNTTSCNSGTYRCTLQDPDGQRNLSGKVILRVTGCPAQRKEETFKKYRAEIVLLLALVIFYLTLIIFTCKFARLQSIFPDFSKAGMERAFLPVTSPNKHLGLVTPHKTELV

SEQ ID NO: 144425 - DNA, 618 bp, Artificial Sequence
  derived and/or modified sequence
atgtctcggggcttgcagcttctgcttctgagctgtgcctactctttggcgcccgccactcctgaggtaaaggtggcctgctcggaggatgtggatctgccctgcaccgcgccttgggatccccaggtgccgtatactgtgtcgtgggtgaaactgctcgaggggggggaagaaagaatggagaccccacaggaggatcatctcaggggccagcactaccatcagaagggccagaatggtagctttgacgccccaaatgagcgcccatattcattgaaaattcgtaatacaacaagctgcaattcgggaacatacagatgcacactacaggaccccgatggtcagcgcaatctatccgggaaggtgattctcagagtgactggctgtccagctcagcgaaaagaggaaacctttaagaaataccgggccgagatcgttcttttacttgccctggtgattttctatctgacccttattatcttcacctgcaaattcgcgaggctgcagtcaatttttccggatttctcaaaggctggcatggagagggccttcctcccggtgaccagccctaataaacatcttgggctagttacacctcacaagacagagctagtctag

SEQ ID NO: 144426 - DNA, 618 bp, Artificial Sequence
  derived and/or modified sequence
atgagccggggcctgcagctgctgctgctgagctgtgcctacagcctggccccagccaccccagaggtgaaggtggcctgcagtgaagatgtggacctgccctgcacagccccctgggacccccaggtgccctacacagtgtcctgggtgaagctgctggagggcggggaggagaggatggagaccccccaggaggaccacctgcggggccagcactaccaccagaagggccagaatggcagctttgatgccccaaatgaaagaccctacagcctgaagatccggaacaccaccagctgcaacagcggcacctaccgctgcaccctgcaggaccctgatggccagaggaacctgagcggcaaggtgatcctgcgggtgacaggctgcccagcccagaggaaggaggagaccttcaagaagtacagagctgagatcgtgctgctgctggccctggtgatcttctacctgaccctcatcatcttcacctgcaagtttgcccggctgcagagcatcttcccagacttcagcaaggccggcatggagcgggccttcctgcctgtgaccagccccaacaagcacctgggcctggtgaccccccacaagacagagctggtgtag

SEQ ID NO: 144427 - DNA, 618 bp, Artificial Sequence
  derived and/or modified sequence
atgagccggggcctgcagctgctgctgctgagctgcgcctacagcctcgcacccgcgactccagaagtcaaagtcgcttgctcagaagacgtcgatctgccgtgcacggcaccatgggacccacaggttccttataccgtttcttgggtgaaactccttgaaggtggggaagaacgtatggaaaccccccaagaagaccacctgcgaggacagcactatcatcagaaagggcagaatggctcattcgatgcacccaatgaaagaccttatagcctgaagattcgaaacacaacaagttgcaattccgggacatatcggtgtactctgcaggaccctgacggccagagaaatctgtccggcaaagtgattctgcgggtgactgggtgcccagcccagcgcaaagaagagacgtttaagaagtacagagccgaaatcgttctgctcctcgctcttgtgatcttctacctgactctgattatttttacttgcaagttcgcccgacttcaaagcatattcccagacttcagcaaggcaggcatggaacgggccttcctacctgtgaccagccctaataagcaccttggactggtcactccccacaagacggagctggtgtag

SEQ ID NO: 144428 - DNA, 618 bp, Artificial Sequence
  derived and/or modified sequence
atgtctagaggcctacaactccttctgctttcatgcgcgtacagcctggccccagctaccccagaggtgaaagtcgcttgtagtgaggatgttgacttgccttgcacggccccttgggacccccaagtgccctacacagtctcatgggtaaaactccttgagggcggagaagaacgtatggagacccctcaggaagaccatctgagaggacaacactaccatcagaagggtcagaacggctcatttgacgctccaaatgaacggccatatagcctgaagattagaaacactacctcttgtaacagtggcacctacaggtgcactctacaagacccagatggccagcggaatctaagcggcaaggtgatcctgagggtcaccggatgccctgctcaacggaaggaagaaaccttcaagaagtatcgggctgaaatcgtcctgcttctagcccttgtaattttctatctaactctaattatatttacctgtaaatttgcccgtttgcaatcaatattccctgattttagcaaagccggaatggaacgagccttcctgcccgtgacctcgcctaataagcatctggggctcgttacgcctcacaagaccgaattggtgtag

SEQ ID NO: 144429 - DNA, 2471 bp, Artificial Sequence
  derived and/or modified sequence
gcgccccggcctaagcgggactaggagggcgcgccacccgcttccgctgcccgccggggaatcccccgggctggcgcgcagggaagttcccgaacgcgcgggcataaaagggcagccggcgcccgcgcgccacagctctgcagctcgtggcagcggcgcagcgctccagccatgtcgcgcggcctccagcttctgctcctgagctgcgcctacagcctggctcccgcgacgccggaggtgaaggtggcttgctccgaagatgtggacttgccctgcaccgccccctgggatccgcaggttccctacacggtctcctgggtcaagttattggagggtggtgaagagaggatggagacaccccaggaagaccacctcaggggacagcactatcatcagaaggggcaaaatggttctttcgacgcccccaatgaaaggccctattccctgaagatccgaaacactaccagctgcaactcggggacatacaggtgcactctgcaggacccggatgggcagagaaacctaagtggcaaggtgatcttgagagtgacaggatgccctgcacagcgtaaagaagagacttttaagaaatacagagcggagattgtcctgctgctggctctggttattttctacttaacactcatcattttcacttgtaagtttgcacggctacagagtatcttcccagatttttctaaagctggcatggaacgagcttttctcccagttacctccccaaataagcatttagggctagtgactcctcacaagacagaactggtatgagcaggatttctgcaggttcttcttcctgaagctgaggctcaggggtgtgcctgtctgttacactggaggagagaagaatgagcctacgctgaagatggcatcctgtgaagtccttcacctcactgaaaacatctggaaggggatcccaccccattttctgtgggcaggcctcgaaaaccatcacatgaccacatagcatgaggccactgctgcttctccatggccaccttttcagcgatgtatgcagctatctggtcaacctcctggacattttttcagtcatataaaagctatggtgagatgcagctggaaaagggtcttgggaaatatgaatgcccccagctggcccgtgacagactcctgaggacagctgtcctcttctgcatcttggggacatctctttgaattttctgtgttttgctgtaccagcccagatgttttacgtctgggagaaattgacagatcaagctgtgagacagtgggaaatatttagcaaataatttcctggtgtgaaggtcctgctattactaaggagtaatctgtgtacaaagaaataacaagtcgatgaactattccccagcagggtcttttcatctgggaaagacatccataaagaagcaataaagaagagtgccacatttatttttatatctatatgtacttgtcaaagaaggtttgtgtttttctgcttttgaaatctgtatctgtagtgagatagcattgtgaactgacaggcagcctggacatagagagggagaagaagtcagagagggtgacaagatagagagctatttaatggccggctggaaatgctgggctgacggtgcagtctgggtgctcgcccacttgtcccactatctgggtgcatgatcttgagcaagttccttctggtgtctgctttctccattgtaaaccacaaggctgttgcatgggctaatgaagatcatatacgtgaaaattatttgaaaacatataaagcactatacagattcgaaactccattgagtcattatccttgctatgatgatggtgttttggggatgagagggtgctatccatttctcatgttttccattgtttgaaacaaagaaggttaccaagaagcctttcctgtagccttctgtaggaattcttttggggaagtgaggaagccaggtccacggtctgttcttgaagcagtagcctaacacactccaagatatggacacacgggagccgctggcagaagggacttcacgaagtgttgcatggatgttttagccattgttggctttcccttatcaaacttgggcccttcccttcttggtttccaaaggcattttattgcttgagttatatgttcactgtccccctaatattagggagtaaaacggataccaagttgatttagtgtttttacctctgtcttggctttcatgttattaaacgtatgcatgtgaagaaagggtgtttttctgttttatattcaactcataagactttgggataggaaaaatgagtaatggttactaggcttaatacctgggtgattacataatctgtacaatgaacccccatgatgtaagtttacctatgtaacaaacctgcacttatacccatgaacttaaaatgaaagttaaaaataaaaaacatatacaaataaaaaaatcccgactttgggatgagtgctaggatgttgtaaa

SEQ ID NO: 144430 - DNA, 618 bp, Artificial Sequence
  derived and/or modified sequence
atgagcagaggcctgcagctgctgctgctgagctgcgcctacagcctggcccccgccacccccgaggtgaaggtggcctgcagcgaggacgtggacctgccctgcaccgccccctgggacccccaggtgccctacaccgtgagctgggtgaagctgctggagggcggcgaggagagaatggagaccccccaggaggaccacctgagaggccagcactaccaccagaagggccagaacggcagcttcgacgcccccaacgagagaccctacagcctgaagatcagaaacaccaccagctgcaacagcggcacctacagatgcaccctgcaggaccccgacggccagagaaacctgagcggcaaggtgatcctgagagtgaccggctgccccgcccagagaaaggaggagaccttcaagaagtacagagccgagatcgtgctgctgctggccctggtgatcttctacctgaccctgatcatcttcacctgcaagttcgccagactgcagagcatcttccccgacttcagcaaggccggcatggagagagccttcctgcccgtgaccagccccaacaagcacctgggcctggtgaccccccacaagaccgagctggtgtag

SEQ ID NO: 144431 - protein, 479 aa, Artificial Sequence
  derived and/or modified sequence
MRQPPGESDMAVSDALLPSFSTFASGPAGREKTLRQAGAPNNRWREELSHMKRLPPVLPGRPYDLAAATVATDLESGGAGAACGGSNLAPLPRRETEEFNDLLDLDFILSNSLTHPPESVAATVSSSASASSSSSPSSSGPASAPSTCSFTYPIRAGNDPGVAPGGTGGGLLYGRESAPPPTAPFNLADINDVSPSGGFVAELLRPELDPVYIPPQQPQPPGGGLMGKFVLKASLSAPGSEYGSPSVISVSKGSPDGSHPVVVAPYNGGPPRTCPKIKQEAVSSCTHLGAGPPLSNGHRPAAHDFPLGRQLPSRTTPTLGLEEVLSSRDCHPALPLPPGFHPHPGPNYPSFLPDQMQPQVPPLHYQELMPPGSCMPEEPKPKRGRRSWPRKRTATHTCDYAGCGKTYTKSSHLKAHLRTHTGEKPYHCDWDGCGWKFARSDELTRHYRKHTGHRPFQCQKCDRAFSRSDHLALHMKRHF

SEQ ID NO: 144432 - protein, 232 aa, Artificial Sequence
  derived and/or modified sequence
MAVSDALLPSFSTFASGPAGREKTLRQAGAPNNRWREELSHMKRLPPVLPGRPYDLAAATVATDLESGGAGAACGGSNLAPLPRRETEEFNDLLDLDFILSNSLTHPPESVAATVSSSASASSSSSPSSSGPASAPSTCSFTYPIRAGNDPGVAPGGTGGGLLYGRESAPPPTAPFNLADINDVSPSGGFVAELLRPELDPVYIPPQQPQPPGGGLMGKFVLKASLSAPGSE

SEQ ID NO: 144433 - protein, 22 aa, Artificial Sequence
  derived and/or modified sequence
MRQPPGESDMAVSDALLPSFST

SEQ ID NO: 144434 - protein, 38 aa, Artificial Sequence
  derived and/or modified sequence
MRQPPGESDMAVSDALLPSFSTFASGPAGREKTLRQAG

SEQ ID NO: 144435 - DNA, 2949 bp, Artificial Sequence
  derived and/or modified sequence
agtttcccgaccagagagaacgaacgtgtctgcgggcgcgcggggagcagaggcggtggcgggcggcggcggcaccgggagccgccgagtgaccctcccccgcccctctggccccccaccctcccacccgcccgtggcccgcgcccatggccgcgcgcgctccacacaactcaccggagtccgcgccttgcgccgccgaccagttcgcagctccgcgccacggcagccagtctcacctggcggcaccgcccgcccaccgccccggccacagcccctgcgcccacggcagcactcgaggcgaccgcgacagtggtgggggacgctgctgagtggaagagagcgcagcccggccaccggacctacttactcgccttgctgattgtctatttttgcgtttacaacttttctaagaacttttgtatacaaaggaactttttaaaaaagacgcttccaagttatatttaatccaaagaagaaggatctcggccaatttggggttttgggttttggcttcgtttcttctcttcgttgactttggggttcaggtgccccagctgcttcgggctgccgaggaccttctgggcccccacattaatgaggcagccacctggcgagtctgacatggctgtcagcgacgcgctgctcccatctttctccacgttcgcgtctggcccggcgggaagggagaagacactgcgtcaagcaggtgccccgaataaccgctggcgggaggagctctcccacatgaagcgacttcccccagtgcttcccggccgcccctatgacctggcggcggcgaccgtggccacagacctggagagcggcggagccggtgcggcttgcggcggtagcaacctggcgcccctacctcggagagagaccgaggagttcaacgatctcctggacctggactttattctctccaattcgctgacccatcctccggagtcagtggccgccaccgtgtcctcgtcagcgtcagcctcctcttcgtcgtcgccgtcgagcagcggccctgccagcgcgccctccacctgcagcttcacctatccgatccgggccgggaacgacccgggcgtggcgccgggcggcacgggcggaggcctcctctatggcagggagtccgctccccctccgacggctcccttcaacctggcggacatcaacgacgtgagcccctcgggcggcttcgtggccgagctcctgcggccagaattggacccggtgtacattccgccgcagcagccgcagccgccaggtggcgggctgatgggcaagttcgtgctgaaggcgtcgctgagcgcccctggcagcgagtacggcagcccgtcggtcatcagcgtcagcaaaggcagccctgacggcagccacccggtggtggtggcgccctacaacggcgggccgccgcgcacgtgccccaagatcaagcaggaggcggtctcttcgtgcacccacttgggcgctggaccccctctcagcaatggccaccggccggctgcacacgacttccccctggggcggcagctccccagcaggactaccccgaccctgggtcttgaggaagtgctgagcagcagggactgtcaccctgccctgccgcttcctcccggcttccatccccacccggggcccaattacccatccttcctgcccgatcagatgcagccgcaagtcccgccgctccattaccaagagctcatgccacccggttcctgcatgccagaggagcccaagccaaagaggggaagacgatcgtggccccggaaaaggaccgccacccacacttgtgattacgcgggctgcggcaaaacctacacaaagagttcccatctcaaggcacacctgcgaacccacacaggtgagaaaccttaccactgtgactgggacggctgtggatggaaattcgcccgctcagatgaactgaccaggcactaccgtaaacacacggggcaccgcccgttccagtgccaaaaatgcgaccgagcattttccaggtcggaccacctcgccttacacatgaagaggcatttttaaatcccagacagtggatatgacccacactgccagaagagaattcagtattttttacttttcacactgtcttcccgatgagggaaggagcccagccagaaagcactacaatcatggtcaagttcccaactgagtcatcttgtgagtggataatcaggaaaaatgaggaatccaaaagacaaaaatcaaagaacagatggggtctgtgactggatcttctatcattccaattctaaatccgacttgaatattcctggacttacaaaatgccaagggggtgactggaagttgtggatatcagggtataaattatatccgtgagttgggggagggaagaccagaattcccttgaattgtgtattgatgcaatataagcataaaagatcaccttgtattctctttaccttctaaaagccattattatgatgttagaagaagaggaagaaattcaggtacagaaaacatgtttaaatagcctaaatgatggtgcttggtgagtcttggttctaaaggtaccaaacaaggaagccaaagttttcaaactgctgcatactttgacaaggaaaatctatatttgtcttccgatcaacatttatgacctaagtcaggtaatatacctggtttacttctttagcatttttatgcagacagtctgttatgcactgtggtttcagatgtgcaataatttgtacaatggtttattcccaagtatgccttaagcagaacaaatgtgtttttctatatagttccttgccttaataaatatgtaatataaatttaagcaaacgtctattttgtatatttgtaaactacaaagtaaaatgaacattttgtggagtttgtattttgcatactcaaggtgagaattaagttttaaataaacctataatattttatctgaaaaaaaaaaaaaaaaaa

SEQ ID NO: 144436 - DNA, 1440 bp, Artificial Sequence
  derived and/or modified sequence
atgagacagccccccggcgagagcgacatggccgtgagcgacgccctgctgcccagcttcagcaccttcgccagcggccccgccggcagagagaagaccctgagacaggccggcgcccccaacaacagatggagagaggagctgagccacatgaagagactgccccccgtgctgcccggcagaccctacgacctggccgccgccaccgtggccaccgacctggagagcggcggcgccggcgccgcctgcggcggcagcaacctggcccccctgcccagaagagagaccgaggagttcaacgacctgctggacctggacttcatcctgagcaacagcctgacccacccccccgagagcgtggccgccaccgtgagcagcagcgccagcgccagcagcagcagcagccccagcagcagcggccccgccagcgcccccagcacctgcagcttcacctaccccatcagagccggcaacgaccccggcgtggcccccggcggcaccggcggcggcctgctgtacggcagagagagcgcccccccccccaccgcccccttcaacctggccgacatcaacgacgtgagccccagcggcggcttcgtggccgagctgctgagacccgagctggaccccgtgtacatccccccccagcagccccagccccccggcggcggcctgatgggcaagttcgtgctgaaggccagcctgagcgcccccggcagcgagtacggcagccccagcgtgatcagcgtgagcaagggcagccccgacggcagccaccccgtggtggtggccccctacaacggcggcccccccagaacctgccccaagatcaagcaggaggccgtgagcagctgcacccacctgggcgccggcccccccctgagcaacggccacagacccgccgcccacgacttccccctgggcagacagctgcccagcagaaccacccccaccctgggcctggaggaggtgctgagcagcagagactgccaccccgccctgcccctgccccccggcttccacccccaccccggccccaactaccccagcttcctgcccgaccagatgcagccccaggtgccccccctgcactaccaggagctgatgccccccggcagctgcatgcccgaggagcccaagcccaagagaggcagaagaagctggcccagaaagagaaccgccacccacacctgcgactacgccggctgcggcaagacctacaccaagagcagccacctgaaggcccacctgagaacccacaccggcgagaagccctaccactgcgactgggacggctgcggctggaagttcgccagaagcgacgagctgaccagacactacagaaagcacaccggccacagacccttccagtgccagaagtgcgacagagccttcagcagaagcgaccacctggccctgcacatgaagagacacttctag

SEQ ID NO: 144437 - DNA, 699 bp, Artificial Sequence
  derived and/or modified sequence
atggccgtgagcgacgccctgctgcccagcttcagcaccttcgccagcggccccgccggcagagagaagaccctgagacaggccggcgcccccaacaacagatggagagaggagctgagccacatgaagagactgccccccgtgctgcccggcagaccctacgacctggccgccgccaccgtggccaccgacctggagagcggcggcgccggcgccgcctgcggcggcagcaacctggcccccctgcccagaagagagaccgaggagttcaacgacctgctggacctggacttcatcctgagcaacagcctgacccacccccccgagagcgtggccgccaccgtgagcagcagcgccagcgccagcagcagcagcagccccagcagcagcggccccgccagcgcccccagcacctgcagcttcacctaccccatcagagccggcaacgaccccggcgtggcccccggcggcaccggcggcggcctgctgtacggcagagagagcgcccccccccccaccgcccccttcaacctggccgacatcaacgacgtgagccccagcggcggcttcgtggccgagctgctgagacccgagctggaccccgtgtacatccccccccagcagccccagccccccggcggcggcctgatgggcaagttcgtgctgaaggccagcctgagcgcccccggcagcgagtag

SEQ ID NO: 144438 - DNA, 117 bp, Artificial Sequence
  derived and/or modified sequence
atgagacagccccccggcgagagcgacatggccgtgagcgacgccctgctgcccagcttcagcaccttcgccagcggccccgccggcagagagaagaccctgagacaggccggctag

SEQ ID NO: 144439 - DNA, 1440 bp, Artificial Sequence
  derived and/or modified sequence
atgcgacagcctccaggggagtcagatatggctgtttccgacgccctgctgccttctttttctacattcgcttcagggccggctgggagggaaaaaacactcagacaggccggggcccccaataatagatggagggaggaacttagccacatgaagagactccctcctgttctgccggggcgtccatatgaccttgcagccgcgaccgtggccacagacctggaatccgggggagccggtgctgcctgcggaggatccaatttagcaccactgccccgccgggagacggaagagtttaacgacctcctcgatttggactttatcctcagcaattccctcacacatcctcccgagagcgtcgcggccaccgtctcatcctcagcctccgcctcatcttccagcagccccagcagcagcggtcctgcgtctgccccatccacctgctccttcacctaccccatccgcgctgggaacgatccaggcgttgcgccgggaggcaccggcgggggcctgctgtacggacgcgaaagcgccccgcccccaaccgcaccgttcaatcttgccgatattaatgacgtgtctcccagtggcggctttgtcgctgagctactgaggcccgaactggatcctgtctatattccccctcagcagccccaaccaccaggtggaggtctcatgggcaaatttgttctaaaggcctctctgtctgcccctggaagcgaatacgggtccccatccgtgattagtgtgagcaaaggttcccctgatggatcccatccagttgtagtggccccatacaatggaggcccaccccgtacgtgcccaaaaataaagcaggaggctgtatcatcttgtactcacctgggtgcggggcccccattgagcaatgggcaccggcccgcagctcacgatttccctcttgggagacaactcccttccaggacgacgccgactctgggactcgaggaagttctttcatctagagattgccatccggccctcccactaccaccaggttttcacccccatccaggacctaactacccatcctttttacccgaccaaatgcaaccccaggtaccaccactgcactatcaggaacttatgccgccgggcagctgcatgccagaagagcctaagcccaagaggggtagacgtagttggccgcgtaaacggacggccacccacacttgcgactacgccggatgtggcaagacctacacaaagagttcgcatctcaaggctcatctacgtacgcacacaggggaaaagccatatcactgcgactgggacgggtgcggatggaagttcgctcgaagtgacgagctcacccggcattatcgtaaacacaccgggcatcgacccttccagtgccaaaagtgtgatcgtgcctttagccgtagcgatcacctcgcactccacatgaagcggcatttttag

SEQ ID NO: 144440 - DNA, 699 bp, Artificial Sequence
  derived and/or modified sequence
atggcagtctccgatgctctattgccgagcttctccacctttgctagcgggccggcaggtcgcgaaaagaccctgaggcaagccggcgccccaaataacaggtggagggaggaactcagtcatatgaaacgtctgccccccgttcttccaggcaggccgtacgatctagcagccgctactgtcgcaaccgatctggaatccggtggagccggcgcggcctgtggcgggagcaatctcgcgcctttgccaagacgcgagaccgaagagtttaacgatctcctcgacctagactttatcctgagcaacagcctgacacacccacccgagagcgtggccgctaccgtgtctagctccgcgtccgcctcatctagcagttctcccagtagttcaggccctgcctcagcgccgtccacctgctccttcacctacccaatccgggctggtaatgaccccggcgtggcccctggtggaaccggcggtggtctcctgtatggacgggaaagcgcccctccccctactgccccctttaatctcgcagatatcaacgatgtttcaccctccgggggttttgtcgctgagttgcttcgtcccgagcttgaccccgtctatatcccacctcagcaaccgcaaccacccgggggcggcctgatgggaaagttcgttctgaaggcgtctctatctgctccagggagtgagtag

SEQ ID NO: 144441 - DNA, 117 bp, Artificial Sequence
  derived and/or modified sequence
atgcggcagcctcccggggaatccgatatggccgtgtccgatgcgcttttgccgtccttcagcacatttgcctctggtccggccggacgggagaaaacgcttcggcaagcgggatag

SEQ ID NO: 144442 - DNA, 1440 bp, Artificial Sequence
  derived and/or modified sequence
atgaggcagcccccaggagagagtgacatggctgtgtctgatgccctgctgcccagcttcagcacctttgccagcggccctgctggccgggagaagaccctgcggcaggccggggcccccaacaaccgctggagggaggagctgagccacatgaagaggctgccccctgtgctgcccggccggccctatgacctggccgccgccaccgtggccacagacctggagagcggcggggccggggccgcctgtggcggcagcaacctggcccccctgccccggcgggagacagaggagttcaatgacctgctggacctggacttcatcctgagcaacagcctgacccaccccccagagagcgtggccgccaccgtgagcagcagcgccagcgccagcagcagcagcagccccagcagcagcggccctgccagcgcccccagcacctgcagcttcacctaccccatccgggctggaaatgaccccggggtggcccctgggggcactggaggcggcctgctgtatggccgggagagcgcccccccacccacagcccccttcaacctggccgacatcaatgatgtgagccccagcggcggctttgtggccgagctgctgcggcctgagctggaccctgtgtacatccccccccagcagccccagcccccaggcggcggcctgatgggcaagtttgtgctgaaggccagcctgagcgcccctggctctgaatatggcagccccagcgtcatctctgtgtccaagggcagcccagatggcagccaccctgtggtggtggccccctacaatggaggcccccccaggacctgccccaagatcaagcaggaggccgtgagcagctgcacccacctgggcgccggcccccccctgagcaatggccacaggcctgctgcccatgacttccccctgggccggcagctgcccagcaggaccacccccaccctgggcctggaggaggtgctgagcagccgggactgccacccagccctgcccctgcccccaggcttccacccccaccctggccccaactaccccagcttcctgcctgaccagatgcagccccaggtgccccccctgcactaccaggagctgatgcctcctggcagctgcatgcctgaggagcccaagcccaagagaggaagaagatcctggcccaggaagaggacagccacccacacctgtgactatgccggctgcggcaagacctacaccaagagcagccacctgaaggcccacctgcggacccacactggagagaagccctaccactgtgactgggatggctgcggctggaagtttgcccggagtgatgagctgaccaggcactacaggaagcacacaggccaccggcccttccagtgccagaagtgtgaccgggccttcagcagaagtgaccacctggccctgcacatgaagaggcacttctag

SEQ ID NO: 144443 - DNA, 699 bp, Artificial Sequence
  derived and/or modified sequence
atggctgtgtctgatgccctgctgcccagcttcagcacctttgccagcggccctgctggccgggagaagaccctgcggcaggccggggcccccaacaaccgctggagggaggagctgagccacatgaagaggctgccccctgtgctgcccggccggccctatgacctggccgccgccaccgtggccacagacctggagagcggcggggccggggccgcctgtggcggcagcaacctggcccccctgccccggcgggagacagaggagttcaatgacctgctggacctggacttcatcctgagcaacagcctgacccaccccccagagagcgtggccgccaccgtgagcagcagcgccagcgccagcagcagcagcagccccagcagcagcggccctgccagcgcccccagcacctgcagcttcacctaccccatccgggctggaaatgaccccggggtggcccctgggggcaccggcggcggcctgctgtatggccgggagagcgcccccccacccacagcccccttcaacctggccgacatcaatgatgtgagccccagcggcggctttgtggccgagctgctgcggcctgagctggaccctgtgtacatccccccccagcagccccagcccccaggcggcggcctgatgggcaagtttgtgctgaaggccagcctgagcgcccctggcagcgagtag

SEQ ID NO: 144444 - DNA, 117 bp, Artificial Sequence
  derived and/or modified sequence
atgaggcagcccccaggagagagtgacatggctgtgtctgatgccctgctgcccagcttcagcacctttgccagcggccctgctggccgggagaagaccctgcggcaggccggctag

SEQ ID NO: 144445 - DNA, 1440 bp, Artificial Sequence
  derived and/or modified sequence
atgcggcagccccccggcgagagcgacatggccgtgagcgacgccttgcttcccagtttctctacctttgctagcggtccagccggaagggagaagaccttgcgtcaagcaggagccccaaacaacagatggcgggaggagctttcccacatgaaacggctgcccccggtgctgcctggtcgcccttacgatttagctgccgctacagtggctaccgatctcgagtctggcggtgctggagctgcttgcggtggctccaacctggcaccactcccaaggcgggagacagaagaattcaacgacctgctcgatctggactttatcctctctaactccctgacacacccacctgagtctgtcgccgcaaccgtgtcatcctccgccagcgcctcaagtagcagcagtccttctagctcagggccggcttccgctcccagtacctgctcattcacgtatcccatcagagcgggaaacgacccgggagtggcacccggagggaccggcggaggactcctatacggccgggagagcgcacctccacccacggcgccatttaatcttgccgacatcaatgacgttagtccatccggaggtttcgtggcagaacttctgcgtcccgagttagatcccgtgtatatcccgccgcagcaaccacagcctcctggcgggggcttgatggggaaattcgtccttaaagcttcactctccgcaccaggtagcgaatacggcagccctagcgttatttcagtgagcaagggcagtcctgatggctcacatccagtggtcgtggccccatataatggaggcccgccacgaacttgccccaagatcaaacaggaggccgtgtcatcatgtactcatctgggtgccggccctccactgtcaaacgggcaccgccccgctgctcacgacttccccctgggcagacaactgccttcccgtactacacccaccctcgggctggaagaagtgctaagcagccgtgattgtcaccccgccctccctctaccacctggtttccacccacatcccggtcccaactacccgtcttttctgcctgaccagatgcagccccaggtcccccccctccactaccaagagctgatgcctcccggctcctgcatgcctgaagaaccaaaacctaagcgcggccgcagatcttggcctcgcaagagaactgccacacacacatgtgattacgctggatgcggcaagacatatactaagtcgagccatctgaaggctcacctacgaacccataccggtgaaaaaccctaccactgtgattgggatggctgcggctggaagttcgcaagatctgacgagctgactcggcattatcggaaacatactgggcacagaccttttcagtgccaaaagtgcgacagggcgttttcaagaagcgatcaccttgctcttcatatgaagcgacacttttag

SEQ ID NO: 144446 - DNA, 699 bp, Artificial Sequence
  derived and/or modified sequence
atggccgtgagcgacgccctgctgcccagcttcagcaccttcgcctctggcccggccggacgagaaaagactctgagacaggctggcgcacccaacaatcgctggcgggaagagctgagtcacatgaagcgcctacctcccgtgcttcccggccgtccctacgacttggccgcagccactgtggcgacagatctggagtccggaggtgccggagccgcgtgcggaggtagcaatctcgcacctctaccccgcagggagacagaagagttcaacgaccttttggacttggactttattttgtctaattcccttacccacccccccgagtctgtggccgctactgtgagtagtagcgcttccgcttcctcttctagcagtccgtctagctccggacctgcaagcgccccctcaacatgctccttcacataccccattcgagccggcaacgaccctggcgtggctcctggcggtaccggcgggggcctattatatggcagggagagtgccccacctcctaccgcgcctttcaaccttgccgatattaatgatgtgagcccttctggtggttttgttgcagagttgttaaggccagaattggatccggtgtacattccgcctcagcagccgcagccccccggggggggtctaatggggaagttcgtgctgaaggccagtttatctgcacccggatctgaatag

SEQ ID NO: 144447 - DNA, 117 bp, Artificial Sequence
  derived and/or modified sequence
atgcggcagccccccggcgagagcgacatggccgtgagcgacgccttactgccttcctttagtaccttcgcttctggacctgccggccgagaaaagacattgcgacaggccggctag

SEQ ID NO: 144448 - DNA, 1440 bp, Artificial Sequence
  derived and/or modified sequence
atgcgccaaccacctggagagtcggatatggccgtatctgacgcactactgcctagtttctccacatttgcctcgggccctgcagggagggagaagactttgaggcaggcgggagcacctaataacagatggagggaggaattaagccatatgaaacggctaccaccagtgttgccagggcgaccttatgacctggcagccgcaacagtcgcaactgatctagagtccgggggagcaggagcagcttgtggcggtagcaacctggccccactgcccagaagagagactgaggagtttaacgacctcctggacttagattttatcctgtctaattctctgactcatcctccagaaagcgtcgccgcaaccgtttctagctcagctagtgcttccagtagctcctcccctagttcttcgggacccgcaagcgctcctagcacttgttccttcacctacccaattagggccggtaatgatcccggtgtggcaccgggtggcacgggaggaggcctactctacgggagagagtccgctccccctcccactgcaccattcaaccttgctgatatcaatgatgtaagccctagtggcggtttcgtagccgaactgctgcgtcccgagctggacccagtatatatcccaccacaacagccacagccgccaggcggtgggctgatgggcaagtttgtgctcaaagcttcactatccgcgccaggctcggaatacggatctccatctgttatctctgtaagtaaaggcagcccggatggttcccaccctgtcgtggtggccccatataatggaggaccacctcggacttgccctaaaattaagcaggaggcagtctcaagctgtacccacttaggggctggccctcccttaagcaatgggcataggcctgctgcccacgacttccctcttggcaggcagctgccctcccgcaccactcctacgttgggactggaagaggtgctgagttcacgtgattgccaccccgcactcccgttgccacctggcttccatccgcatccagggccaaattatccatccttcctgccagatcagatgcaacctcaggttccaccgctgcattatcaggagttaatgcccccaggatcatgcatgcccgaggagcctaaacctaaacgcggacggagaagctggcccagaaagagaaccgctacccacacgtgtgattacgccggatgcggaaagacatataccaaatcctcacacttgaaggcccacctacgcacgcacacaggggaaaagccgtaccactgtgactgggacggatgcggatggaagttcgctcgtagcgacgagctcactaggcactataggaaacatacagggcacagaccttttcagtgtcagaaatgcgatcgggcattttccagatctgaccatttggcgctccacatgaagcgccacttttag

SEQ ID NO: 144449 - DNA, 699 bp, Artificial Sequence
  derived and/or modified sequence
atggctgtgagcgacgctctcttgccgagtttcagtaccttcgcaagcggaccagccggtcgggagaagacgctacggcaagccggagccccaaacaacaggtggcgggaggagctgagccatatgaaacgtctaccgccagttctcccaggcaggccatatgacctcgcggctgcaaccgtcgcaactgacttagagtccggaggtgcaggcgctgcctgcggcggaagtaatctggccccactgcctcggagggagacagaagagttcaacgacttgctcgatctggacttcatcctttcaaactcgctgactcaccctcccgagtccgtggccgcaactgtttcctccagcgcatccgcgtctagcagctcaagcccctctagttcaggcccagcttctgcgcctagcacttgctcatttacctaccccatccgggctggcaacgaccccggtgttgctcccggaggaacagggggagggctcctgtatggaagggagtctgcaccccctccaacggccccattcaatttagccgatataaatgacgttagtcctagtgggggatttgtcgcagagctccttagaccagagttagatccggtatatatacctccgcagcagccacagcccccagggggagggctgatgggaaaatttgtcctaaaagcaagtctgagcgctcctggatctgaatag

SEQ ID NO: 144450 - DNA, 117 bp, Artificial Sequence
  derived and/or modified sequence
atgagacagccgcctggggagagcgatatggccgtaagcgacgccttgctgccctcctttagcacatttgccagcgggcctgccggtcgcgagaagactctccggcaggccggttag

SEQ ID NO: 144451 - DNA, 2813 bp, Artificial Sequence
  derived and/or modified sequence
ctcccacccgcccgtggcccgcgcccatggccgcgcgcgctccacacaactcaccggagtccgcgccttgcgccgccgaccagttcgcagctccgcgccacggcagccagtctcacctggcggcaccgcccgcccaccgccccggccacagcccctgcgcccacggcagcactcgaggcgaccgcgacagtggtgggggacgctgctgagtggaagagagcgcagcccggccaccggacctacttactcgccttgctgattgtctatttttgcgtttacaacttttctaagaacttttgtatacaaaggaactttttaaaaaagacgcttccaagttatatttaatccaaagaagaaggatctcggccaatttggggttttgggttttggcttcgtttcttctcttcgttgactttggggttcaggtgccccagctgcttcgggctgccgaggaccttctgggcccccacattaatgaggcagccacctggcgagtctgacatggctgtcagcgacgcgctgctcccatctttctccacgttcgcgtctggcccggcgggaagggagaagacactgcgtcaagcaggtgccccgaataaccgctggcgggaggagctctcccacatgaagcgacttcccccagtgcttcccggccgcccctatgacctggcggcggcgaccgtggccacagacctggagagcggcggagccggtgcggcttgcggcggtagcaacctggcgcccctacctcggagagagaccgaggagttcaacgatctcctggacctggactttattctctccaattcgctgacccatcctccggagtcagtggccgccaccgtgtcctcgtcagcgtcagcctcctcttcgtcgtcgccgtcgagcagcggccctgccagcgcgccctccacctgcagcttcacctatccgatccgggccgggaacgacccgggcgtggcgccgggcggcacgggcggaggcctcctctatggcagggagtccgctccccctccgacggctcccttcaacctggcggacatcaacgacgtgagcccctcgggcggcttcgtggccgagctcctgcggccagaattggacccggtgtacattccgccgcagcagccgcagccgccaggtggcgggctgatgggcaagttcgtgctgaaggcgtcgctgagcgcccctggcagcgagtacggcagcccgtcggtcatcagcgtcagcaaaggcagccctgacggcagccacccggtggtggtggcgccctacaacggcgggccgccgcgcacgtgccccaagatcaagcaggaggcggtctcttcgtgcacccacttgggcgctggaccccctctcagcaatggccaccggccggctgcacacgacttccccctggggcggcagctccccagcaggactaccccgaccctgggtcttgaggaagtgctgagcagcagggactgtcaccctgccctgccgcttcctcccggcttccatccccacccggggcccaattacccatccttcctgcccgatcagatgcagccgcaagtcccgccgctccattaccaagagctcatgccacccggttcctgcatgccagaggagcccaagccaaagaggggaagacgatcgtggccccggaaaaggaccgccacccacacttgtgattacgcgggctgcggcaaaacctacacaaagagttcccatctcaaggcacacctgcgaacccacacaggtgagaaaccttaccactgtgactgggacggctgtggatggaaattcgcccgctcagatgaactgaccaggcactaccgtaaacacacggggcaccgcccgttccagtgccaaaaatgcgaccgagcattttccaggtcggaccacctcgccttacacatgaagaggcatttttaaatcccagacagtggatatgacccacactgccagaagagaattcagtattttttacttttcacactgtcttcccgatgagggaaggagcccagccagaaagcactacaatcatggtcaagttcccaactgagtcatcttgtgagtggataatcaggaaaaatgaggaatccaaaagacaaaaatcaaagaacagatggggtctgtgactggatcttctatcattccaattctaaatccgacttgaatattcctggacttacaaaatgccaagggggtgactggaagttgtggatatcagggtataaattatatccgtgagttgggggagggaagaccagaattcccttgaattgtgtattgatgcaatataagcataaaagatcaccttgtattctctttaccttctaaaagccattattatgatgttagaagaagaggaagaaattcaggtacagaaaacatgtttaaatagcctaaatgatggtgcttggtgagtcttggttctaaaggtaccaaacaaggaagccaaagttttcaaactgctgcatactttgacaaggaaaatctatatttgtcttccgatcaacatttatgacctaagtcaggtaatatacctggtttacttctttagcatttttatgcagacagtctgttatgcactgtggtttcagatgtgcaataatttgtacaatggtttattcccaagtatgccttaagcagaacaaatgtgtttttctatatagttccttgccttaataaatatgtaatataaatttaagcaaacgtctattttgtatatttgtaaactacaaagtaaaatgaacattttgtggagtttgtattttgcatactcaaggtgagaattaagttttaaataaacctataatattttatctgaa

SEQ ID NO: 144452 - DNA, 800 bp, Artificial Sequence
  derived and/or modified sequence
gaggaccggtgggacgcgccggaacgacggccgaaagccgcccctgactctcctgtctccgctccctgccttgctcgcaggcagccacctggcgagtctgacatggctgtcagcgacgcgctgctcccatctttctccacgttcgcgtctggcccggcgggaagggagaagacactgcgtcaagcaggtgccccgaataaccgctggcgggaggagctctcccacatgaagcgacttcccccagtgcttcccggccgcccctatgacctggcggcggcgaccgtggccacagacctggagagcggcggagccggtgcggcttgcggcggtagcaacctggcgcccctacctcggagagagaccgaggagttcaacgatctcctggacctggactttattctctccaattcgctgacccatcctccggagtcagtggccgccaccgtgtcctcgtcagcgtcagcctcctcttcgtcgtcgccgtcgagcagcggccctgccagcgcgccctccacctgcagcttcacctatccgatccgggccgggaacgacccgggcgtggcgccgggcggcacgggcggaggcctcctctatggcagggagtccgctccccctccgacggctcccttcaacctggcggacatcaacgacgtgagcccctcgggcggcttcgtggccgagctcctgcggccagaattggacccggtgtacattccgccgcagcagccgcagccgccaggtggcgggctgatgggcaagttcgtgctgaaggcgtcgctgagcgcccctggcagcgagta

SEQ ID NO: 144453 - DNA, 822 bp, Artificial Sequence
  derived and/or modified sequence
actcctctggccttctcttgaggctcccagttcacgctgcacagtgctgggcactgcctcctctccacacccctagcgccccccacccctcagcagaagggcccgcgaggaaccgtgcgaggtcaggccgagcgccggcaccgccaccggcactggcgctgagcgacgagagcggactcctgcgagcgcagagagggagggggagatggagggctggatgagtcacgcggataatcgcgctcttctccagcgcgcagacagcgcggcaagcgcgtatgctagcaggggtgcggacgcgtgaccgtgccgcccgctgaccccaccagtcttcgcgggcttcgaacccagggagccgacaatggcgttcgcagctccgcgccacggcagccagtctcacctggcggcaccgcccgcccaccgccccggccacagcccctgcgcccacggcagcactcgaggcgaccgcgacagtggtgggggacgctgctgagtggaagagagcgcagcccggccaccggacctacttactcgccttgctgattgtctatttttgcgtttacaacttttctaagaacttttgtatacaaaggaactttttaaaaaagacgcttccaagttatatttaatccaaagaagaaggatctcggccaatttggggttttgggttttggcttcgtttcttctcttcgttgactttggggttcaggtgccccagctgcttcgggctgccgaggaccttctgggcccccacattaatgaggcagccacctggcgagtctgacatggctgtcagcgacgcgctgctcccatctttctccacgt

SEQ ID NO: 144454 - DNA, 545 bp, Artificial Sequence
  derived and/or modified sequence
ggcagtttcccgaccagagagaacgaacgtgtctgcgggcgcgcggggagcagaggcggtggcgggcggcggcggcaccgggagccgccgagtgaccctcccccgcccctctggccccccaccctcccacccgccgcgaccgcgacagtggtgggggacgctgctgagtggaagagagcgcagcccggccaccggacctacttactcgccttgctgattgtctatttttgcgtttacaacttttctaagaacttttgtatacaaaggaactttttaaaaaagacgcttccaagttatatttaatccaaagaagaaggatctcggccaatttggggttttgggttttggcttcgtttcttctcttcgttgactttggggttcaggtgccccagctgcttcgggctgccgaggaccttctgggcccccacattaatgaggcagccacctggcgagtctgacatggctgtcagcgacgcgctgctcccatctttctccacgttcgcgtctggcccggcgggaagggagaagacactgcgtcaagcagg

SEQ ID NO: 144455 - DNA, 1437 bp, Artificial Sequence
  derived and/or modified sequence
atgaggcagccacctggcgagtctgacatggctgtcagcgacgcgctgctcccatctttctccacgttcgcgtctggcccggcgggaagggagaagacactgcgtcaagcaggtgccccgaataaccgctggcgggaggagctctcccacatgaagcgacttcccccagtgcttcccggccgcccctatgacctggcggcggcgaccgtggccacagacctggagagcggcggagccggtgcggcttgcggcggtagcaacctggcgcccctacctcggagagagaccgaggagttcaacgatctcctggacctggactttattctctccaattcgctgacccatcctccggagtcagtggccgccaccgtgtcctcgtcagcgtcagcctcctcttcgtcgtcgccgtcgagcagcggccctgccagcgcgccctccacctgcagcttcacctatccgatccgggccgggaacgacccgggcgtggcgccgggcggcacgggcggaggcctcctctatggcagggagtccgctccccctccgacggctcccttcaacctggcggacatcaacgacgtgagcccctcgggcggcttcgtggccgagctcctgcggccagaattggacccggtgtacattccgccgcagcagccgcagccgccaggtggcgggctgatgggcaagttcgtgctgaaggcgtcgctgagcgcccctggcagcgagtacggcagcccgtcggtcatcagcgtcagcaaaggcagccctgacggcagccacccggtggtggtggcgccctacaacggcgggccgccgcgcacgtgccccaagatcaagcaggaggcggtctcttcgtgcacccacttgggcgctggaccccctctcagcaatggccaccggccggctgcacacgacttccccctggggcggcagctccccagcaggactaccccgaccctgggtcttgaggaagtgctgagcagcagggactgtcaccctgccctgccgcttcctcccggcttccatccccacccggggcccaattacccatccttcctgcccgatcagatgcagccgcaagtcccgccgctccattaccaagagctcatgccacccggttcctgcatgccagaggagcccaagccaaagaggggaagacgatcgtggccccggaaaaggaccgccacccacacttgtgattacgcgggctgcggcaaaacctacacaaagagttcccatctcaaggcacacctgcgaacccacacaggtgagaaaccttaccactgtgactgggacggctgtggatggaaattcgcccgctcagatgaactgaccaggcactaccgtaaacacacggggcaccgcccgttccagtgccaaaaatgcgaccgagcattttccaggtcggaccacctcgccttacacatgaagaggcatttt

SEQ ID NO: 144456 - RNA, 1437 nt, Artificial Sequence
  derived and/or modified sequence
augaggcagccaccuggcgagucugacauggcugucagcgacgcgcugcucccaucuuucuccacguucgcgucuggcccggcgggaagggagaagacacugcgucaagcaggugccccgaauaaccgcuggcgggaggagcucucccacaugaagcgacuucccccagugcuucccggccgccccuaugaccuggcggcggcgaccguggccacagaccuggagagcggcggagccggugcggcuugcggcgguagcaaccuggcgccccuaccucggagagagaccgaggaguucaacgaucuccuggaccuggacuuuauucucuccaauucgcugacccauccuccggagucaguggccgccaccguguccucgucagcgucagccuccucuucgucgucgccgucgagcagcggcccugccagcgcgcccuccaccugcagcuucaccuauccgauccgggccgggaacgacccgggcguggcgccgggcggcacgggcggaggccuccucuauggcagggaguccgcucccccuccgacggcucccuucaaccuggcggacaucaacgacgugagccccucgggcggcuucguggccgagcuccugcggccagaauuggacccgguguacauuccgccgcagcagccgcagccgccagguggcgggcugaugggcaaguucgugcugaaggcgucgcugagcgccccuggcagcgaguacggcagcccgucggucaucagcgucagcaaaggcagcccugacggcagccacccgguggugguggcgcccuacaacggcgggccgccgcgcacgugccccaagaucaagcaggaggcggucucuucgugcacccacuugggcgcuggacccccucucagcaauggccaccggccggcugcacacgacuucccccuggggcggcagcuccccagcaggacuaccccgacccugggucuugaggaagugcugagcagcagggacugucacccugcccugccgcuuccucccggcuuccauccccacccggggcccaauuacccauccuuccugcccgaucagaugcagccgcaagucccgccgcuccauuaccaagagcucaugccacccgguuccugcaugccagaggagcccaagccaaagaggggaagacgaucguggccccggaaaaggaccgccacccacacuugugauuacgcgggcugcggcaaaaccuacacaaagaguucccaucucaaggcacaccugcgaacccacacaggugagaaaccuuaccacugugacugggacggcuguggauggaaauucgcccgcucagaugaacugaccaggcacuaccguaaacacacggggcaccgcccguuccagugccaaaaaugcgaccgagcauuuuccaggucggaccaccucgccuuacacaugaagaggcauuuu

SEQ ID NO: 144457 - protein, 443 aa, Artificial Sequence
  derived and/or modified sequence
MSDMEDDFMCDDEEDYDLEYSEDSNSEPNVDLENQYYNSKALKEDDPKAALSSFQKVLELEGEKGEWGFKALKQMIKINFKLTNFPEMMNRYKQLLTYIRSAVTRNYSEKSINSILDYISTSKQMDLLQEFYETTLEALKDAKNDRLWFKTNTKLGKLYLEREEYGKLQKILRQLHQSCQTDDGEDDLKKGTQLLEIYALEIQMYTAQKNNKKLKALYEQSLHIKSAIPHPLIMGVIRECGGKMHLREGEFEKAHTDFFEAFKNYDESGSPRRTTCLKYLVLANMLMKSGINPFDSQEAKPYKNDPEILAMTNLVSAYQNNDITEFEKILKTNHSNIMDDPFIREHIEELLRNIRTQVLIKLIKPYTRIHIPFISKELNIDVADVESLLVQCILDNTIHGRIDQVNQLLELDHQKRGGARYTALDKWTNQLNSLNQAVVSKLA

SEQ ID NO: 144458 - DNA, 4103 bp, Artificial Sequence
  derived and/or modified sequence
agctgagagtgacgcctctgagccgcggaggattgtgggaggaggttgtctccaatttctcctccccctcccggccaagatgtctgacatggaggatgatttcatgtgcgatgatgaggaggactacgacctggaatactctgaagatagtaactccgagccaaatgtggatttggaaaatcagtactataattccaaagcattaaaagaagatgacccaaaagcggcattaagcagtttccaaaaggttttggaacttgaaggtgaaaaaggagaatggggatttaaagcactgaaacaaatgattaagattaacttcaagttgacaaactttccagaaatgatgaatagatataagcagctattgacctatattcggagtgcagtcacaagaaattattctgaaaaatccattaattctattcttgattatatctctacttctaaacagatggatttactgcaggaattctatgaaacaacactggaagctttgaaagatgctaagaatgatagactgtggtttaagacaaacacaaagcttggaaaattatatttagaacgagaggaatatggaaagcttcaaaaaattttacgccagttacatcagtcgtgccagactgatgatggagaagatgatctgaaaaaaggtacacagttattagaaatatatgctttggaaattcaaatgtacacagcacagaaaaataacaaaaaacttaaagcactctatgaacagtcacttcacatcaagtctgccatccctcatccactgattatgggagttatcagagaatgtggtggtaaaatgcacttgagggaaggtgaatttgaaaaggcacacactgatttttttgaagccttcaagaattatgatgaatctggaagtccaagacgaaccacttgcttaaaatatttggtcttagcaaatatgcttatgaaatcgggaataaatccatttgactcacaggaggccaagccgtacaaaaatgatccagaaattttagcaatgacgaatttagtaagtgcctatcagaataatgacatcactgaatttgaaaagattctaaaaacaaatcacagcaacatcatggatgatcctttcataagagaacacattgaagagcttttgcgaaacatcagaacacaagtgcttataaaattaattaagccttacacaagaatacatattccttttatttctaaggagttaaacatagatgtagctgatgtggagagcttgctggtgcagtgcatattggataacactattcatggccgaattgatcaagtcaaccaactccttgaactggatcatcagaagaggggtggtgcacgatatactgcactagataaatggaccaaccaactaaattctctcaaccaggctgtagtcagtaaactggcttaacagagaacaagcttttacagacgtccttaaggcaacagtgcagagatgtaatccttaaaagaactgggaatggcaaaactactgtcggttgatgtgtcctgaaaattattggagttatggcagaagtgcttttttgatcaactggtttgtgttttgctgctgcatttatcccaagaaaaacagctttaatctccagaagaaaaccaaaataccatgggatttatgctgtattgacatcttgccctaaacgtacaacatcatagtaatttgtcatgggcaacatgaccagagagaagatttttgtcatgattttaaatacactgacacgctactgttggttaaatttaaacatgttttacctgcagaaattctctcacaaataacctgcaataacttgaaatgcatacccttttgaacacttccttttctcatgtataaattaaaatgtttgctgcattttgcaaaatgtcaattctctaaaaatgtgtccgtatatttctgtacctgcagtgtagtaaaggtttagacgaaaccccataattatagtggcatactgtcacttaggtttcaagcagcaaaataaacagtgcagctcagaaattgtagtttggttcttgatgtgtttttattacatttggagttgttttgttttttagtaccttcgaaatttcaaattattttatcttcagttaatgattttaaaaagcctgggggcaaataagttggttatttgctttcaagtttttaaaagtagtctttattgatagagtaaggagaactactttctaacaaaacacgtgcatagttatgacagtgatgctttaaaggaataaaattctttttttttaaagagtgatattccttttcaaaagaatactaactctcagaatgttcactttaaacgaatatgccagaacatagacagctaaatgaatgttactctgcatagtgatcatgctggaaggttatttcctaatgccagcaatctaccattgcccaaaacctgctgagtttactcttttagaattgcattcaaagttaatttgtcacacacactaaactttatgattatacattgttttaaaaaatatagtattaggaagcttgattatttttagttaccattacttggcaccaaatgaaagtttccaaaacttccacctaactttgaggtaatgcagaaagtatataactggctttgaaggcaatcccaaaagagttttaaaggttttttgagcagtggcagtatacttaggagaatgaactgtggccttccaaggtaactaccttaaaggaactcagctcatttgaatgtattgagttttggatgtatttgtttcattttttaaaaagttcacattattttatagtgtcgaaaggaagaactaggattaacataatttctttggtttttctattgcttgttattattatgtaaaaactgggtggcagttcagaaggaagattgtggttacagaagagtgacaaccaagaattttttgatcattaaatcagattttataaacagtggaaggagcatggacttaaaacaaggcatgcttattcggttttgtcaaaattttacgaaaatatgtgatatatatttatactaaaaatatataatccttagatttagaaaagcaatcagttaatgtctttagcagactaaagcagtattaaacacaggtacaagttggaaattgtagaaaacggaaagaaaacaaaagacaaaatgtctatggtagggaataaaagtttaagatattataaaattatgtgtattttctcttttacataaatcatttgtgaaaagtgtgctaaactttttttacaagagtgatattaattaggatttatttttcaatataatttggagaccctttgttatccaaataaaaatgatgagtttttgtgcctgtattcaaatatgtatgcatgtgataacccttgaaagctaaagcccttcttaacttttgagttgatggaattagaattcaaagatttgaatgaaatgatttaacctttatcctccaattcttacagtgcccagttctcctgtgctatctttgctttgtacaatagtgcatcttccactttctagagagaaagcatgcacttgttatttggaaaactgggctaaatatataacagtatccaaagttataccataataatttattgtaattgtgtattacatagctttgtttacccagatataggtgcgttcttttttttctgttagtcatctgtgacttttgttctggaatacaggtttttaaatatatcttaacagtctgactaacttaaaataatttattcttcccttaaaacatttttctgtgtttttgtgcatcaaatattgtagagttgaaatcttagagattgcttatcgaaatataaatttaggggaagttaaaaatcgattggcaaatttgtagcatttattcactgattaaatcttttccacttttgtgaaaaccataccagtggtttacatcatattgtaatgtgttcatctcattcttctttttatccctaaacctagctaaaagttactgcaaagaaatctttggctgccacaagtagatgctctctactacaagagctggatttccattactcactcttgctcttacattaaagttgttgattaaatactttttctctacatcttaaaaaaaaaaaaaaaaaa

SEQ ID NO: 144459 - DNA, 1332 bp, Artificial Sequence
  derived and/or modified sequence
atgtccgatatggaggatgatttcatgtgtgatgatgaagaagactatgatcttgagtatagcgaggattcaaattcagaacctaacgtagacctggaaaaccagtactacaactccaaggccctgaaggaggatgacccaaaggccgccctgtcttctttccagaaggttctcgagctggaaggcgaaaagggtgaatggggattcaaggctctgaaacagatgatcaaaattaactttaagctcacaaactttccggaaatgatgaaccgctataagcagctgctgacttacatccgcagtgccgtcacgagaaactactctgagaagagcattaatagcatcctcgactacatctccacttcaaagcagatggacttgctgcaggaattctatgaaaccaccctcgaagccctgaaggatgccaagaatgacaggctctggttcaagacgaacacgaagctcgggaagctgtacctggagcgagaggaatatggcaagttgcagaaaattttgcggcagttgcaccagtcatgtcaaacagacgatggagaggacgacctgaagaagggcacccaactcctggagatctacgctctggagattcagatgtacaccgcacagaagaataataaaaagctcaaagctctttacgaacaaagtttgcatatcaagagtgccatccctcaccctctgatcatgggggttattagggagtgtggcggaaaaatgcatctaagggaaggggagtttgagaaggcgcacacggatttcttcgaggcattcaagaactacgatgagagtgggagtcctaggagaaccacttgcctgaagtacctggtcttagctaacatgctgatgaagagtggtattaaccccttcgatagtcaagaagccaagccgtataaaaacgatcccgagattctcgcaatgaccaacctagtttctgcataccagaacaacgatattacagaattcgagaagattcttaagacaaaccacagcaatatcatggacgaccccttcatccgagagcatatcgaagaattgcttaggaatatccgcactcaggtgctcattaagcttatcaagccctatacacgaattcacatcccatttatttcaaaggagctcaatatcgacgtggcagacgtggagtccctacttgtacagtgcattcttgacaataccatacacggcaggattgaccaggttaatcagctgctcgaattagatcaccaaaaaagaggaggggcaaggtataccgctcttgataagtggaccaatcagcttaattcacttaaccaagcagtcgtgagcaagctcgcctag

SEQ ID NO: 144460 - DNA, 1332 bp, Artificial Sequence
  derived and/or modified sequence
atgtctgacatggaggatgacttcatgtgtgatgatgaggaggactatgacctggagtacagcgaggacagcaacagcgagcccaacgtggacctggagaaccagtactacaacagcaaggccctgaaggaggatgaccccaaggccgccctgagcagcttccagaaggtgctggagctggagggggagaagggggagtggggcttcaaggccctgaagcagatgatcaagatcaacttcaagctgaccaacttccctgagatgatgaaccgctacaagcagctgctgacctacatccgctctgctgtgaccaggaactacagcgagaagagcatcaacagcatcctggactacatcagcaccagcaagcagatggacctgctgcaggagttctatgagaccaccctggaggccctgaaggatgccaagaatgaccggctgtggttcaagaccaacaccaagctgggcaagctgtacctggagcgggaggagtatggcaagctgcagaagatcctgcggcagctgcaccagagctgccagacagatgatggagaagatgacctgaagaagggcacccagctgctggagatctatgccctggagatccagatgtacacagcccagaagaacaacaagaagctgaaggccctgtatgagcagagcctgcacatcaagagcgccatcccccaccccctcatcatgggcgtcatcagagaatgtggcggcaagatgcacctgcgggagggggagtttgagaaggcccacacagacttctttgaggccttcaagaactatgatgagagcggcagccccaggaggaccacctgcctgaagtacctggtgctggccaacatgctgatgaagagcggcatcaacccctttgacagccaggaggccaagccctacaagaatgaccctgagatcctggccatgaccaacctggtgtctgcctaccagaacaatgacatcacagaatttgagaagatcctgaagaccaaccacagcaacatcatggatgaccccttcatccgggagcacatcgaggagctgctgaggaacatccgcacccaggtgctgatcaagctgatcaagccctacacccgcatccacatccccttcatcagcaaggagctgaacattgatgtggctgatgtggagagcctgctggtgcagtgcatcctggacaacaccatccacggcagaattgaccaggtgaaccagctgctggagctggaccaccagaagagaggaggagcccgctacacagccctggacaagtggaccaaccagctgaacagcctgaaccaggccgtggtgtccaagctggcctag

SEQ ID NO: 144461 - DNA, 1332 bp, Artificial Sequence
  derived and/or modified sequence
atgagcgacatggaggacgacttcatgtgcgacgacgaggaggactacgacctggaatacagcgaggacagcaacagcgagccgaacgtagaccttgaaaatcaatattacaactcgaaagcgctgaaggaggatgatcccaaagccgccctatccagttttcagaaagtactagagttggagggcgagaaaggcgaatgggggtttaaagccctcaagcaaatgattaagattaacttcaaattaaccaacttcccagaaatgatgaatcggtataaacagctgctgacatatataaggtccgcagtgacccgcaactattccgagaagtccatcaatagtatattggattatattagtacttccaaacagatggatctgcttcaggagttttacgaaactactctggaagcgctcaaggacgccaaaaacgatagactgtggttcaaaacaaacactaaactcggcaaactgtacctcgagcgggaggaatacgggaagctgcaaaagatcctgcgccagctccaccagtcatgccagacagatgatggcgaagatgatctgaaaaaggggactcagctgctagaaatctatgccctcgagatccagatgtacacggcccagaaaaacaataaaaaactgaaggccctctatgagcagtcactgcatataaaatctgcaatcccccatccgctaatcatgggggtgattagggaatgcggtggaaaaatgcatctgagagagggagagttcgagaaggcccacaccgacttctttgaggcattcaagaactatgacgagagcggttctcctcggcgcactacttgtttgaaatacctggtgctggcaaatatgctcatgaagtcaggaattaacccatttgattcacaggaagcaaaaccatataagaatgatcctgagatactggccatgacaaaccttgttagcgcctatcagaacaatgacataacagagtttgagaaaatattgaaaacaaatcattctaatatcatggatgacccattcatccgggagcacattgaggagctgctccgaaacatccgcacccaggtactcattaaactgattaagccgtacacgcggatccacatcccctttatatctaaagaattgaacattgacgtggccgacgtggaatctctactcgtgcagtgcattctcgacaatactatccacggtaggatagatcaggtgaaccagctgctggaactggatcaccagaagaggggaggtgcccgatacacagcactggataagtggacgaatcagctaaactccctgaaccaagctgtggtttcaaaactggcctag

SEQ ID NO: 144462 - DNA, 1332 bp, Artificial Sequence
  derived and/or modified sequence
atgagcgatatggaagacgactttatgtgcgatgatgaagaggactatgatcttgagtacagtgaggactcgaactcagagcctaatgtcgacctggaaaaccaatactacaattccaaagcattgaaagaagacgatcccaaagctgctctgagctccttccaaaaagtccttgaactggaaggcgagaagggagagtggggctttaaggccctaaagcaaatgatcaagattaacttcaagctcactaactttccagagatgatgaacagatacaagcagctattgacatacatcaggtcagccgtaacccgcaattatagcgagaagtccatcaactcaatcctcgactatatatcaacgagtaaacaaatggaccttttgcaagagttctacgaaacaacgctggaggccctgaaggacgcaaaaaacgatagactgtggtttaagacaaataccaagttagggaagctgtacctcgaacgagaagaatacgggaagctgcagaaaatcttaagacagctgcatcagtcatgtcagaccgacgatggcgaggacgacctcaaaaagggtacccagttactggaaatctatgctttagaaatccagatgtacaccgcccaaaaaaacaacaagaaactaaaggcactgtatgaacagtccctgcacatcaaatccgctatcccacacccattgattatgggcgtcatcagagaatgtggtggcaagatgcatctcagagagggggagttcgagaaagcccacactgactttttcgaagcctttaaaaactacgatgaatcggggagcccgcgtcgaacaacctgtctcaaatacctggtcctggccaacatgctcatgaaaagcggaattaacccttttgattcacaggaggcaaaaccctataagaatgatcctgagattttagccatgaccaacctcgtaagcgcataccagaataacgacataacagaatttgaaaagattttgaaaactaatcactccaatatcatggatgatccatttatccgggagcatatcgaagaattgctccgcaatatccgaactcaggtcctgatcaagcttatcaaaccgtacactaggattcacattccctttatctccaaggagttaaacatagacgtggctgatgttgaatccctcctcgttcagtgcatactggataacactatccatggacggatagatcaagtgaatcaactcttggagcttgaccaccagaaacgcggaggagcgaggtacaccgcccttgataagtggactaatcaactgaattccctgaatcaggcggtggtgtctaagctggcctag

SEQ ID NO: 144463 - DNA, 4061 bp, Artificial Sequence
  derived and/or modified sequence
agagtgacgcctctgagccgcggaggattgtgggaggaggttgtctccaatttctcctccccctcccggccaagatgtctgacatggaggatgatttcatgtgcgatgatgaggaggactacgacctggaatactctgaagatagtaactccgagccaaatgtggatttggaaaatcagtactataattccaaagcattaaaagaagatgacccaaaagcggcattaagcagtttccaaaaggttttggaacttgaaggtgaaaaaggagaatggggatttaaagcactgaaacaaatgattaagattaacttcaagttgacaaactttccagaaatgatgaatagatataagcagctattgacctatattcggagtgcagtcacaagaaattattctgaaaaatccattaattctattcttgattatatctctacttctaaacagatggatttactgcaggaattctatgaaacaacactggaagctttgaaagatgctaagaatgatagactgtggtttaagacaaacacaaagcttggaaaattatatttagaacgagaggaatatggaaagcttcaaaaaattttacgccagttacatcagtcgtgccagactgatgatggagaagatgatctgaaaaaaggtacacagttattagaaatatatgctttggaaattcaaatgtacacagcacagaaaaataacaaaaaacttaaagcactctatgaacagtcacttcacatcaagtctgccatccctcatccactgattatgggagttatcagagaatgtggtggtaaaatgcacttgagggaaggtgaatttgaaaaggcacacactgatttttttgaagccttcaagaattatgatgaatctggaagtccaagacgaaccacttgcttaaaatatttggtcttagcaaatatgcttatgaaatcgggaataaatccatttgactcacaggaggccaagccgtacaaaaatgatccagaaattttagcaatgacgaatttagtaagtgcctatcagaataatgacatcactgaatttgaaaagattctaaaaacaaatcacagcaacatcatggatgatcctttcataagagaacacattgaagagcttttgcgaaacatcagaacacaagtgcttataaaattaattaagccttacacaagaatacatattccttttatttctaaggagttaaacatagatgtagctgatgtggagagcttgctggtgcagtgcatattggataacactattcatggccgaattgatcaagtcaaccaactccttgaactggatcatcagaagaggggtggtgcacgatatactgcactagataaatggaccaaccaactaaattctctcaaccaggctgtagtcagtaaactggcttaacagagaacaagcttttacagacgtccttaaggcaacagtgcagagatgtaatccttaaaagaactgggaatggcaaaactactgtcggttgatgtgtcctgaaaattattggagttatggcagaagtgcttttttgatcaactggtttgtgttttgctgctgcatttatcccaagaaaaacagctttaatctccagaagaaaaccaaaataccatgggatttatgctgtattgacatcttgccctaaacgtacaacatcatagtaatttgtcatgggcaacatgaccagagagaagatttttgtcatgattttaaatacactgacacgctactgttggttaaatttaaacatgttttacctgcagaaattctctcacaaataacctgcaataacttgaaatgcatacccttttgaacacttccttttctcatgtataaattaaaatgtttgctgcattttgcaaaatgtcaattctctaaaaatgtgtccgtatatttctgtacctgcagtgtagtaaaggtttagacgaaaccccataattatagtggcatactgtcacttaggtttcaagcagcaaaataaacagtgcagctcagaaattgtagtttggttcttgatgtgtttttattacatttggagttgttttgttttttagtaccttcgaaatttcaaattattttatcttcagttaatgattttaaaaagcctgggggcaaataagttggttatttgctttcaagtttttaaaagtagtctttattgatagagtaaggagaactactttctaacaaaacacgtgcatagttatgacagtgatgctttaaaggaataaaattctttttttttaaagagtgatattccttttcaaaagaatactaactctcagaatgttcactttaaacgaatatgccagaacatagacagctaaatgaatgttactctgcatagtgatcatgctggaaggttatttcctaatgccagcaatctaccattgcccaaaacctgctgagtttactcttttagaattgcattcaaagttaatttgtcacacacactaaactttatgattatacattgttttaaaaaatatagtattaggaagcttgattatttttagttaccattacttggcaccaaatgaaagtttccaaaacttccacctaactttgaggtaatgcagaaagtatataactggctttgaaggcaatcccaaaagagttttaaaggttttttgagcagtggcagtatacttaggagaatgaactgtggccttccaaggtaactaccttaaaggaactcagctcatttgaatgtattgagttttggatgtatttgtttcattttttaaaaagttcacattattttatagtgtcgaaaggaagaactaggattaacataatttctttggtttttctattgcttgttattattatgtaaaaactgggtggcagttcagaaggaagattgtggttacagaagagtgacaaccaagaattttttgatcattaaatcagattttataaacagtggaaggagcatggacttaaaacaaggcatgcttattcggttttgtcaaaattttacgaaaatatgtgatatatatttatactaaaaatatataatccttagatttagaaaagcaatcagttaatgtctttagcagactaaagcagtattaaacacaggtacaagttggaaattgtagaaaacggaaagaaaacaaaagacaaaatgtctatggtagggaataaaagtttaagatattataaaattatgtgtattttctcttttacataaatcatttgtgaaaagtgtgctaaactttttttacaagagtgatattaattaggatttatttttcaatataatttggagaccctttgttatccaaataaaaatgatgagtttttgtgcctgtattcaaatatgtatgcatgtgataacccttgaaagctaaagcccttcttaacttttgagttgatggaattagaattcaaagatttgaatgaaatgatttaacctttatcctccaattcttacagtgcccagttctcctgtgctatctttgctttgtacaatagtgcatcttccactttctagagagaaagcatgcacttgttatttggaaaactgggctaaatatataacagtatccaaagttataccataataatttattgtaattgtgtattacatagctttgtttacccagatataggtgcgttcttttttttctgttagtcatctgtgacttttgttctggaatacaggtttttaaatatatcttaacagtctgactaacttaaaataatttattcttcccttaaaacatttttctgtgtttttgtgcatcaaatattgtagagttgaaatcttagagattgcttatcgaaatataaatttaggggaagttaaaaatcgattggcaaatttgtagcatttattcactgattaaatcttttccacttttgtgaaaaccataccagtggtttacatcatattgtaatgtgttcatctcattcttctttttatccctaaacctagctaaaagttactgcaaagaaatctttggctgccacaagtagatgctctctactacaagagctggatttccattactcactcttgctcttacattaaagttgttgattaaa

SEQ ID NO: 144464 - DNA, 1332 bp, Artificial Sequence
  derived and/or modified sequence
atgagcgacatggaggacgacttcatgtgcgacgacgaggaggactacgacctggagtacagcgaggacagcaacagcgagcccaacgtggacctggagaaccagtactacaacagcaaggccctgaaggaggacgaccccaaggccgccctgagcagcttccagaaggtgctggagctggagggcgagaagggcgagtggggcttcaaggccctgaagcagatgatcaagatcaacttcaagctgaccaacttccccgagatgatgaacagatacaagcagctgctgacctacatcagaagcgccgtgaccagaaactacagcgagaagagcatcaacagcatcctggactacatcagcaccagcaagcagatggacctgctgcaggagttctacgagaccaccctggaggccctgaaggacgccaagaacgacagactgtggttcaagaccaacaccaagctgggcaagctgtacctggagagagaggagtacggcaagctgcagaagatcctgagacagctgcaccagagctgccagaccgacgacggcgaggacgacctgaagaagggcacccagctgctggagatctacgccctggagatccagatgtacaccgcccagaagaacaacaagaagctgaaggccctgtacgagcagagcctgcacatcaagagcgccatcccccaccccctgatcatgggcgtgatcagagagtgcggcggcaagatgcacctgagagagggcgagttcgagaaggcccacaccgacttcttcgaggccttcaagaactacgacgagagcggcagccccagaagaaccacctgcctgaagtacctggtgctggccaacatgctgatgaagagcggcatcaaccccttcgacagccaggaggccaagccctacaagaacgaccccgagatcctggccatgaccaacctggtgagcgcctaccagaacaacgacatcaccgagttcgagaagatcctgaagaccaaccacagcaacatcatggacgaccccttcatcagagagcacatcgaggagctgctgagaaacatcagaacccaggtgctgatcaagctgatcaagccctacaccagaatccacatccccttcatcagcaaggagctgaacatcgacgtggccgacgtggagagcctgctggtgcagtgcatcctggacaacaccatccacggcagaatcgaccaggtgaaccagctgctggagctggaccaccagaagagaggcggcgccagatacaccgccctggacaagtggaccaaccagctgaacagcctgaaccaggccgtggtgagcaagctggcctag

SEQ ID NO: 144465 - protein, 432 aa, Artificial Sequence
  derived and/or modified sequence
MDEAVGDLKQALPCVAESPTVHVEVHQRGSSTAKKEDINLSVRKLLNRHNIVFGDYTWTEFDEPFLTRNVQSVSIIDTELKVKDSQPIDLSACTVALHIFQLNEDGPSSENLEEETENIIAANHWVLPAAEFHGLWDSLVYDVEVKSHLLDYVMTTLLFSDKNVNSNLITWNRVVLLHGPPGTGKTSLCKALAQKLTIRLSSRYRYGQLIEINSHSLFSKWFSESGKLVTKMFQKIQDLIDDKDALVFVLIDEVESLTAARNACRAGTEPSDAIRVVNAVLTQIDQIKRHSNVVILTTSNITEKIDVAFVDRADIKQYIGPPSAAAIFKIYLSCLEELMKCQIIYPRQQLLTLRELEMIGFIENNVSKLSLLLNDISRKSEGLSGRVLRKLPFLAHALYVQAPTVTIEGFLQALSLAVDKQFEERKKLAAYI

SEQ ID NO: 144466 - protein, 196 aa, Artificial Sequence
  derived and/or modified sequence
MDEAVGDLKQALPCVAESPTVHVEVHQRGSSTAKKEDINLSVRKLLNRHNIVFGDYTWTEFDEPFLTRNVQSVSIIDTELKVKDSQPIDLSACTVALHIFQLNEDGPSSENLEEETENIIAANHWVLPAAEFHGLWDSLVYDVEVKSHLLDYVMTTLLFSDKNVNSNLITIEGFLQALSLAVDKQFEERKKLAAYI

SEQ ID NO: 144467 - DNA, 2408 bp, Artificial Sequence
  derived and/or modified sequence
cgggtcaggaggtggtgcgcctcgcgcggcagattcgaagctagggcggggcccgcgggctgaggcagcggctgtggcggcgacgctgggcgtgaggtggcggcggccgcgccctggttgggtccccactgctctcgggggcgccatggacgaggccgtgggcgacctgaagcaggcgcttccctgtgtggccgagtcgccaacggtccacgtggaggtgcatcagcgcggcagcagcactgcaaagaaagaagacataaacctgagtgttagaaagctactcaacagacataatattgtgtttggtgattacacatggactgagtttgatgaaccttttttgaccagaaatgtgcagtctgtgtctattattgacacagaattaaaggttaaagactcacagcccatcgatttgagtgcatgcactgttgcacttcacattttccagctgaatgaagatggccccagcagtgaaaatctggaggaagagacagaaaacataattgcagcaaatcactgggttctacctgcagctgaattccatgggctttgggacagcttggtatacgatgtggaagtcaaatcccatctcctcgattatgtgatgacaactttactgttttcagacaagaacgtcaacagcaacctcatcacctggaaccgggtggtgctgctccacggtcctcctggcactggaaaaacatccctgtgtaaagcgttagcccagaaattgacaattagactttcaagcaggtaccgatatggccaattaattgaaataaacagccacagcctcttttctaagtggttttcggaaagtggcaagctggtaaccaagatgtttcagaagattcaggatttgattgatgataaagacgccctggtgttcgtgctgattgatgaggtggagagtctcacagccgcccgaaatgcctgcagggcgggcaccgagccatcagatgccatccgcgtggtcaatgctgtcttgacccaaattgatcagattaaaaggcattccaatgttgtgattctgaccacttctaacatcaccgagaagatcgacgtggccttcgtggacagggctgacatcaagcagtacattgggccaccctctgcagcagccatcttcaaaatctacctctcttgtttggaagaactgatgaagtgtcagatcatataccctcgccagcagctgctgaccctccgagagctagagatgattggcttcattgaaaacaacgtgtcaaaattgagccttcttttgaatgacatttcaaggaagagcgagggcctcagcggccgggtcctgagaaaactcccctttctggctcatgcgctgtatgtccaggcccccaccgtcaccatagaggggttcctccaggccctgtctctggcagtggacaagcagtttgaagagagaaagaagcttgcagcttacatctgatcctgggcttccccatctggtgcttttcccatggagaacacacaaccagtaagtgaggttgccccacacagccgtctcccagggaatcccttctgcaaaccaaacgttacttagactgcaagctagaaagccaccaaggccaggctttgttaaaagaagtgtattctatttatgttgttttaaaatgcatactgagagacaaacatcttgtcattttcactgtttgtaaaagataattcagattgtttgtctccttgtgaagaaccatcgaaacctgtttgttcccagcccacccccagtggatgggatgcataatgccagcaagttttgtttaacagcaaaaaaggaagattaatgcaggtgttatagaagccagaagagaaactgtgtcaccctaaagaagcatataatcatagcattaaaaatgcacacattactccaggtggaaggtggcaattgctttctgatatcagctcgtttgatttagtgcaaaaatgttttcaagactatttaatggatgtaaaaaagcctatttctacattataccaactgagaaaaaaatggtcggtaaagtgttctttcataataaataatcagacatggtcccatttgcaggaaaagtgcagactctgagtgttccagggaaacacatgctggacatcccttgtaacccggtatgggcgcccctgcattgctgggatgtttctgcccacggttttgtttgtgcaataacgttatcacatttctaatgaggattcacattaatataatataaaataaataggtcagttactggtctctttctccgaatgttatgttttgcttttatctcacagtaaaataaatataattaatggtttgcatgtgaaattcacttttgaaagaacatgttaccttaccttttgttttagaagttttcaagtattaaaatattttttagaattttaaaaaaaaaaaaaaaaaa

SEQ ID NO: 144468 - DNA, 1299 bp, Artificial Sequence
  derived and/or modified sequence
atggacgaggccgtgggcgacctgaagcaggccctgccctgcgtggccgagagccccaccgtgcacgtggaggtgcaccagagaggcagcagcaccgccaagaaggaggacatcaacctgagcgtgagaaagctgctgaacagacacaacatcgtgttcggcgactacacctggaccgagttcgacgagcccttcctgaccagaaacgtgcagagcgtgagcatcatcgacaccgagctgaaggtgaaggacagccagcccatcgacctgagcgcctgcaccgtggccctgcacatcttccagctgaacgaggacggccccagcagcgagaacctggaggaggagaccgagaacatcatcgccgccaaccactgggtgctgcccgccgccgagttccacggcctgtgggacagcctggtgtacgacgtggaggtgaagagccacctgctggactacgtgatgaccaccctgctgttcagcgacaagaacgtgaacagcaacctgatcacctggaacagagtggtgctgctgcacggcccccccggcaccggcaagaccagcctgtgcaaggccctggcccagaagctgaccatcagactgagcagcagatacagatacggccagctgatcgagatcaacagccacagcctgttcagcaagtggttcagcgagagcggcaagctggtgaccaagatgttccagaagatccaggacctgatcgacgacaaggacgccctggtgttcgtgctgatcgacgaggtggagagcctgaccgccgccagaaacgcctgcagagccggcaccgagcccagcgacgccatcagagtggtgaacgccgtgctgacccagatcgaccagatcaagagacacagcaacgtggtgatcctgaccaccagcaacatcaccgagaagatcgacgtggccttcgtggacagagccgacatcaagcagtacatcggcccccccagcgccgccgccatcttcaagatctacctgagctgcctggaggagctgatgaagtgccagatcatctaccccagacagcagctgctgaccctgagagagctggagatgatcggcttcatcgagaacaacgtgagcaagctgagcctgctgctgaacgacatcagcagaaagagcgagggcctgagcggcagagtgctgagaaagctgcccttcctggcccacgccctgtacgtgcaggcccccaccgtgaccatcgagggcttcctgcaggccctgagcctggccgtggacaagcagttcgaggagagaaagaagctggccgcctacatctag

SEQ ID NO: 144469 - DNA, 1299 bp, Artificial Sequence
  derived and/or modified sequence
atggatgaggccgtgggtgacctcaaacaggccctgccatgcgtggccgagagtcctaccgttcatgtggaagtacaccagcgtggctccagcacagcgaagaaggaggatattaatctctctgttcgtaagctgctaaataggcataatattgtgtttggggactatacatggaccgaattcgacgagcctttcctgacaagaaacgtgcagagcgtgagcattatcgacaccgagctgaaggttaaggacagtcaacctatcgacctaagcgcttgtaccgtggctctgcatatttttcaactgaatgaggatggaccttcctcggaaaacttggaagaggaaactgagaacatcatcgctgccaatcattgggtcctgcccgcagctgaattccacggcctgtgggactcgctagtgtacgacgtggaggtgaaatcacacctgctggattatgtgatgacaaccttactgtttagcgataagaacgtgaactccaatttgataacctggaatcgggtggttctgttacacgggccaccaggaacaggcaagacatccctctgtaaggcccttgctcaaaagctaaccatccggctatcaagtcgttacaggtacggacaactgattgagatcaatagtcatagcctgttctcaaaatggttctcggaatctggcaagctggtgacaaagatgttccagaaaatacaggatctaatcgatgataaagacgctcttgtgttcgtgctgatcgatgaggtcgaatccctgaccgcagcccgaaacgcatgcagagcaggaaccgaaccatctgacgcaataagagtggtcaacgccgttcttactcagattgaccagataaaacgacatagtaacgtggtaattctgacgacctcgaacattacggagaagatcgacgttgcgtttgttgatagggctgatataaaacaatacatcggaccaccttccgcggccgctatcttcaaaatatacctgagttgtctggaggaactgatgaaatgccagatcatatatcctcgccagcagttgctgacgctccgggagctagagatgatagggttcatagagaataatgtgtccaagcttagtctgctcttaaacgacatcagcaggaagtcggagggcctgagtggccgggtgctccggaagttgcctttcctcgcacacgccctgtacgtccaagcacctaccgtaacaatagaaggatttcttcaggccctgtcattggccgtggataagcagttcgaagagcgcaagaaattggccgcttatatctag

SEQ ID NO: 144470 - DNA, 1299 bp, Artificial Sequence
  derived and/or modified sequence
atggatgaggccgtgggggacctgaagcaggccctgccctgtgtggccgagagccccaccgtgcacgtggaggtgcaccagaggggcagcagcacagccaagaaggaggacatcaacctgtctgtgaggaagctgctgaacagacacaacatcgtgtttggagactacacctggacagaatttgatgagcccttcctgaccagaaatgtgcagagcgtgtccatcatcgacacagagctgaaggtgaaggacagccagcccatcgacctgagcgcctgcaccgtggccctgcacatcttccagctgaatgaagatggccccagcagcgagaacctggaggaggagacagagaacatcatcgccgccaaccactgggtgctgcctgctgctgagttccacggcctgtgggacagcctggtgtatgatgtggaggtgaagagccacctgctggactatgtgatgaccaccctgctcttcagtgacaagaatgtgaacagcaacctgatcacctggaacagagtggtgctgctgcacggccccccaggcaccgggaagaccagcctgtgcaaggccctggcccagaagctgaccatccggctgagcagccgctaccgctatggccagctgattgagatcaacagccacagcctcttcagcaagtggttcagcgagagcggcaagctggtgaccaagatgttccagaagatccaggacctgattgatgacaaggatgccctggtgtttgtgctgattgatgaggtggagagcctgacagctgccagaaatgcctgccgggccggcacagagcccagtgatgccatccgggtggtgaatgctgtgctgacccagattgaccagatcaagaggcacagcaatgtggtgatcctgaccaccagcaacatcacagagaagattgatgtggcctttgtggacagagctgacatcaagcagtacatcggccccccatctgctgctgccatcttcaagatctacctgagctgcctggaggagctgatgaagtgccagatcatctacccccggcagcagctgctgaccctgcgggagctggagatgattggcttcattgaaaataatgtgtccaagctgagcctgctgctgaatgacatcagcaggaagtctgagggcctgagcggccgggtgctgaggaagctgcccttcctggcccacgccctgtatgtgcaggcccccaccgtgaccatcgagggcttcctgcaggccctgagcctggccgtggacaagcagtttgaggagaggaagaagctggccgcctacatctag

SEQ ID NO: 144471 - DNA, 1299 bp, Artificial Sequence
  derived and/or modified sequence
atggacgaggccgtgggcgacctgaagcaggccctgccctgcgtggccgagtcacctacagtccacgtggaggtgcaccagagaggctcctccactgccaaaaaggaagacataaacctttcagtacggaaactgttgaaccgtcacaacattgtttttggcgattacacgtggacggaatttgacgaacccttcttaacgaggaacgtgcagagtgtttcaattatcgacacagagctcaaggtcaaggatagtcagccgatcgacctttcagcctgcaccgtcgcattgcacatcttccagctcaatgaggatgggcccagtagcgaaaatctggaagaagaaactgaaaatattattgccgctaatcactgggtcctcccggcagctgaattccatggactgtgggactctctcgtatacgatgtggaggtcaaatcacaccttttggattatgttatgaccaccttgctattttcagacaagaatgtgaatagtaatcttattacttggaacagggtcgtgcttctacatggaccgcccggtaccggaaagacgagcctctgtaaggcacttgcccagaagctcacgattagactctcatcaaggtaccgatatgggcagttaatcgagattaactcccacagcttgttcagcaaatggttttcagagtcgggcaaactggtgacaaaaatgtttcagaagatacaggatttgatcgacgataaggacgctcttgtctttgtgctgattgacgaagtggagtcactgaccgctgctaggaacgcctgtagggcgggtactgagccttctgatgcaatcagggtggtgaacgccgtacttacgcagatcgatcagattaaacgccactcaaatgtcgtgatacttactacctctaatattacagagaagattgacgttgctttcgtcgatcgagctgacatcaagcagtacattggcccacctagtgcagcagcaattttcaagatttacttgagctgtctcgaagagctaatgaagtgtcagatcatctaccctagacagcagctgctcacccttagagaactggagatgattggttttattgaaaataacgtgtcaaagctgtccttgctgctgaatgacatctctcgaaagagcgaagggcttagcggtagagtactgagaaagctgccattcctggcacacgctctgtacgtccaggccccaaccgtgaccattgaggggtttctgcaggctctctccctggcagttgataagcaatttgaggagcggaagaagctggcggcgtacatctag

SEQ ID NO: 144472 - DNA, 1299 bp, Artificial Sequence
  derived and/or modified sequence
atggatgaggcagttggcgacttgaagcaggctctcccctgtgtggcggaatccccaacagttcacgtagaggtacatcaacgcggttccagtactgccaaaaaggaggatattaatctcagcgtgaggaaattgctaaatcggcacaatattgtgttcggggattatacttggacggaatttgacgagccgttcttgacacgtaacgttcagtctgtcagtataatcgatacagaactgaaggtgaaagacagccagcccattgacttaagcgcttgtactgtcgccctacatattttccagcttaatgaggacggacctagtagtgagaatctggaagaggaaactgaaaacattatagccgcaaaccactgggtgctgcccgctgctgaattccacggcctgtgggacagcctggtttacgatgtcgaggtaaaatcacatctgctggattacgttatgaccaccctccttttctctgacaaaaatgtgaattctaatctcatcacctggaatcgagtggtgctgctgcatgggcctcccggtacgggcaagacatcactgtgtaaggccctggctcagaagctgaccatacgtttaagctcccggtatcggtacgggcagctgatcgagattaactcacactcattgttttccaagtggttttctgagtcgggcaagttggtgacaaagatgtttcagaagattcaggacctcattgacgataaagacgctctggtattcgtactcatcgacgaggtcgagagtctgaccgccgctagaaatgcatgtagggccggaactgagccttctgatgctatcagggtcgtgaatgctgtcctgacacagatagatcaaatcaaacgacattctaatgtggttatcctaaccacttccaacatcactgagaaaattgacgtggccttcgttgatcgcgctgatattaaacagtatataggcccaccctccgctgccgcaatctttaagatatatttgagctgtcttgaggagctgatgaaatgtcagattatatatccgagacagcagctgttgactctgcgggaactagagatgattgggttcatcgaaaacaacgtgtctaaactttcactgctgttaaatgatatcagtagaaagagcgagggactgtctggcagagtgcttcggaagctgccctttctggcacacgctctgtacgtccaggcaccaacagtcactatagaaggttttctgcaggctttgagcctcgccgtggacaagcagttcgaagagcgcaagaaacttgccgcatatatctag

SEQ ID NO: 144473 - DNA, 1299 bp, Artificial Sequence
  derived and/or modified sequence
atggacgaagcagtgggggacctcaaacaagctctcccttgtgtggccgagtcccctaccgtccacgttgaggtgcatcagcggggcagctccacagctaagaaagaggatattaatctctcagttaggaaactcctcaacagacacaatatcgtcttcggggattacacctggaccgaatttgacgaaccgttccttacacgaaatgttcaatccgtgagtattatcgacacagaactgaaagtgaaggattcacaacctatcgacctgtccgcctgtactgtggccctgcatatctttcagcttaacgaagacgggcccagctcagagaatctagaagaagagacagaaaacattatcgccgccaatcactgggtgttgcccgccgctgagttccacggcttatgggacagtttagtatatgacgtggaggtgaagagccacctcctggactatgtgatgaccacacttctgttctccgataaaaatgtaaactccaatttaattacttggaacagggtggtgctgctgcacgggcctcccggtaccggtaaaacctccctatgcaaagctctggcacaaaagttaacaataagactgtcctccaggtatagatatggccagctgatagaaatcaactcacactctctgttttcaaaatggttttcagaatcgggtaaactggtgacgaaaatgttccagaaaatccaggacttaattgatgataaggatgctttggtgttcgtcctgattgacgaagtggaaagcctgacggcggcacggaatgcatgtagagccggcaccgaaccctcagatgccatccgggtggtcaacgccgtcctgactcaaattgaccagattaaaaggcacagtaacgtggtaattttgaccacttccaatattaccgaaaaaatcgatgtggccttcgtcgatcgagccgacattaaacagtacattggccccccatctgccgcagccatatttaagatttacctctcctgtctcgaagagctgatgaaatgccagattatatacccaaggcagcagctgctgaccctcagagaacttgagatgataggattcattgagaacaatgtgtcaaagttgagccttctactcaatgacattagccggaaatcagagggccttagtggtcgcgtgctacggaaactccccttcctcgctcatgcactctacgtccaagcaccaaccgtgaccatcgaggggttcttgcaggccttgagtctggcagtcgacaaacagttcgaggaacgtaaaaagcttgccgcatatatatag

SEQ ID NO: 144474 - DNA, 1299 bp, Artificial Sequence
  derived and/or modified sequence
atggacgaagccgtaggagacctgaaacaggccttaccttgcgtcgctgagtctccaactgtacatgtcgaagtgcaccaacgcggctccagcactgccaagaaagaagacattaacctgtcagtgaggaagcttctgaacagacataacatcgtttttggggattatacttggacggaatttgatgaaccgtttcttacccgaaatgtccaatcagtatctatcattgatacagaactcaaggtcaaggattcacagccaatcgacctttcggcctgtaccgtcgctctgcatatttttcagctcaatgaagacggcccaagttcagaaaacctggaggaagaaacagaaaacataatagctgcaaaccactgggtactccctgctgcagagttccatggcttatgggatagcctggtttatgatgtcgaggtaaagagtcatctcctggattatgttatgacaacgttgttgttctcagataagaacgtgaatagtaatctgataacctggaaccgcgtggttctgttgcatggacctcctggcacaggaaagacttcactctgtaaggcgctcgcacagaaactgacaattcggctctcaagtcgctataggtacggccagcttattgaaatcaactctcacagtctctttagtaagtggttcagcgagagtggcaaattagtgacaaaaatgttccaaaagatacaagatctgatagatgacaaagacgccttggttttcgtcctgattgacgaggttgagagtctaaccgcagcacgaaacgcatgtagggccggcaccgaaccatccgacgccatccgtgtcgtgaatgcagtactcacccaaatcgaccagatcaagcggcatagcaacgtcgtaattctaacgacatccaacataacagaaaagatcgacgtggctttcgtggatcgggcggacatcaaacagtacatcggacctcctagcgccgccgctattttcaaaatttacctgtcctgtctagaggagttgatgaaatgccagatcatctatccccgacagcagctcctgactttgagagagttagaaatgatcggctttattgaaaacaacgtgagcaaacttagcttgttgctgaatgatatatccagaaaatctgagggcctgagcggacgcgtcttaagaaaacttccatttttggcacatgcgctttatgtgcaagcccctacggtgaccattgaaggatttctccaggcgctctcactggcagtagataagcaattcgaggaaagaaaaaagttggccgcctacatctag

SEQ ID NO: 144475 - DNA, 2672 bp, Artificial Sequence
  derived and/or modified sequence
gtgcttcttgcccatggcggcgccggcggcgggcccgaggcgggggctgggaacagctggcacccggtcggaccttggccgccaccgccccctggccctggctggccgcccgcgctcgctgcgccgaggttgccgagctcgctgggccgcgccggaaacggggcgaggcggggccgcggcaggaagtggccctgccgggcccgagcgcttccgggtcaggaggtggtgcgcctcgcgcggcagattcgaagctagggcggggcccgcgggctgaggcagcggctgtggcggcgacgctgggcgtgaggtggcggcggccgcgccctggttgggtccccactgctctcgggggcgccatggacgaggccgtgggcgacctgaagcaggcgcttccctgtgtggccgagtcgccaacggtccacgtggaggtgcatcagcgcggcagcagcactgcaaagaaagaagacataaacctgagtgttagaaagctactcaacagacataatattgtgtttggtgattacacatggactgagtttgatgaaccttttttgaccagaaatgtgcagtctgtgtctattattgacacagaattaaaggttaaagactcacagcccatcgatttgagtgcatgcactgttgcacttcacattttccagctgaatgaagatggccccagcagtgaaaatctggaggaagagacagaaaacataattgcagcaaatcactgggttctacctgcagctgaattccatgggctttgggacagcttggtatacgatgtggaagtcaaatcccatctcctcgattatgtgatgacaactttactgttttcagacaagaacgtcaacagcaacctcatcacctggaaccgggtggtgctgctccacggtcctcctggcactggaaaaacatccctgtgtaaagcgttagcccagaaattgacaattagactttcaagcaggtaccgatatggccaattaattgaaataaacagccacagcctcttttctaagtggttttcggaaagtggcaagctggtaaccaagatgtttcagaagattcaggatttgattgatgataaagacgccctggtgttcgtgctgattgatgaggtggagagtctcacagccgcccgaaatgcctgcagggcgggcaccgagccatcagatgccatccgcgtggtcaatgctgtcttgacccaaattgatcagattaaaaggcattccaatgttgtgattctgaccacttctaacatcaccgagaagatcgacgtggccttcgtggacagggctgacatcaagcagtacattgggccaccctctgcagcagccatcttcaaaatctacctctcttgtttggaagaactgatgaagtgtcagatcatataccctcgccagcagctgctgaccctccgagagctagagatgattggcttcattgaaaacaacgtgtcaaaattgagccttcttttgaatgacatttcaaggaagagcgagggcctcagcggccgggtcctgagaaaactcccctttctggctcatgcgctgtatgtccaggcccccaccgtcaccatagaggggttcctccaggccctgtctctggcagtggacaagcagtttgaagagagaaagaagcttgcagcttacatctgatcctgggcttccccatctggtgcttttcccatggagaacacacaaccagtaagtgaggttgccccacacagccgtctcccagggaatcccttctgcaaaccaaacgttacttagactgcaagctagaaagccaccaaggccaggctttgttaaaagaagtgtattctatttatgttgttttaaaatgcatactgagagacaaacatcttgtcattttcactgtttgtaaaagataattcagattgtttgtctccttgtgaagaaccatcgaaacctgtttgttcccagcccacccccagtggatgggatgcataatgccagcaagttttgtttaacagcaaaaaaggaagattaatgcaggtgttatagaagccagaagagaaactgtgtcaccctaaagaagcatataatcatagcattaaaaatgcacacattactccaggtggaaggtggcaattgctttctgatatcagctcgtttgatttagtgcaaaaatgttttcaagactatttaatggatgtaaaaaagcctatttctacattataccaactgagaaaaaaatggtcggtaaagtgttctttcataataaataatcagacatggtcccatttgcaggaaaagtgcagactctgagtgttccagggaaacacatgctggacatcccttgtaacccggtatgggcgcccctgcattgctgggatgtttctgcccacggttttgtttgtgcaataacgttatcacatttctaatgaggattcacattaatataatataaaataaataggtcagttactggtctctttctccgaatgttatgttttgcttttatctcacagtaaaataaatataattaatggtttgcatgtgaaattcacttttgaaagaacatgttaccttaccttttgttttagaagttttcaagtattaaaatattttttagaattttcttgttttgattctaagtatctcttccaagtgcttttaattttactaaaaattactcacatgattacttaa

SEQ ID NO: 144476 - RNA, 1299 nt, Artificial Sequence
  derived and/or modified sequence
auggacgaagcagugggggaccucaaacaagcucucccuuguguggccgaguccccuaccguccacguugaggugcaucagcggggcagcuccacagcuaagaaagaggauauuaaucucucaguuaggaaacuccucaacagacacaauaucgucuucggggauuacaccuggaccgaauuugacgaaccguuccuuacacgaaauguucaauccgugaguauuaucgacacagaacugaaagugaaggauucacaaccuaucgaccuguccgccuguacuguggcccugcauaucuuucagcuuaacgaagacgggcccagcucagagaaucuagaagaagagacagaaaacauuaucgccgccaaucacuggguguugcccgccgcugaguuccacggcuuaugggacaguuuaguauaugacguggaggugaagagccaccuccuggacuaugugaugaccacacuucuguucuccgauaaaaauguaaacuccaauuuaauuacuuggaacaggguggugcugcugcacgggccucccgguaccgguaaaaccucccuaugcaaagcucuggcacaaaaguuaacaauaagacuguccuccagguauagauauggccagcugauagaaaucaacucacacucucuguuuucaaaaugguuuucagaaucggguaaacuggugacgaaaauguuccagaaaauccaggacuuaauugaugauaaggaugcuuugguguucguccugauugacgaaguggaaagccugacggcggcacggaaugcauguagagccggcaccgaacccucagaugccauccggguggucaacgccguccugacucaaauugaccagauuaaaaggcacaguaacgugguaauuuugaccacuuccaauauuaccgaaaaaaucgauguggccuucgucgaucgagccgacauuaaacaguacauuggccccccaucugccgcagccauauuuaagauuuaccucuccugucucgaagagcugaugaaaugccagauuauauacccaaggcagcagcugcugacccucagagaacuugagaugauaggauucauugagaacaaugugucaaaguugagccuucuacucaaugacauuagccggaaaucagagggccuuaguggucgcgugcuacggaaacuccccuuccucgcucaugcacucuacguccaagcaccaaccgugaccaucgagggguucuugcaggccuugagucuggcagucgacaaacaguucgaggaacguaaaaagcuugccgcauauauauag

SEQ ID NO: 144477 - RNA, 1299 nt, Artificial Sequence
  derived and/or modified sequence
auggacgaagccguaggagaccugaaacaggccuuaccuugcgucgcugagucuccaacuguacaugucgaagugcaccaacgcggcuccagcacugccaagaaagaagacauuaaccugucagugaggaagcuucugaacagacauaacaucguuuuuggggauuauacuuggacggaauuugaugaaccguuucuuacccgaaauguccaaucaguaucuaucauugauacagaacucaaggucaaggauucacagccaaucgaccuuucggccuguaccgucgcucugcauauuuuucagcucaaugaagacggcccaaguucagaaaaccuggaggaagaaacagaaaacauaauagcugcaaaccacuggguacucccugcugcagaguuccauggcuuaugggauagccugguuuaugaugucgagguaaagagucaucuccuggauuauguuaugacaacguuguuguucucagauaagaacgugaauaguaaucugauaaccuggaaccgcgugguucuguugcauggaccuccuggcacaggaaagacuucacucuguaaggcgcucgcacagaaacugacaauucggcucucaagucgcuauagguacggccagcuuauugaaaucaacucucacagucucuuuaguaagugguucagcgagaguggcaaauuagugacaaaaauguuccaaaagauacaagaucugauagaugacaaagacgccuugguuuucguccugauugacgagguugagagucuaaccgcagcacgaaacgcauguagggccggcaccgaaccauccgacgccauccgugucgugaaugcaguacucacccaaaucgaccagaucaagcggcauagcaacgucguaauucuaacgacauccaacauaacagaaaagaucgacguggcuuucguggaucgggcggacaucaaacaguacaucggaccuccuagcgccgccgcuauuuucaaaauuuaccuguccugucuagaggaguugaugaaaugccagaucaucuauccccgacagcagcuccugacuuugagagaguuagaaaugaucggcuuuauugaaaacaacgugagcaaacuuagcuuguugcugaaugauauauccagaaaaucugagggccugagcggacgcgucuuaagaaaacuuccauuuuuggcacaugcgcuuuaugugcaagccccuacggugaccauugaaggauuucuccaggcgcucucacuggcaguagauaagcaauucgaggaaagaaaaaaguuggccgccuacaucuag

SEQ ID NO: 144478 - protein, 1979 aa, Artificial Sequence
  derived and/or modified sequence
MSSWLGGLGSGLGQSLGQVGGSLASLTGQISNFTKDMLMEGTEEVEAELPDSRTKEIEAIHAILRSENERLKKLCTDLEEKHEASEIQIKQQSTSYRNQLQQKEVEISHLKARQIALQDQLLKLQSAAQSVPSGAGVPATTASSSFAYGISHHPSAFHDDDMDFGDIISSQQEINRLSNEVSRLESEVGHWRHIAQTSKAQGTDNSDQSEICKLQNIIKELKQNRSQEIDDHQHEMSVLQNAHQQKLTEISRRHREELSDYEERIEELENLLQQGGSGVIETDLSKIYEMQKTIQVLQIEKVESTKKMEQLEDKIKDINKKLSSAENDRDILRREQEQLNVEKRQIMEECENLKLECSKLQPSAVKQSDTMTEKERILAQSASVEEVFRLQQALSDAENEIMRLSSLNQDNSLAEDNLKLKMRIEVLEKEKSLLSQEKEELQMSLLKLNNEYEVIKSTATRDISLDSELHDLRLNLEAKEQELNQSISEKETLIAEIEELDRQNQEATKHMILIKDQLSKQQNEGDSIISKLKQDLNDEKKRVHQLEDDKMDITKELDVQKEKLIQSEVALNDLHLTKQKLEDKVENLVDQLNKSQESNVSIQKENLELKEHIRQNEEELSRIRNELMQSLNQDSNSNFKDTLLKEREAEVRNLKQNLSELEQLNENLKKVAFDVKMENEKLVLACEDVRHQLEECLAGNNQLSLEKNTIVETLKMEKGEIEAELCWAKKRLLEEANKYEKTIEELSNARNLNTSALQLEHEHLIKLNQKKDMEIAELKKNIEQMDTDHKETKDVLSSSLEEQKQLTQLINKKEIFIEKLKERSSKLQEELDKYSQALRKNEILRQTIEEKDRSLGSMKEENNHLQEELERLREEQSRTAPVADPKTLDSVTELASEVSQLNTIKEHLEEEIKHHQKIIEDQNQSKMQLLQSLQEQKKEMDEFRYQHEQMNATHTQLFLEKDEEIKSLQKTIEQIKTQLHEERQDIQTDNSDIFQETKVQSLNIENGSEKHDLSKAETERLVKGIKERELEIKLLNEKNISLTKQIDQLSKDEVGKLTQIIQQKDLEIQALHARISSTSHTQDVVYLQQQLQAYAMEREKVFAVLNEKTRENSHLKTEYHKMMDIVAAKEAALIKLQDENKKLSTRFESSGQDMFRETIQNLSRIIREKDIEIDALSQKCQTLLAVLQTSSTGNEAGGVNSNQFEELLQERDKLKQQVKKMEEWKQQVMTTVQNMQHESAQLQEELHQLQAQVLVDSDNNSKLQVDYTGLIQSYEQNETKLKNFGQELAQVQHSIGQLCNTKDLLLGKLDIISPQLSSASLLTPQSAECLRASKSEVLSESSELLQQELEELRKSLQEKDATIRTLQENNHRLSDSIAATSELERKEHEQTDSEIKQLKEKQDVLQKLLKEKDLLIKAKSDQLLSSNENFTNKVNENELLRQAVTNLKERILILEMDIGKLKGENEKIVETYRGKETEYQALQETNMKFSMMLREKEFECHSMKEKALAFEQLLKEKEQGKTGELNQLLNAVKSMQEKTVVFQQERDQVMLALKQKQMENTALQNEVQRLRDKEFRSNQELERLRNHLLESEDSYTREALAAEDREAKLRKKVTVLEEKLVSSSNAMENASHQASVQVESLQEQLNVVSKQRDETALQLSVSQEQVKQYALSLANLQMVLEHFQQEEKAMYSAELEKQKQLIAEWKKNAENLEGKVISLQECLDEANAALDSASRLTEQLDVKEEQIEELKRQNELRQEMLDDVQKKLMSLANSSEGKVDKVLMRNLFIGHFHTPKNQRHEVLRLMGSILGVRREEMEQLFHDDQGGVTRWMTGWLGGGSKSVPNTPLRPNQQSVVNSSFSELFVKFLETESHPSIPPPKLSVHDMKPLDSPGRRKRDTNAPESFKDTAESRSGRRTDVNPFLAPRSAAVPLINPAGLGPGGPGHLLLKPISDVLPTFTPLPALPDNSAGVVLKDLLKQ

SEQ ID NO: 144479 - protein, 1715 aa, Artificial Sequence
  derived and/or modified sequence
MSVLQNAHQQKLTEISRRHREELSDYEERIEELENLLQQGGSGVIETDLSKIYEMQKTIQVLQIEKVESTKKMEQLEDKIKDINKKLSSAENDRDILRREQEQLNVEKRQIMEECENLKLECSKLQPSAVKQSDTMTEKERILAQSASVEEVFRLQQALSDAENEIMRLSSLNQEELQMSLLKLNNEYEVIKSTATRDISLDSELHDLRLNLEAKEQELNQSISEKETLIAEIEELDRQNQEATKHMILIKDQLSKQQNEGDSIISKLKQDLNDEKKRVHQLEDDKMDITKELDVQKEKLIQSEVALNDLHLTKQKLEDKVENLVDQLNKSQESNVSIQKENLELKEHIRQNEEELSRIRNELMQSLNQDSNSNFKDTLLKEREAEVRNLKQNLSELEQLNENLKKVAFDVKMENEKLVLACEDVRHQLEECLAGNNQLSLEKNTIVETLKMEKGEIEAELCWAKKRLLEEANKYEKTIEELSNARNLNTSALQLEHEHLIKLNQKKDMEIAELKKNIEQMDTDHKETKDVLSSSLEEQKQLTQLINKKEIFIEKLKERSSKLQEELDKYSQALRKNEILRQTIEEKDRSLGSMKEENNHLQEELERLREEQSRTAPVADPKTLDSVTELASEVSQLNTIKEHLEEEIKHHQKIIEDQNQSKMQLLQSLQEQKKEMDEFRYQHEQMNATHTQLFLEKDEEIKSLQKTIEQIKTQLHEERQDIQTDNSDIFQETKVQSLNIENGSEKHDLSKAETERLVKGIKERELEIKLLNEKNISLTKQIDQLSKDEVGKLTQIIQQKDLEIQALHARISSTSHTQDVVYLQQQLQAYAMEREKVFAVLNEKTRENSHLKTEYHKMMDIVAAKEAALIKLQDENKKLSTRFESSGQDMFRETIQNLSRIIREKDIEIDALSQKCQTLLAVLQTSSTGNEAGGVNSNQFEELLQERDKLKQQVKKMEEWKQQVMTTVQNMQHESAQLQEELHQLQAQVLVDSDNNSKLQVDYTGLIQSYEQNETKLKNFGQELAQVQHSIGQLCNTKDLLLGKLDIISPQLSSASLLTPQSAECLRASKSEVLSESSELLQQELEELRKSLQEKDATIRTLQENNHRLSDSIAATSELERKEHEQTDSEIKQLKEKQDVLQKLLKEKDLLIKAKSDQLLSSNENFTNKVNENELLRQAVTNLKERILILEMDIGKLKGENEKIVETYRGKETEYQALQETNMKFSMMLREKEFECHSMKEKALAFEQLLKEKEQGKTGELNQLLNAVKSMQEKTVVFQQERDQVMLALKQKQMENTALQNEVQRLRDKEFRSNQELERLRNHLLESEDSYTREALAAEDREAKLRKKVTVLEEKLVSSSNAMENASHQASVQVESLQEQLNVVSKQRDETALQLSVSQEQVKQYALSLANLQMVLEHFQQEEKAMYSAELEKQKQLIAEWKKNAENLEGKVISLQECLDEANAALDSASRLTEQLDVKEEQIEELKRQNELRQEMLDDVQKKLMSLANSSEGKVDKVLMRNLFIGHFHTPKNQRHEVLRLMGSILGVRREEMEQLFHDDQGGVTRWMTGWLGGGSKSVPNTPLRPNQQSVVNSSFSELFVKFLETESHPSIPPPKLSVHDMKPLDSPGRRKRDTNAPESFKDTAESRSGRRTDVNPFLAPRSAAVPLINPAGLGPGGPGHLLLKPISDVLPTFTPLPALPDNSAGVVLKDLLKQ

SEQ ID NO: 144480 - DNA, 8106 bp, Artificial Sequence
  derived and/or modified sequence
gatccgctgccgctttccgagcgagtgtcatggcggccggcgtcgagttggcaggagtaacccacggaactgaggaaagtcattagagctgagaaagaagtggcccaatctggacggtgggaattcgtgggaatgagcagaaggccctccgtaggtgactgtgtcactagaggcgggcccctggtaaaattccaggccaggcctctgcgtttctaggcagaacctggagtcggccttgcctgagaacccagctttgtgttatcgtatcctgtctcgcgaaggcaggcgttcaaggatatttggtcggatcgcccggcggcgctaaacgttttcttttttccgagcggaccgggtcgttctctaaactcgccgcgatgtcgtcctggcttgggggcctcggctccggattgggccagtctctgggtcaagtcgggggcagcctggcttccctcactggccagatatcaaactttacaaaggatatgctgatggagggcacggaggaagtggaagcagaattacctgattctaggacaaaggaaattgaagccattcatgcaatcttgagatcagagaatgaaaggcttaagaaactttgtactgatctagaagagaaacatgaagcatcagagattcaaataaagcagcaatctacaagttaccgaaatcaacttcaacaaaaagaggtagaaatcagccatcttaaagccagacagattgcactccaggatcagttgctgaaactgcagtcagctgctcagtcagtaccttcaggagctggtgtaccagcaaccactgcatcatcttcattcgcttatgggattagtcatcatccttcagctttccatgacgatgacatggactttggtgatataatttcatcccaacaagaaataaaccgactctcaaatgaagtttcaagacttgagtctgaagttggccattggaggcatattgctcagacttccaaagcacaaggaacagataactctgatcaaagtgaaatatgtaaactacaaaatatcattaaggaactaaaacagaaccgaagtcaggaaattgatgaccatcaacatgaaatgtcagtactgcagaatgcacaccaacagaaattgacagaaataagtcgacgacatcgagaagaattaagtgactatgaagaacgaattgaagaacttgaaaatctgttacaacaaggtggctctggagttatagaaactgatctctctaaaatctatgagatgcaaaaaactattcaagttctacaaatagaaaaagtggagtctaccaaaaaaatggaacaacttgaggataaaataaaagatataaataaaaaattatcttctgcagaaaatgacagagatattttgaggagagaacaagaacagctaaatgtggaaaagagacaaataatggaagaatgtgaaaacttgaaattggaatgtagtaaattgcagccttctgctgtgaagcaaagtgatactatgacagaaaaggaaagaattcttgcccagagtgcatcagtggaagaagtgttcagactacaacaagcactgtctgatgccgaaaatgaaataatgagattgagtagtttaaaccaggataacagtcttgctgaagacaatctgaaacttaaaatgcgtatcgaagttttagaaaaagagaagtcattactgagtcaagaaaaggaagaacttcagatgtcacttttaaaattgaacaatgaatatgaagtaattaaaagtacagctacaagagacataagtttggattcagaattacatgacttaagacttaatttggaggcaaaggaacaagaactcaatcagagtattagtgaaaaggaaacactgatagctgagatagaagaattggacagacagaatcaagaagctacaaagcacatgattttgataaaagatcagctatcaaaacaacaaaatgaaggagatagcatcatcagtaaactgaaacaagatctaaatgatgaaaaaaagagagttcatcaacttgaagatgataaaatggacattactaaagagttagatgtacagaaagaaaagctaattcaaagtgaagtggccctaaatgatttacatttaaccaagcagaaacttgaggacaaagtagaaaatttagtagatcagctaaataaatcacaagaaagtaatgtaagcatccagaaggagaatttagaacttaaggagcatattagacaaaatgaggaggagctttctagaataaggaatgagttaatgcagtctctaaatcaagactctaatagtaattttaaggataccttacttaaagaaagagaagctgaagttagaaacttaaagcaaaatctttcagaattagaacagctcaatgaaaatttaaagaaagttgcttttgatgtcaaaatggaaaatgaaaagttagttttagcatgtgaagatgtgaggcatcagttagaagaatgtcttgctggtaacaatcagctttctctggaaaaaaacactattgtggagactctaaaaatggaaaaaggagagatagaggcagaattgtgttgggctaaaaagaggctgttggaagaagcaaacaagtatgagaaaaccattgaagaactgtcaaatgcacgtaatttgaatacctctgccttacagctggaacatgagcatttaattaaactcaatcaaaagaaagacatggaaatagcagaactcaaaaagaatattgaacaaatggatactgaccataaagaaactaaggacgttttgtcatctagtttagaagagcagaagcagttgacacaacttataaacaagaaagaaatttttattgaaaagcttaaagaaagaagttcaaagctgcaggaggaattggataaatattctcaggccttaagaaaaaatgaaattttaagacagaccatagaggaaaaagaccgaagtcttggatccatgaaagaggaaaataatcatctgcaagaagaattggaacgactcagggaagagcagagtcgaaccgcacctgtggctgaccctaaaacccttgatagtgttactgaactagcatctgaggtatctcaactgaacacgatcaaggaacatcttgaagaggaaattaaacatcatcaaaagataattgaagatcaaaaccagagtaagatgcaactacttcagtctttacaagagcaaaagaaggaaatggatgagtttagataccagcatgagcaaatgaacgccacacacacccagctctttttagagaaggatgaggaaattaagagtttgcaaaaaacaattgaacaaatcaaaacccagttgcatgaagaaagacaggacattcaaacagataactctgatatttttcaagaaacaaaagttcagagccttaatatagaaaatggaagtgaaaagcatgatttatctaaagctgaaacggaaagattagtgaaaggaataaaagagcgagaactggagattaaacttctaaatgaaaagaatatatctttaactaaacagattgatcagttgtccaaagatgaagttggtaaactaactcagattattcagcagaaagatttggagatacaagctcttcatgctagaatttcttcaacttcccatactcaagatgttgtttaccttcaacagcaactgcaggcttatgctatggaaagagaaaaggtatttgctgttttgaatgagaagactagggaaaatagccatctaaaaacagaatatcacaaaatgatggatattgttgctgccaaggaagcagctcttatcaaactgcaagatgaaaataaaaaattgtccactagatttgaaagtagtggccaagatatgtttagagaaactattcagaatttatcacgtatcattcgagaaaaagacatcgaaatagatgcactaagtcagaaatgtcagactttattggcagttttacaaacatccagcactggtaatgaggctggaggtgttaatagtaatcaatttgaggagcttctacaggaacgtgacaagttaaaacagcaagtaaagaaaatggaagagtggaagcagcaggtgatgaccacagtacaaaatatgcaacacgagtcagcccagcttcaggaagagcttcaccaacttcaagcacaggttttggttgacagtgataataattctaaattacaagtggactatactggcctgatccaaagttatgagcagaatgaaaccaaactcaaaaattttgggcaggaattagcacaagttcagcacagcattgggcagctttgcaataccaaggatcttcttttaggaaaacttgatattatttcaccccagctgtcttctgcatcattgcttactccccagtctgcagagtgtcttagagcaagtaagtctgaagtattgagtgaatcttctgaattgcttcagcaagagttagaagagctaagaaaatcactacaggaaaaagatgcaacaattagaactctccaggaaaataaccacagattgtctgattcgattgctgccacctcagagctagaaagaaaagaacacgaacaaaccgattcagaaatcaagcagctaaaggagaaacaagatgttttgcaaaagttacttaaggaaaaagacctcttaatcaaagccaaaagtgatcaactactttcttccaatgaaaatttcactaacaaagtaaatgaaaacgaacttttgaggcaggcagtaacaaacctgaaggagagaatattaattctagagatggacattggcaaactaaaaggagaaaatgaaaaaatagtggaaacatacaggggaaaggaaacagaatatcaagcgttacaagagactaacatgaagttttctatgatgctgcgagaaaaagagtttgagtgccactcaatgaaggagaaggctcttgcttttgaacagctattgaaagagaaagaacagggcaagactggagagttaaatcagcttttaaatgcagttaaatcaatgcaggagaagacagttgtgtttcaacaggagagagaccaagtcatgttggccctgaaacaaaaacaaatggaaaatactgccctacagaatgaggttcaacgtttacgtgacaaagaatttcgttcaaaccaagagctagagagattgcgtaatcatcttttagaatcagaagattcttatacccgtgaagctttggctgcagaagatagagaggctaaactaagaaagaaagtcacagtattggaggaaaagctagtttcatcctctaatgcaatggaaaatgcaagccatcaagccagtgtgcaggtagagtcattgcaagaacagttgaatgtagtttccaagcaaagggatgaaactgcgctgcagctttctgtctctcaggaacaagtaaagcagtatgctctgtcactggccaacctgcagatggtactagagcatttccaacaagaggaaaaagctatgtattctgctgaactcgaaaagcaaaaacagcttatagctgaatggaagaaaaacgcagaaaatctggaaggaaaagtgatatcattacaggaatgtttggatgaagcaaatgctgcattggattcagcatcaagacttacagaacagttagatgtaaaagaagaacaaattgaagaacttaaaagacaaaatgagctccgacaagaaatgctggatgatgtacaaaagaaattgatgagcttagcaaacagctcagaaggaaaagtagacaaagtcctaatgagaaacctcttcattggtcatttccacacaccgaaaaatcagcgtcatgaagtgttacggttaatggggagcatcctgggcgtcagaagggaggagatggagcagttgtttcatgacgatcagggcggtgttaccaggtggatgactgggtggcttggaggaggatcaaaaagtgttcccaacacacctttgagaccaaatcagcaatctgtggttaatagttctttttcagaactttttgttaaatttctagaaacagaatctcatccatccattccaccaccaaagctttctgttcatgatatgaaacctctggattcaccaggaagaagaaaaagagatacaaatgcaccagaaagttttaaagatacagcagaatccaggtctggtagaagaacagatgtaaatccgtttttggctcctcgctcggcagctgtacctcttattaacccagctggacttggacctggtgggcccgggcatcttcttctgaaacccatctcagatgttttgcccacatttacacctttgccagcgttacctgacaacagtgctggggttgtgctgaaagaccttttaaagcaatagatgattctcaagccagagacaatctagcactttaaagaaaccatgaacactatatgtatgtactttatcacaaagtggcctttggggagaaagtcatgtatttgttcgcaattatgctttctctgaatttaataaaaatattcctaatgcttttagaaactgcaggtgtcaggagcaagtgtttgctatataatctgctttattccttctgatttgacctaatttaagctaggaacatttaatttatcttttaccttaatttacaaaaatacagacagacaaaaatactagtagctatatggcagctttttatttccttttgtgatttccaagctcatttaagctagagattgtggtttatcaagagagtgttttttttttttaaacgaagaataaaaaaatactagtagtggcttctctgcatagtgcagaaagttgatttgaagcatatattgatcatctttagaggactttgtggagacaggccaacaagattgttgctggaaggtcataggttccctgaggtgaagtatgtatttggtcctgtgcaatattatcatgtgtgtagattctttttttgtttgttttaaatagagatggggtctcactatgttgccaggctggcctcaaactcctgggctcaagtgatcctcccacctcagcctcccaaagtgctgggattaaggcatgagccactgcgcctggccctgtgtgtaaattcatgtgactaccaccacaggcaagacacggaagacttccattacaagcatccccctgtgttgccctctcataatcattgccacctctctccctggccctctccttaatccctgacaaccacttactgttctccatctcagtcattttgttattttgagaatgttatataaatggaatcaatatataccctcttgagactggctttttttcactcagcataattcccttgagatccatccaaggctttggatgtatcactagtttgttcctttttattgttgagcatatagtgcagatatatcacttagttttaacagctaaggtatctatttaaagataccatcttaaaactaaatgttacacaaattcatgcaactttcatataagcattaaaccatacagctgcatctacgtaagtataattagcaaaatcactgaacatgccacttcctgcctccgtctgcggtgttgacatatgaggtacagcaatccgagagtcaactgttatcacggtggccactgagggcagtgaaatcactttgatagcaccagtacccagatgtttgaaacttaagaaagtatttctttaatttttcataaacccatcataaaaaaaaaatcccgacttgaaacttaactgtatctggatgttcatatttttattagttgttgaagttgtacatttaaaaagatatttcttgcaaattttgtaaatttctatatgcttttaaaatagaaacatttgtataacaaggaaggatgaaaataaaacaaattcaaatatgtgaatagtcctggctgaggccagaactaaatttggttatttgcaagttttactgtgattaactgtactttctaatgtatttggaagactggaagtcttaattccatgttgatgggtgaaacttgtttttctgaaaaatgaagtaactgaaaatgctgcttcagaatgtcttgtatctccttagataactaatttatattgccattctttatttactatactttaaaggaagttgtcatgcaagttctatattagaactgtcaaactgccaaaaaaaaaaaaaaaaaa

SEQ ID NO: 144481 - DNA, 89 bp, Artificial Sequence
  derived and/or modified sequence
aaagaattgaattgaatagaatcaccaatgaattgaatcgaatggaatcgtcatcgaatggaatcgaagggaatcattggatgggctca

SEQ ID NO: 144482 - DNA, 5940 bp, Artificial Sequence
  derived and/or modified sequence
atgagcagctggctgggcggcctgggcagcggcctgggccagagcctgggccaggtgggcggcagcctggccagcctgaccggccagatcagcaacttcaccaaggacatgctgatggagggcaccgaggaggtggaggccgagctgcccgacagcagaaccaaggagatcgaggccatccacgccatcctgagaagcgagaacgagagactgaagaagctgtgcaccgacctggaggagaagcacgaggccagcgagatccagatcaagcagcagagcaccagctacagaaaccagctgcagcagaaggaggtggagatcagccacctgaaggccagacagatcgccctgcaggaccagctgctgaagctgcagagcgccgcccagagcgtgcccagcggcgccggcgtgcccgccaccaccgccagcagcagcttcgcctacggcatcagccaccaccccagcgccttccacgacgacgacatggacttcggcgacatcatcagcagccagcaggagatcaacagactgagcaacgaggtgagcagactggagagcgaggtgggccactggagacacatcgcccagaccagcaaggcccagggcaccgacaacagcgaccagagcgagatctgcaagctgcagaacatcatcaaggagctgaagcagaacagaagccaggagatcgacgaccaccagcacgagatgagcgtgctgcagaacgcccaccagcagaagctgaccgagatcagcagaagacacagagaggagctgagcgactacgaggagagaatcgaggagctggagaacctgctgcagcagggcggcagcggcgtgatcgagaccgacctgagcaagatctacgagatgcagaagaccatccaggtgctgcagatcgagaaggtggagagcaccaagaagatggagcagctggaggacaagatcaaggacatcaacaagaagctgagcagcgccgagaacgacagagacatcctgagaagagagcaggagcagctgaacgtggagaagagacagatcatggaggagtgcgagaacctgaagctggagtgcagcaagctgcagcccagcgccgtgaagcagagcgacaccatgaccgagaaggagagaatcctggcccagagcgccagcgtggaggaggtgttcagactgcagcaggccctgagcgacgccgagaacgagatcatgagactgagcagcctgaaccaggacaacagcctggccgaggacaacctgaagctgaagatgagaatcgaggtgctggagaaggagaagagcctgctgagccaggagaaggaggagctgcagatgagcctgctgaagctgaacaacgagtacgaggtgatcaagagcaccgccaccagagacatcagcctggacagcgagctgcacgacctgagactgaacctggaggccaaggagcaggagctgaaccagagcatcagcgagaaggagaccctgatcgccgagatcgaggagctggacagacagaaccaggaggccaccaagcacatgatcctgatcaaggaccagctgagcaagcagcagaacgagggcgacagcatcatcagcaagctgaagcaggacctgaacgacgagaagaagagagtgcaccagctggaggacgacaagatggacatcaccaaggagctggacgtgcagaaggagaagctgatccagagcgaggtggccctgaacgacctgcacctgaccaagcagaagctggaggacaaggtggagaacctggtggaccagctgaacaagagccaggagagcaacgtgagcatccagaaggagaacctggagctgaaggagcacatcagacagaacgaggaggagctgagcagaatcagaaacgagctgatgcagagcctgaaccaggacagcaacagcaacttcaaggacaccctgctgaaggagagagaggccgaggtgagaaacctgaagcagaacctgagcgagctggagcagctgaacgagaacctgaagaaggtggccttcgacgtgaagatggagaacgagaagctggtgctggcctgcgaggacgtgagacaccagctggaggagtgcctggccggcaacaaccagctgagcctggagaagaacaccatcgtggagaccctgaagatggagaagggcgagatcgaggccgagctgtgctgggccaagaagagactgctggaggaggccaacaagtacgagaagaccatcgaggagctgagcaacgccagaaacctgaacaccagcgccctgcagctggagcacgagcacctgatcaagctgaaccagaagaaggacatggagatcgccgagctgaagaagaacatcgagcagatggacaccgaccacaaggagaccaaggacgtgctgagcagcagcctggaggagcagaagcagctgacccagctgatcaacaagaaggagatcttcatcgagaagctgaaggagagaagcagcaagctgcaggaggagctggacaagtacagccaggccctgagaaagaacgagatcctgagacagaccatcgaggagaaggacagaagcctgggcagcatgaaggaggagaacaaccacctgcaggaggagctggagagactgagagaggagcagagcagaaccgcccccgtggccgaccccaagaccctggacagcgtgaccgagctggccagcgaggtgagccagctgaacaccatcaaggagcacctggaggaggagatcaagcaccaccagaagatcatcgaggaccagaaccagagcaagatgcagctgctgcagagcctgcaggagcagaagaaggagatggacgagttcagataccagcacgagcagatgaacgccacccacacccagctgttcctggagaaggacgaggagatcaagagcctgcagaagaccatcgagcagatcaagacccagctgcacgaggagagacaggacatccagaccgacaacagcgacatcttccaggagaccaaggtgcagagcctgaacatcgagaacggcagcgagaagcacgacctgagcaaggccgagaccgagagactggtgaagggcatcaaggagagagagctggagatcaagctgctgaacgagaagaacatcagcctgaccaagcagatcgaccagctgagcaaggacgaggtgggcaagctgacccagatcatccagcagaaggacctggagatccaggccctgcacgccagaatcagcagcaccagccacacccaggacgtggtgtacctgcagcagcagctgcaggcctacgccatggagagagagaaggtgttcgccgtgctgaacgagaagaccagagagaacagccacctgaagaccgagtaccacaagatgatggacatcgtggccgccaaggaggccgccctgatcaagctgcaggacgagaacaagaagctgagcaccagattcgagagcagcggccaggacatgttcagagagaccatccagaacctgagcagaatcatcagagagaaggacatcgagatcgacgccctgagccagaagtgccagaccctgctggccgtgctgcagaccagcagcaccggcaacgaggccggcggcgtgaacagcaaccagttcgaggagctgctgcaggagagagacaagctgaagcagcaggtgaagaagatggaggagtggaagcagcaggtgatgaccaccgtgcagaacatgcagcacgagagcgcccagctgcaggaggagctgcaccagctgcaggcccaggtgctggtggacagcgacaacaacagcaagctgcaggtggactacaccggcctgatccagagctacgagcagaacgagaccaagctgaagaacttcggccaggagctggcccaggtgcagcacagcatcggccagctgtgcaacaccaaggacctgctgctgggcaagctggacatcatcagcccccagctgagcagcgccagcctgctgaccccccagagcgccgagtgcctgagagccagcaagagcgaggtgctgagcgagagcagcgagctgctgcagcaggagctggaggagctgagaaagagcctgcaggagaaggacgccaccatcagaaccctgcaggagaacaaccacagactgagcgacagcatcgccgccaccagcgagctggagagaaaggagcacgagcagaccgacagcgagatcaagcagctgaaggagaagcaggacgtgctgcagaagctgctgaaggagaaggacctgctgatcaaggccaagagcgaccagctgctgagcagcaacgagaacttcaccaacaaggtgaacgagaacgagctgctgagacaggccgtgaccaacctgaaggagagaatcctgatcctggagatggacatcggcaagctgaagggcgagaacgagaagatcgtggagacctacagaggcaaggagaccgagtaccaggccctgcaggagaccaacatgaagttcagcatgatgctgagagagaaggagttcgagtgccacagcatgaaggagaaggccctggccttcgagcagctgctgaaggagaaggagcagggcaagaccggcgagctgaaccagctgctgaacgccgtgaagagcatgcaggagaagaccgtggtgttccagcaggagagagaccaggtgatgctggccctgaagcagaagcagatggagaacaccgccctgcagaacgaggtgcagagactgagagacaaggagttcagaagcaaccaggagctggagagactgagaaaccacctgctggagagcgaggacagctacaccagagaggccctggccgccgaggacagagaggccaagctgagaaagaaggtgaccgtgctggaggagaagctggtgagcagcagcaacgccatggagaacgccagccaccaggccagcgtgcaggtggagagcctgcaggagcagctgaacgtggtgagcaagcagagagacgagaccgccctgcagctgagcgtgagccaggagcaggtgaagcagtacgccctgagcctggccaacctgcagatggtgctggagcacttccagcaggaggagaaggccatgtacagcgccgagctggagaagcagaagcagctgatcgccgagtggaagaagaacgccgagaacctggagggcaaggtgatcagcctgcaggagtgcctggacgaggccaacgccgccctggacagcgccagcagactgaccgagcagctggacgtgaaggaggagcagatcgaggagctgaagagacagaacgagctgagacaggagatgctggacgacgtgcagaagaagctgatgagcctggccaacagcagcgagggcaaggtggacaaggtgctgatgagaaacctgttcatcggccacttccacacccccaagaaccagagacacgaggtgctgagactgatgggcagcatcctgggcgtgagaagagaggagatggagcagctgttccacgacgaccagggcggcgtgaccagatggatgaccggctggctgggcggcggcagcaagagcgtgcccaacacccccctgagacccaaccagcagagcgtggtgaacagcagcttcagcgagctgttcgtgaagttcctggagaccgagagccaccccagcatccccccccccaagctgagcgtgcacgacatgaagcccctggacagccccggcagaagaaagagagacaccaacgcccccgagagcttcaaggacaccgccgagagcagaagcggcagaagaaccgacgtgaaccccttcctggcccccagaagcgccgccgtgcccctgatcaaccccgccggcctgggccccggcggccccggccacctgctgctgaagcccatcagcgacgtgctgcccaccttcacccccctgcccgccctgcccgacaacagcgccggcgtggtgctgaaggacctgctgaagcagtag

SEQ ID NO: 144483 - DNA, 5148 bp, Artificial Sequence
  derived and/or modified sequence
atgagcgtgctgcagaacgcccaccagcagaagctgaccgagatcagcagaagacacagagaggagctgagcgactacgaggagagaatcgaggagctggagaacctgctgcagcagggcggcagcggcgtgatcgagaccgacctgagcaagatctacgagatgcagaagaccatccaggtgctgcagatcgagaaggtggagagcaccaagaagatggagcagctggaggacaagatcaaggacatcaacaagaagctgagcagcgccgagaacgacagagacatcctgagaagagagcaggagcagctgaacgtggagaagagacagatcatggaggagtgcgagaacctgaagctggagtgcagcaagctgcagcccagcgccgtgaagcagagcgacaccatgaccgagaaggagagaatcctggcccagagcgccagcgtggaggaggtgttcagactgcagcaggccctgagcgacgccgagaacgagatcatgagactgagcagcctgaaccaggaggagctgcagatgagcctgctgaagctgaacaacgagtacgaggtgatcaagagcaccgccaccagagacatcagcctggacagcgagctgcacgacctgagactgaacctggaggccaaggagcaggagctgaaccagagcatcagcgagaaggagaccctgatcgccgagatcgaggagctggacagacagaaccaggaggccaccaagcacatgatcctgatcaaggaccagctgagcaagcagcagaacgagggcgacagcatcatcagcaagctgaagcaggacctgaacgacgagaagaagagagtgcaccagctggaggacgacaagatggacatcaccaaggagctggacgtgcagaaggagaagctgatccagagcgaggtggccctgaacgacctgcacctgaccaagcagaagctggaggacaaggtggagaacctggtggaccagctgaacaagagccaggagagcaacgtgagcatccagaaggagaacctggagctgaaggagcacatcagacagaacgaggaggagctgagcagaatcagaaacgagctgatgcagagcctgaaccaggacagcaacagcaacttcaaggacaccctgctgaaggagagagaggccgaggtgagaaacctgaagcagaacctgagcgagctggagcagctgaacgagaacctgaagaaggtggccttcgacgtgaagatggagaacgagaagctggtgctggcctgcgaggacgtgagacaccagctggaggagtgcctggccggcaacaaccagctgagcctggagaagaacaccatcgtggagaccctgaagatggagaagggcgagatcgaggccgagctgtgctgggccaagaagagactgctggaggaggccaacaagtacgagaagaccatcgaggagctgagcaacgccagaaacctgaacaccagcgccctgcagctggagcacgagcacctgatcaagctgaaccagaagaaggacatggagatcgccgagctgaagaagaacatcgagcagatggacaccgaccacaaggagaccaaggacgtgctgagcagcagcctggaggagcagaagcagctgacccagctgatcaacaagaaggagatcttcatcgagaagctgaaggagagaagcagcaagctgcaggaggagctggacaagtacagccaggccctgagaaagaacgagatcctgagacagaccatcgaggagaaggacagaagcctgggcagcatgaaggaggagaacaaccacctgcaggaggagctggagagactgagagaggagcagagcagaaccgcccccgtggccgaccccaagaccctggacagcgtgaccgagctggccagcgaggtgagccagctgaacaccatcaaggagcacctggaggaggagatcaagcaccaccagaagatcatcgaggaccagaaccagagcaagatgcagctgctgcagagcctgcaggagcagaagaaggagatggacgagttcagataccagcacgagcagatgaacgccacccacacccagctgttcctggagaaggacgaggagatcaagagcctgcagaagaccatcgagcagatcaagacccagctgcacgaggagagacaggacatccagaccgacaacagcgacatcttccaggagaccaaggtgcagagcctgaacatcgagaacggcagcgagaagcacgacctgagcaaggccgagaccgagagactggtgaagggcatcaaggagagagagctggagatcaagctgctgaacgagaagaacatcagcctgaccaagcagatcgaccagctgagcaaggacgaggtgggcaagctgacccagatcatccagcagaaggacctggagatccaggccctgcacgccagaatcagcagcaccagccacacccaggacgtggtgtacctgcagcagcagctgcaggcctacgccatggagagagagaaggtgttcgccgtgctgaacgagaagaccagagagaacagccacctgaagaccgagtaccacaagatgatggacatcgtggccgccaaggaggccgccctgatcaagctgcaggacgagaacaagaagctgagcaccagattcgagagcagcggccaggacatgttcagagagaccatccagaacctgagcagaatcatcagagagaaggacatcgagatcgacgccctgagccagaagtgccagaccctgctggccgtgctgcagaccagcagcaccggcaacgaggccggcggcgtgaacagcaaccagttcgaggagctgctgcaggagagagacaagctgaagcagcaggtgaagaagatggaggagtggaagcagcaggtgatgaccaccgtgcagaacatgcagcacgagagcgcccagctgcaggaggagctgcaccagctgcaggcccaggtgctggtggacagcgacaacaacagcaagctgcaggtggactacaccggcctgatccagagctacgagcagaacgagaccaagctgaagaacttcggccaggagctggcccaggtgcagcacagcatcggccagctgtgcaacaccaaggacctgctgctgggcaagctggacatcatcagcccccagctgagcagcgccagcctgctgaccccccagagcgccgagtgcctgagagccagcaagagcgaggtgctgagcgagagcagcgagctgctgcagcaggagctggaggagctgagaaagagcctgcaggagaaggacgccaccatcagaaccctgcaggagaacaaccacagactgagcgacagcatcgccgccaccagcgagctggagagaaaggagcacgagcagaccgacagcgagatcaagcagctgaaggagaagcaggacgtgctgcagaagctgctgaaggagaaggacctgctgatcaaggccaagagcgaccagctgctgagcagcaacgagaacttcaccaacaaggtgaacgagaacgagctgctgagacaggccgtgaccaacctgaaggagagaatcctgatcctggagatggacatcggcaagctgaagggcgagaacgagaagatcgtggagacctacagaggcaaggagaccgagtaccaggccctgcaggagaccaacatgaagttcagcatgatgctgagagagaaggagttcgagtgccacagcatgaaggagaaggccctggccttcgagcagctgctgaaggagaaggagcagggcaagaccggcgagctgaaccagctgctgaacgccgtgaagagcatgcaggagaagaccgtggtgttccagcaggagagagaccaggtgatgctggccctgaagcagaagcagatggagaacaccgccctgcagaacgaggtgcagagactgagagacaaggagttcagaagcaaccaggagctggagagactgagaaaccacctgctggagagcgaggacagctacaccagagaggccctggccgccgaggacagagaggccaagctgagaaagaaggtgaccgtgctggaggagaagctggtgagcagcagcaacgccatggagaacgccagccaccaggccagcgtgcaggtggagagcctgcaggagcagctgaacgtggtgagcaagcagagagacgagaccgccctgcagctgagcgtgagccaggagcaggtgaagcagtacgccctgagcctggccaacctgcagatggtgctggagcacttccagcaggaggagaaggccatgtacagcgccgagctggagaagcagaagcagctgatcgccgagtggaagaagaacgccgagaacctggagggcaaggtgatcagcctgcaggagtgcctggacgaggccaacgccgccctggacagcgccagcagactgaccgagcagctggacgtgaaggaggagcagatcgaggagctgaagagacagaacgagctgagacaggagatgctggacgacgtgcagaagaagctgatgagcctggccaacagcagcgagggcaaggtggacaaggtgctgatgagaaacctgttcatcggccacttccacacccccaagaaccagagacacgaggtgctgagactgatgggcagcatcctgggcgtgagaagagaggagatggagcagctgttccacgacgaccagggcggcgtgaccagatggatgaccggctggctgggcggcggcagcaagagcgtgcccaacacccccctgagacccaaccagcagagcgtggtgaacagcagcttcagcgagctgttcgtgaagttcctggagaccgagagccaccccagcatccccccccccaagctgagcgtgcacgacatgaagcccctggacagccccggcagaagaaagagagacaccaacgcccccgagagcttcaaggacaccgccgagagcagaagcggcagaagaaccgacgtgaaccccttcctggcccccagaagcgccgccgtgcccctgatcaaccccgccggcctgggccccggcggccccggccacctgctgctgaagcccatcagcgacgtgctgcccaccttcacccccctgcccgccctgcccgacaacagcgccggcgtggtgctgaaggacctgctgaagcagtag

SEQ ID NO: 144484 - DNA, 5940 bp, Artificial Sequence
  derived and/or modified sequence
atgtcgagctggctggggggcttaggctctgggctgggacagagcctggggcaagttggggggtcactcgcatctttgaccggccagatttctaattttacaaaggatatgctcatggagggcacagaggaagttgaggctgaattgcccgactcccggactaaggaaatagaagcgattcacgccatcctgaggagcgaaaacgaaaggctgaagaagctctgcactgacctggaggagaaacatgaagcctctgaaatccagattaagcaacagagcacatcatacaggaaccagctgcagcaaaaggaggttgagataagccacctgaaggctcggcaaatagccctacaggaccaattactaaagctgcaatccgccgcccagtcagtccctagcggcgctggggtgcccgccaccacagcatcctcgtcttttgcctacgggataagtcatcacccatcagccttccatgacgatgatatggattttggcgacatcatttccagtcagcaggaaatcaatcggctctctaatgaggtatcccgcctcgaatcggaggtaggtcactggagacatattgcacagacatccaaagctcagggcactgataacagcgaccagtcggagatttgtaaacttcagaacatcatcaaggagttgaaacagaatcgctcgcaggagattgacgatcaccaacatgaaatgagcgttctacaaaacgcgcaccagcagaagctgacagagatttctagaagacaccgggaagaactctctgactatgaggaacgcatcgaagaattagagaacctgctgcagcaaggcgggtcaggggtaatcgagactgatctgtcaaagatctatgagatgcagaaaactatccaggttctgcagatagaaaaggtggaatccactaagaaaatggagcagctcgaggacaaaattaaagacatcaataagaaactcagcagtgccgaaaacgaccgggacatcttgaggcgagaacaagagcagctcaacgtagaaaagaggcagataatggaggagtgcgagaatctaaagctcgaatgtagtaaactgcagccctctgccgtgaagcagtcggatacaatgacagaaaaggagagaatcctcgctcagtccgcgagcgttgaggaagtgttccgtcttcaacaggccctctccgacgccgagaacgaaatcatgaggctttcatccttaaaccaagacaatagtctggccgaagataatctgaaacttaaaatgcgtatcgaagtgctcgagaaagagaaatctcttcttagccaggagaaggaagaactgcagatgtcactgctcaaactgaataacgagtatgaggtgattaagagcacagcaacgagggacattagtctcgatagtgagctgcatgacctccgcttaaacctagaggctaaagaacaggagctgaaccagtctatctctgagaaagagacactgatagctgagattgaggagctggatagacaaaaccaggaggccactaagcacatgattctcataaaggaccagttatccaagcagcaaaatgaaggcgatagtataatttccaagttgaaacaggacctgaacgatgagaagaagagggtgcaccaactggaggatgacaaaatggacatcaccaaagagctcgacgtccaaaaggagaagttgatacagtccgaagtcgccctcaatgacctgcatctgacaaagcagaagctggaggacaaggtggagaatctcgtagatcagctaaacaaatcacaggaatctaacgtgagcatccagaaggagaacctagagctgaaggaacatatacgccaaaacgaagaggaactcagtaggatccgcaatgagctaatgcagtccctgaatcaggactcaaatagtaacttcaaagatacactccttaaggaacgcgaagccgaagtccgaaatttgaagcagaacctgagcgaactcgaacagctgaatgaaaacctgaaaaaggtggcctttgatgtcaagatggaaaacgaaaaactcgtcctggcatgcgaggacgtacgtcaccagctagaagaatgtctggcggggaataaccagctgagtctagagaagaatacaatcgtggaaacgctgaagatggaaaaaggagagatcgaggcggagctctgctgggctaaaaaacgtctcctggaggaagcaaacaaatacgaaaagacgattgaggagctgtctaatgctcggaatttaaacaccagcgccctacagctagaacacgaacacctgatcaaacttaaccagaaaaaagatatggaaatcgctgagctgaagaagaacatcgagcagatggacacggatcacaaagaaaccaaagatgtactgagcagttccctagaggagcagaagcaactaacccagctgatcaacaaaaaagaaatcttcatcgaaaagctgaaagaacggagctctaagttacaagaggagctggataagtactctcaggcgctgcgcaaaaacgagattttgcgccagacaatcgaggaaaaagatcgctccctggggagcatgaaagaagagaacaaccacctgcaggaggagcttgagcgattaagagaagagcaaagtcgtacagcgccagtggccgatccaaaaacactagactcagtcactgagctcgccagcgaagtgagccagctcaatactatcaaggagcacttggaggaggaaatcaagcaccatcagaaaatcattgaggatcagaatcagagcaagatgcagcttctacagtcattgcaggaacaaaagaaggagatggacgaattccgctaccagcacgagcagatgaacgccacccatacgcaactgtttttggagaaggatgaggagatcaaatctctgcaaaagacaatcgagcaaataaaaacgcagcttcacgaagagcgtcaggatattcagactgacaactccgatatctttcaggaaaccaaagtgcagtcattaaacatcgagaacggcagcgagaaacacgacctgtccaaggccgagaccgagcgccttgtgaagggtatcaaagaacgagagctggaaatcaaactcctgaacgagaagaacatctcactcactaagcagatagaccagctgagcaaggatgaggtgggaaaactgacgcagattatccagcagaaagacctggagatccaggccctacacgctcgaattagctcaaccagccacacccaggacgtagtgtatctccaacaacaactccaagcctatgctatggagcgggaaaaggtctttgctgtgctcaatgaaaaaacaagagaaaacagccatcttaaaaccgagtaccacaaaatgatggacatcgttgctgccaaagaggcggcgctaatcaagctgcaggatgagaacaaaaagctatcaacaagatttgaaagttcaggccaagacatgtttagagagaccattcagaatttaagccgaattattcgggaaaaggacattgagattgatgcactcagccaaaagtgccaaactctgctggccgttctgcagacaagttcaaccggcaacgaagctggaggcgtaaactcaaatcagtttgaagagttgttgcaggaacgcgataaactgaagcagcaggtgaagaagatggaggaatggaagcagcaggttatgacgaccgttcaaaacatgcagcatgaatctgcccagttgcaagaggagttgcatcagctgcaggcccaagtgttggtggacagtgacaataatagcaagctgcaggtggattacaccggcctgattcagagttacgaacagaacgagacaaagttgaagaactttgggcaagagctagcgcaagtccagcactctattgggcagctctgtaataccaaagatctgttgctgggtaagctggatattatttccccgcagctctctagcgcatcactgctcactccacagtccgcggaatgccttagagcttctaagtccgaagtgctcagtgagagctccgagctgctgcaacaggagctggaggaactgagaaagtccctccaggagaaagacgccactatccggaccctccaggaaaataatcacaggctttcagacagcatcgccgcaaccagtgaactcgaaaggaaggagcatgaacagaccgacagcgaaatcaaacaactgaaagagaagcaggatgtcctgcagaaactgttgaaggagaaagatctgttaataaaagccaagagcgaccaactgctgtcttctaacgagaattttaccaacaaagtgaatgagaacgaactcctcaggcaggcagtgactaatttgaaggagaggatcctcatactcgaaatggatatcggcaagctcaagggggaaaacgaaaagatagtcgaaacttatcggggaaaagagaccgaataccaagccctgcaggagacgaatatgaaattctccatgatgctccgggaaaaagagttcgaatgccactctatgaaagaaaaagcgttagcatttgagcaactgcttaaggagaaggaacagggaaagacgggggaacttaaccagctacttaatgccgtgaaaagtatgcaggagaaaacggtggtgttccagcaggaacgggatcaggtgatgctggcccttaagcaaaagcaaatggagaatacagctctgcagaatgaggtccagagactacgcgacaaagagttccggtccaaccaagaactggaaagattaaggaaccatttgctagagagcgaggattcctatacccgtgaggccctcgccgccgaggaccgcgaagctaaactccgtaagaaagtgacagtgctggaggagaaactagtatccagtagcaatgctatggagaatgcatcccaccaggccagcgttcaagtggagtcattgcaggagcagctgaacgtggtgtcgaagcagagggatgagacagcactgcagctgtccgtctctcaagaacaggttaaacagtatgcgctgagcctggctaacttgcagatggtgcttgagcatttccagcaggaagagaaggcaatgtactcagcagagttggagaagcagaagcagctgattgccgagtggaagaaaaatgccgaaaacctcgaggggaaggtaatcagcctgcaggaatgtctcgacgaggcaaatgccgctctcgattcagcctcacggttgaccgagcagctggacgttaaggaggaacagatcgaggaattgaaacggcaaaacgagttgaggcaggagatgctggatgatgtgcagaagaagctcatgagtctagctaactcttcagaaggcaaagttgacaaagtgctgatgcggaacctgtttataggtcatttccatacgcctaaaaaccaacgtcatgaggtactgaggctcatgggatccatcctgggagtacggagagaggagatggagcagctctttcacgatgatcaggggggtgttacgcggtggatgacaggctggctgggaggggggagcaagtctgttccaaataccccattgagaccaaatcagcaatcggttgtgaatagttcttttagtgagctgttcgtgaaattcctggaaaccgaatcccacccttcaatcccaccgcccaagctgtcagtccacgatatgaagcctttagatagtcccggtcggcgtaagcgagacactaatgcacccgaatcgttcaaggataccgcagaaagcagatctggcagacgcaccgacgtgaatccattcctggctccccggagcgccgcagtacccctaattaatccagccggactgggccccgggggccccggccatcttctgctgaagccaatttccgacgtgctgcctaccttcacacccctcccagccctccctgataacagtgccggtgtggtgttgaaagacttactgaagcaatag

SEQ ID NO: 144485 - DNA, 5148 bp, Artificial Sequence
  derived and/or modified sequence
atgagcgtcctgcagaacgcccaccaacaaaagctgaccgagattagccggaggcatagagaagagctcagtgattatgaagagaggattgaggagttggagaatttgctgcagcagggaggttctggtgttatcgaaacggacctgtccaaaatttatgaaatgcaaaagaccatccaggtccttcagatagaaaaggtagagtccacgaagaagatggagcagttggaagataagattaaagatattaataagaagcttagttccgctgagaatgatcgtgacatcctaaggagggaacaagaacagctaaatgtggaaaaacgccaaatcatggaggaatgcgagaatcttaaactcgagtgcagcaagctacagccatcggctgtgaaacagagcgacacaatgactgagaaagaaaggattcttgcacagtcagctagcgtggaagaagtttttagactgcaacaagctttatctgacgccgagaatgagatcatgaggctgagctctctgaatcaagaagaacttcaaatgtccctcctgaaattgaataatgagtacgaagtgatcaaatcaactgctacccgggacatttcgttagactccgagctgcacgatctgcggctgaatctagaagcaaaggagcaagaattaaaccaatccatttcagagaaagagacactcattgcagaaatcgaggaacttgaccgacagaaccaggaagctacaaagcacatgatactcataaaagatcagctgagtaaacaacaaaacgaaggggactctattatctccaaattaaagcaagacctgaacgacgagaagaagcgggttcaccagttggaagatgacaagatggatatcaccaaagagcttgacgtccaaaaagagaagctcatacagagcgaggtggctctgaacgatctgcacctgacaaagcagaaactggaggacaaggtggagaatctggtcgatcaactcaacaaaagccaggaaagcaatgtaagcattcagaaagagaatcttgaactgaaggaacacatcagacagaatgaagaggaactttctaggatccgcaatgagcttatgcaatctctcaatcaggattcgaattctaatttcaaggatacactcttgaaggagagagaggcggaggtgcgaaaccttaagcaaaacttgtctgagctggagcagctgaacgagaacctgaaaaaggttgccttcgatgtgaagatggagaacgagaagctagtgctggcgtgcgaagacgttaggcaccagctggaggaatgccttgcaggcaataatcagcttagcctggagaagaataccatcgtggagacgttaaaaatggagaaaggagagattgaggccgagctttgttgggctaaaaaacgcctgctggaggaggcaaataaatatgagaaaacaatcgaggagctgtctaacgctcggaaccttaacacttcagccctgcagctggaacatgagcaccttattaaacttaatcaaaagaaggatatggaaatagccgagttgaagaagaacatcgagcagatggacaccgaccacaaagagaccaaagacgtgctctcttctagtctggaggaacagaagcaactgactcaactgatcaacaaaaaagagatcttcatcgaaaagctcaaagaacggtcttccaagctgcaagaggagctcgataaatactcccaggctctccggaagaacgaaattctacgccaaaccatcgaggaaaaagatcgatcactcggatctatgaaagaagagaacaatcatctgcaagaagagttggaaaggctgagggaggagcaaagtcgaacagccccagtcgccgatcccaagaccctggactccgtgaccgaacttgccagcgaggtgtcccagttgaataccatcaaagagcacctggaggaggagattaagcatcatcagaagatcattgaggaccagaaccagtctaaaatgcagctgcttcagtctctacaggagcagaagaaggagatggatgagtttcgataccagcacgaacaaatgaatgccactcacactcaactgtttctggagaaagatgaggagattaaatcactccaaaaaacaatcgagcagattaagactcaactgcacgaggaaaggcaagacatccagactgacaacagtgacattttccaggagacaaaagtccagagccttaatatcgaaaatggctctgaaaaacacgacctttctaaagccgaaactgagcggctggtgaaaggaataaaagaaagagagctggagatcaagctgctcaacgagaaaaacatttcacttacaaaacagatcgatcaactcagcaaggacgaggtgggcaagttgactcaaattattcagcaaaaagacctggagattcaggccctgcacgctagaataagttccacttcacatacacaggatgtggtctatctgcagcagcaactccaggcttacgccatggagcgagaaaaagtgtttgcagtactgaacgagaagacacgggagaacagccatctgaaaacggagtaccacaaaatgatggacattgtcgcggccaaggaagctgccctgatcaagctgcaggatgaaaacaagaaactgagcaccagattcgagtcttccggacaggatatgttcagagagactattcagaatctgtcccggatcattcgggagaaggacatagaaatcgatgctctctcgcagaagtgtcagaccctgctggccgttctccaaacatctagtaccgggaacgaagcggggggtgtgaactctaatcagtttgaagagctgctccaggaacgcgacaaattgaaacaacaggtgaagaaaatggaggaatggaagcagcaggtgatgacaacggtacagaatatgcaacacgagtccgcccaattacaggaagagctccatcaactccaggcgcaagtgctcgtggactcagataacaactcaaagctgcaagttgattataccggcttaattcaaagttacgagcaaaacgaaaccaaacttaaaaattttggccaagaactagcccaagtccagcactcaatagggcagctttgtaacactaaagaccttttgctcgggaagttagacataatctctccccagctgtcttcggcatcactcctcactccacagtcagccgaatgccttcgggcctctaaatccgaagtcttatctgaaagctccgagctgctgcagcaggagctggaggagctgaggaagagccttcaagagaaagatgccacaattcgcaccttgcaagagaataatcacaggctgagtgactccatagctgccacttccgagttggaacgcaaagagcatgaacagacagattcagagataaagcagctcaaggaaaagcaagacgtactgcagaaactgcttaaagaaaaagatctgttaatcaaggctaagagcgaccagcttctgagtagtaatgaaaacttcactaataaagttaatgagaatgagctgctgcgccaggcagtcacaaatcttaaagagcgcatcttgatactcgagatggatatcggaaagcttaagggcgagaacgaaaagatcgtggagacttatcgtggcaaagaaacggaataccaggctctgcaagaaactaacatgaaattctccatgatgctgcgggaaaaagagttcgagtgccacagcatgaaggagaaagccctagcctttgaacagctgctcaaggagaaagagcagggcaaaacaggcgagcttaaccagttactaaacgccgtgaaatctatgcaggagaagaccgtcgttttccagcaggaaagagatcaggtgatgctggctcttaaacagaagcagatggagaacaccgcgctacagaacgaggtccagcgccttagagataaagaatttaggtcaaatcaagaattggaacggctgaggaatcatttactggagtccgaagacagctataccagggaagctcttgctgccgaagaccgggaagctaaattgcgaaagaaggtcactgtgctggaggagaagctggtgtcgagttctaatgcgatggaaaacgcatcacaccaagcttcagtgcaggtcgagagcttgcaggaacaactgaatgtcgtgtctaaacagcgtgatgagactgcgctgcaactctccgtgagccaggagcaggttaagcagtatgcactaagccttgctaacctccagatggtcctagagcactttcagcaagaggagaaggccatgtattctgcagagcttgaaaagcagaagcaactgattgctgagtggaaaaaaaacgcggaaaatctggaaggcaaagtcatatctctgcaggagtgtctggacgaagcaaacgccgcactggactcggctagccgcctgacagaacaactcgacgttaaagaggaacaaattgaggagcttaaacgtcagaacgagttaagacaggagatgctggatgatgtccagaagaaactgatgtctttagcgaattctagcgaggggaaggtcgacaaagtgctgatgaggaacctgtttataggtcacttccacacacctaagaatcagagacacgaggtcttgagactgatgggtagtatactaggagtgcggcgggaggaaatggagcagcttttccacgacgatcaggggggtgtgacccgctggatgactggctggctgggcggcgggtccaagtcggtcccgaacactcccctccgcccaaaccaacagtctgtggtcaactcttctttttctgaattatttgtgaaattcctcgagacagagtctcacccctccatccctcctccaaagctgagcgtccacgacatgaaacctttagattctcctggccgccggaagcgcgatacaaatgcccccgagtctttcaaagacacagcagaatcacggagcggacggcgcaccgacgttaacccctttcttgctccacgatccgccgcggtcccattgatcaatcccgccgggctgggcccgggggggcccggccacctccttttgaaacccatctccgacgtgctgccgacctttactcctctccctgctctgcctgataacagtgctggtgtagtgttaaaggatctacttaagcagtag

SEQ ID NO: 144486 - DNA, 5940 bp, Artificial Sequence
  derived and/or modified sequence
atgagctcctggctgggcggcctgggcagcggcctgggccagagcctgggccaggtgggcggcagcctggccagcctgaccggccagatcagcaacttcaccaaggacatgctgatggagggcacagaggaggtggaggccgagctgcctgacagcaggaccaaggagattgaggccatccacgccatcctgcggagtgaaaatgaaaggctgaagaagctgtgcacagacctggaggagaagcatgaggccagcgagatccagatcaagcagcagagcaccagctacagaaaccagctgcagcagaaggaggtggagatcagccacctgaaggcccggcagatcgccctgcaggaccagctgctgaagctgcagagcgctgcccagagcgtgcccagcggggccggcgtgcctgccaccacagccagcagcagctttgcctacggcatcagccaccaccccagcgccttccatgatgatgacatggactttggagacatcatcagcagccagcaggagatcaaccggctgagcaatgaggtgtcccggctggagagcgaggtgggccactggaggcacatcgcccagaccagcaaggcccagggcacagacaacagcgaccagagcgagatctgcaagctgcagaacatcatcaaggagctgaagcagaacagaagccaggagattgatgaccaccagcacgagatgtctgtgctgcagaatgcccaccagcagaagctgacagagatcagccgccgccaccgggaggagctgagtgactatgaggagagaattgaggagctggagaacctgctgcagcagggcggcagcggggtcatcgagacagacctgagcaagatctatgagatgcagaagaccatccaggtgctgcagatcgagaaggtggagagcaccaagaagatggagcagctggaggacaagatcaaggacatcaacaagaagctgagcagcgcagaaaatgaccgggacatcctgcggcgggagcaggagcagctgaatgtggagaagaggcagatcatggaggagtgtgagaacctgaagctggagtgcagcaagctgcagcccagcgctgtgaagcagagcgacaccatgacagagaaggagcgcatcctggcccagagcgcctctgtggaggaggtgttccggctgcagcaggccctgagtgatgctgaaaatgagatcatgaggctgagcagcctgaaccaggacaacagcctggccgaggacaacctgaagctgaagatgagaattgaggtgctggagaaggagaagagcctgctgagccaggagaaggaggagctgcagatgagcctgctgaagctgaacaatgaatatgaggtgatcaagagcacagccacccgggacatcagcctggacagcgagctgcatgacctgcggctgaacctggaggccaaggagcaggagctgaaccagagcatcagcgagaaggagaccctgattgctgagattgaggagctggaccggcagaaccaggaggccaccaagcacatgatcctgatcaaggaccagctgagcaagcagcagaatgaaggagacagcatcatcagcaagctgaagcaggacctgaatgatgagaagaagagggtgcaccagctggaggatgacaagatggacatcaccaaggagctggatgtgcagaaggagaagctgatccagagcgaggtggccctgaatgacctgcacctgaccaagcagaagctggaggacaaggtggagaacctggtggaccagctgaacaagagccaggagagcaatgtgtccatccagaaggagaacctggagctgaaggagcacatccggcagaatgaggaggagctgagccgcatcagaaatgagctgatgcagagcctgaaccaggacagcaacagcaacttcaaggacaccctgctgaaggagcgggaggccgaggtgaggaacctgaagcagaacctgtctgagctggagcagctgaatgaaaacctgaagaaggtggcctttgatgtgaagatggagaatgagaagctggtgctggcctgtgaagatgtgcgccaccagctggaggagtgcctggccggcaacaaccagctgagcctggagaagaacaccatcgtggagaccctgaagatggagaagggggagattgaagctgagctgtgctgggccaagaagaggctgctggaggaggccaacaagtatgagaagaccatcgaggagctgagcaatgccaggaacctgaacaccagcgccctgcagctggagcacgagcacctgatcaagctgaaccagaagaaggacatggagattgctgagctgaagaagaacatcgagcagatggacacagaccacaaggagaccaaggatgtgctgagcagcagcctggaggagcagaagcagctgacccagctgatcaacaagaaggagatcttcatcgagaagctgaaggagaggagcagcaagctgcaggaggagctggacaagtacagccaggccctgaggaagaatgagatcctgcggcagaccatcgaggagaaggacaggagcctgggctccatgaaggaggagaacaaccacctgcaggaggagctggagcggctgcgggaggagcagagcaggacagcccctgtggccgaccccaagaccctggacagcgtgacagagctggccagcgaggtgtcccagctgaacaccatcaaggagcacctggaggaggagatcaagcaccaccagaagatcatcgaggaccagaaccagagcaagatgcagctgctgcagagcctgcaggagcagaagaaggagatggatgagttccgctaccagcacgagcagatgaatgccacccacacccagctgttcctggagaaggatgaggagatcaagagcctgcagaagaccatcgagcagatcaagacccagctgcacgaggagcggcaggacatccagacagacaacagcgacatcttccaggagaccaaggtgcagagcctgaacattgaaaatggcagcgagaagcatgacctgagcaaggccgagacagagcggctggtgaagggcatcaaggagcgggagctggagatcaagctgctgaatgagaagaacatcagcctgaccaagcagattgaccagctgagcaaggatgaggtgggcaagctgacccagatcatccagcagaaggacctggagatccaggccctgcacgcccgcatcagcagcaccagccacacccaggatgtggtgtacctgcagcagcagctgcaggcctatgccatggagcgggagaaggtgtttgctgtgctgaatgagaagacccgggagaacagccacctgaagacagagtaccacaagatgatggacatcgtggccgccaaggaggccgccctgatcaagctgcaggatgagaacaagaagctgagcaccaggtttgagagcagcggccaggacatgttccgggagaccatccagaacctgagccgcatcatccgggagaaggacattgaaattgatgccctgagccagaagtgccagaccctgctggccgtgctgcagaccagcagcactggaaatgaggccggcggcgtgaacagcaaccagtttgaggagctgctgcaggagcgggacaagctgaagcagcaggtgaagaagatggaggagtggaagcagcaggtgatgaccaccgtgcagaacatgcagcatgaaagtgcccagctgcaggaggagctgcaccagctgcaggcccaggtgctggtggacagcgacaacaacagcaagctgcaggtggactacacaggcctcatccagagctatgagcagaatgagaccaagctgaagaactttggccaggagctggcccaggtgcagcacagcatcggccagctgtgcaacaccaaggacctgctgctgggcaagctggacatcatcagcccccagctgagcagcgccagcctgctgaccccccagagcgctgagtgcctgcgggccagcaagtctgaggtgctgtctgagagcagcgagctgctgcagcaggagctggaggagctgaggaagagcctgcaggagaaggatgccaccatccgcaccctgcaggagaacaaccaccggctgagtgacagcattgctgccaccagcgagctggagaggaaggagcacgagcagacagattctgagatcaagcagctgaaggagaagcaggatgtgctgcagaagctgctgaaggagaaggacctgctgatcaaggccaagagtgaccagctgctgagcagcaatgaaaacttcaccaacaaggtgaatgaaaatgagctgctgcggcaggccgtgaccaacctgaaggagcgcatcctgatcctggagatggacatcggcaagctgaagggggagaatgagaagatcgtggagacctaccggggcaaggagacagagtaccaggccctgcaggagaccaacatgaagttctccatgatgctgcgggagaaggagtttgagtgccacagcatgaaggagaaggccctggcctttgagcagctgctgaaggagaaggagcagggcaagacaggagagctgaaccagctgctgaatgctgtgaagtccatgcaggagaagacagtggtgttccagcaggagcgggaccaggtgatgctggccctgaagcagaagcagatggagaacacagccctgcagaatgaggtgcagaggctgcgggacaaggagttccgcagcaaccaggagctggagcggctgaggaaccacctgctggagagcgaggacagctacacccgggaggccctggccgcagaagatcgggaggccaagctgaggaagaaggtgacagtgctggaggagaagctggtgagcagcagcaatgccatggagaatgccagccaccaggcctctgtgcaggtggagagcctgcaggagcagctgaatgtggtgtccaagcagagagatgaaacagccctgcagctgtctgtgtcccaggagcaggtgaagcagtatgccctgagcctggccaacctgcagatggtgctggagcacttccagcaggaggagaaggccatgtacagcgctgagctggagaagcagaagcagctgattgctgagtggaagaagaatgctgagaacctggagggcaaggtgatcagcctgcaggagtgcctggatgaggccaatgctgccctggacagcgccagccggctgacagagcagctggatgtgaaggaggagcagatcgaggagctgaagaggcagaatgagctgcggcaggagatgctggatgatgtgcagaagaagctgatgagcctggccaacagcagcgagggcaaggtggacaaggtgctgatgaggaacctcttcatcggccacttccacacccccaagaaccagagacatgaggtgctgcggctgatgggcagcatcctgggcgtgagaagagaggagatggagcagctgttccatgatgaccagggcggcgtgacccgctggatgacaggctggctgggcggcggcagcaagtctgtgcccaacacccccctgcggcccaaccagcagagcgtggtgaacagcagcttcagcgagctgtttgtgaagttcctggagacagagagccaccccagcatccccccacccaagctgtctgtgcatgacatgaagcccctggacagccctggccgcaggaagagggacaccaatgcccctgagagcttcaaggacacagctgagagccgctctggaagaagaacagatgtgaaccccttcctggcccccaggtctgctgctgtgcccctcatcaacccagctggcctgggccctgggggccctggccacctgctgctgaagcccatcagtgatgtgctgcccaccttcacccccctgcctgccctgcctgacaacagcgctggggtggtgctgaaggacctgctgaagcagtag

SEQ ID NO: 144487 - DNA, 5148 bp, Artificial Sequence
  derived and/or modified sequence
atgtctgtgctgcagaatgcccaccagcagaagctgacagagatcagcagaagacaccgggaggagctgagtgactatgaggagcgcatcgaggagctggagaacctgctgcagcagggcggcagcggcgtgattgaaacagacctgagcaagatctatgagatgcagaagaccatccaggtgctgcagatcgagaaggtggagagcaccaagaagatggagcagctggaggacaagatcaaggacatcaacaagaagctgagcagcgcagaaaatgaccgggacatcctgcggcgggagcaggagcagctgaatgtggagaagaggcagatcatggaggagtgtgagaacctgaagctggagtgcagcaagctgcagcccagcgctgtgaagcagagcgacaccatgacagagaaggagcgcatcctggcccagagcgcctctgtggaggaggtgttccggctgcagcaggccctgagtgatgctgaaaatgagatcatgaggctgagcagcctgaaccaggaggagctgcagatgagcctgctgaagctgaacaatgaatatgaggtgatcaagagcacagccacccgggacatcagcctggacagcgagctgcatgacctgcggctgaacctggaggccaaggagcaggagctgaaccagagcatcagcgagaaggagaccctgattgctgagattgaggagctggaccggcagaaccaggaggccaccaagcacatgatcctgatcaaggaccagctgagcaagcagcagaatgaaggagacagcatcatcagcaagctgaagcaggacctgaatgatgagaagaagagggtgcaccagctggaggatgacaagatggacatcaccaaggagctggatgtgcagaaggagaagctgatccagagcgaggtggccctgaatgacctgcacctgaccaagcagaagctggaggacaaggtggagaacctggtggaccagctgaacaagagccaggagagcaatgtgtccatccagaaggagaacctggagctgaaggagcacatccggcagaatgaggaggagctgagccgcatcagaaatgagctgatgcagagcctgaaccaggacagcaacagcaacttcaaggacaccctgctgaaggagcgggaggccgaggtgaggaacctgaagcagaacctgtctgagctggagcagctgaatgaaaacctgaagaaggtggcctttgatgtgaagatggagaatgagaagctggtgctggcctgtgaagatgtgcgccaccagctggaggagtgcctggccggcaacaaccagctgagcctggagaagaacaccatcgtggagaccctgaagatggagaagggggagattgaagctgagctgtgctgggccaagaagaggctgctggaggaggccaacaagtatgagaagaccatcgaggagctgagcaatgccaggaacctgaacaccagcgccctgcagctggagcacgagcacctgatcaagctgaaccagaagaaggacatggagattgctgagctgaagaagaacatcgagcagatggacacagaccacaaggagaccaaggatgtgctgagcagcagcctggaggagcagaagcagctgacccagctgatcaacaagaaggagatcttcatcgagaagctgaaggagaggagcagcaagctgcaggaggagctggacaagtacagccaggccctgaggaagaatgagatcctgcggcagaccatcgaggagaaggacaggagcctgggctccatgaaggaggagaacaaccacctgcaggaggagctggagcggctgcgggaggagcagagcaggacagcccctgtggccgaccccaagaccctggacagcgtgacagagctggccagcgaggtgtcccagctgaacaccatcaaggagcacctggaggaggagatcaagcaccaccagaagatcatcgaggaccagaaccagagcaagatgcagctgctgcagagcctgcaggagcagaagaaggagatggatgagttccgctaccagcacgagcagatgaatgccacccacacccagctgttcctggagaaggatgaggagatcaagagcctgcagaagaccatcgagcagatcaagacccagctgcacgaggagcggcaggacatccagacagacaacagcgacatcttccaggagaccaaggtgcagagcctgaacattgaaaatggcagcgagaagcatgacctgagcaaggccgagacagagcggctggtgaagggcatcaaggagcgggagctggagatcaagctgctgaatgagaagaacatcagcctgaccaagcagattgaccagctgagcaaggatgaggtgggcaagctgacccagatcatccagcagaaggacctggagatccaggccctgcacgcccgcatcagcagcaccagccacacccaggatgtggtgtacctgcagcagcagctgcaggcctatgccatggagcgggagaaggtgtttgctgtgctgaatgagaagacccgggagaacagccacctgaagacagagtaccacaagatgatggacatcgtggccgccaaggaggccgccctgatcaagctgcaggatgagaacaagaagctgagcaccaggtttgagagcagcggccaggacatgttccgggagaccatccagaacctgagccgcatcatccgggagaaggacattgaaattgatgccctgagccagaagtgccagaccctgctggccgtgctgcagaccagcagcactggaaatgaggccggcggcgtgaacagcaaccagtttgaggagctgctgcaggagcgggacaagctgaagcagcaggtgaagaagatggaggagtggaagcagcaggtgatgaccaccgtgcagaacatgcagcatgaaagtgcccagctgcaggaggagctgcaccagctgcaggcccaggtgctggtggacagcgacaacaacagcaagctgcaggtggactacacaggcctcatccagagctatgagcagaatgagaccaagctgaagaactttggccaggagctggcccaggtgcagcacagcatcggccagctgtgcaacaccaaggacctgctgctgggcaagctggacatcatcagcccccagctgagcagcgccagcctgctgaccccccagagcgctgagtgcctgcgggccagcaagtctgaggtgctgtctgagagcagcgagctgctgcagcaggagctggaggagctgaggaagagcctgcaggagaaggatgccaccatccgcaccctgcaggagaacaaccaccggctgagtgacagcattgctgccaccagcgagctggagaggaaggagcacgagcagacagattctgagatcaagcagctgaaggagaagcaggatgtgctgcagaagctgctgaaggagaaggacctgctgatcaaggccaagagtgaccagctgctgagcagcaatgaaaacttcaccaacaaggtgaatgaaaatgagctgctgcggcaggccgtgaccaacctgaaggagcgcatcctgatcctggagatggacatcggcaagctgaagggggagaatgagaagatcgtggagacctaccggggcaaggagacagagtaccaggccctgcaggagaccaacatgaagttctccatgatgctgcgggagaaggagtttgagtgccacagcatgaaggagaaggccctggcctttgagcagctgctgaaggagaaggagcagggcaagacaggagagctgaaccagctgctgaatgctgtgaagtccatgcaggagaagacagtggtgttccagcaggagcgggaccaggtgatgctggccctgaagcagaagcagatggagaacacagccctgcagaatgaggtgcagaggctgcgggacaaggagttccgcagcaaccaggagctggagcggctgaggaaccacctgctggagagcgaggacagctacacccgggaggccctggccgcagaagatcgggaggccaagctgaggaagaaggtgacagtgctggaggagaagctggtgagcagcagcaatgccatggagaatgccagccaccaggcctctgtgcaggtggagagcctgcaggagcagctgaatgtggtgtccaagcagagagatgaaacagccctgcagctgtctgtgtcccaggagcaggtgaagcagtatgccctgagcctggccaacctgcagatggtgctggagcacttccagcaggaggagaaggccatgtacagcgctgagctggagaagcagaagcagctgattgctgagtggaagaagaatgctgagaacctggagggcaaggtgatcagcctgcaggagtgcctggatgaggccaatgctgccctggacagcgccagccggctgacagagcagctggatgtgaaggaggagcagatcgaggagctgaagaggcagaatgagctgcggcaggagatgctggatgatgtgcagaagaagctgatgagcctggccaacagcagcgagggcaaggtggacaaggtgctgatgaggaacctcttcatcggccacttccacacccccaagaaccagagacatgaggtgctgcggctgatgggcagcatcctgggcgtgagaagagaggagatggagcagctgttccatgatgaccagggcggcgtgacccgctggatgacaggctggctgggcggcggcagcaagtctgtgcccaacacccccctgcggcccaaccagcagagcgtggtgaacagcagcttcagcgagctgtttgtgaagttcctggagacagagagccaccccagcatccccccacccaagctgtctgtgcatgacatgaagcccctggacagccctggccgcaggaagagggacaccaatgcccctgagagcttcaaggacacagctgagagccgctctggaagaagaacagatgtgaaccccttcctggcccccaggtctgctgctgtgcccctcatcaacccagctggcctgggccctgggggccctggccacctgctgctgaagcccatcagtgatgtgctgcccaccttcacccccctgcctgccctgcctgacaacagcgctggggtggtgctgaaggacctgctgaagcagtag

SEQ ID NO: 144488 - DNA, 5940 bp, Artificial Sequence
  derived and/or modified sequence
atgagcagctggctgggcggcctgggcagcggcctgggccagagcctgggtcaagtgggaggcagcctggcaagtctcactggccagatcagcaattttacaaaggacatgctgatggagggaactgaagaggtggaggccgaattgcctgactctcgcacaaaggagatagaggccatccacgccatcctgcgatcggagaacgaaagattaaagaaactctgtactgacttggaggagaagcacgaggcttccgagattcagatcaagcagcagagcacgagctataggaatcagctacagcagaaagaggtcgaaatttcccatctgaaggcccggcagatagccttgcaggaccaactgctaaagctccagtcagccgcgcagtctgttcccagtggcgctggagttcctgcgacaacagcttcgtctagttttgcatacgggatatcacaccacccaagtgcctttcacgacgatgacatggacttcggcgacatcatttcgtctcagcaggaaatcaatcggctgtccaacgaggtgtctaggttggagtccgaagtcggtcactggcgtcacattgcccaaacctctaaagcccaagggacggacaacagtgaccaatccgagatttgcaagttacagaatattatcaaggagctgaagcagaaccggtctcaggaaattgacgatcatcagcatgagatgagtgtcttacagaatgcccaccagcaaaaattaacagagatctccagacgtcacagagaagagctgagtgattatgaggaaaggattgaggagctcgagaacctgctgcagcaaggaggctccggagtgattgaaacagacctgtccaaaatttatgaaatgcagaagacgatacaggtgttgcagattgaaaaggtagaatccacgaagaagatggaacagcttgaagacaaaataaaagatatcaacaagaaactgtccagtgcagagaacgatcgcgacatcttgagacgggaacaggaacagctgaacgtggaaaagagacagattatggaggagtgcgaaaacctcaaactcgagtgtagcaaactgcagccaagcgcagttaagcaaagcgatactatgaccgaaaaagaaagaatattagcacagagcgcatctgttgaggaggtgtttaggctccagcaagccttgtccgacgccgagaatgagatcatgcggcttagtagcttgaaccaggataactctctagccgaggataatttaaagctaaaaatgcggatagaggtgctcgaaaaagagaaatccctgctgagtcaggagaaagaagagttacagatgtccctgctgaagttgaataacgaatacgaggttattaaatccactgccacccgagacatttccttggatagcgagctccacgacctgagattgaaccttgaagctaaggagcaagagctgaaccagtctatatcggaaaaggaaaccctgatcgctgagattgaagagcttgaccggcagaaccaggaggcgacaaaacatatgatcctcattaaagatcagctgtctaaacagcagaatgagggggatagtattatttctaaactgaaacaggacctgaacgatgagaagaaaagagtccatcaattggaagatgataaaatggatattacaaaagaattggacgtccagaaggagaaactcatccagtctgaagtggcactgaacgaccttcatctgacgaagcagaagcttgaagacaaagtggagaacctggtcgatcagcttaataaatctcaggagtccaatgtgtctatccagaaagagaatctggagctaaaagagcacatacggcaaaatgaggaagagttgtcccgcatccggaacgaattaatgcaatccctgaaccaggatagcaattccaattttaaggataccctgcttaaggagagggaagcggaagttcgaaacctgaaacaaaacctaagtgagctcgagcaactgaatgagaatctcaagaaagttgcttttgacgtgaaaatggaaaatgagaagttggtcctcgcatgtgaggatgtgcgccaccagctggaggaatgcctggccggcaacaatcagcttagcctggagaaaaacacaattgtggaaacacttaagatggagaaaggcgaaatcgaagctgagctgtgctgggctaagaaaaggttattggaggaagctaacaaatacgagaaaactattgaagagctgagcaacgccaggaacctgaatacgtctgccctccagcttgagcatgaacatctcattaaactgaaccagaagaaagacatggaaatagccgagttaaaaaaaaacatcgagcagatggacacagaccacaaggagacaaaggacgtcttgagctcctctctggaagaacagaaacaactcacccagttgattaataaaaaggaaatctttatagagaagctgaaagagcggagttccaaacttcaagaagaactcgataagtacagccaagctctgagaaaaaatgagatacttcggcagactatcgaagagaaggaccgctctctcggcagtatgaaggaggagaataatcacctgcaggaggagttagagcggttgcgtgaggaacaatctcgtaccgcgccggtagcagacccaaaaacactcgatagcgtcaccgagctagcctccgaggtgtcccagctgaacacgatcaaggaacatcttgaagaagagatcaagcaccaccagaagatcatcgaggaccaaaaccagagtaagatgcaattattgcaaagcttgcaggagcagaagaaggagatggacgaattcaggtaccagcacgaacagatgaacgccacacatacacagctttttctggaaaaggatgaggagataaagtccctgcaaaagacaattgagcagatcaaaactcagctgcatgaggagcggcaagacatccagacagacaactccgacatcttccaggagactaaggtgcaaagcctcaatattgaaaatgggagtgaaaagcacgatctgtccaaggccgaaaccgagcggctggtgaagggaattaaggaacgggaactggaaataaagctgctaaatgagaagaacattagcctgaccaaacagatcgatcaactgagtaaggatgaagttggtaagctcacacagataattcagcagaaagatctggagatccaggcactgcacgctcggattagtagtacaagccacacccaggatgttgtgtatctgcaacagcagttacaggcctatgctatggagcgtgagaaagttttcgctgtgctgaacgaaaaaaccagagaaaacagtcacctcaagactgaatatcacaagatgatggatatcgtagctgcaaaagaagctgctcttatcaagctgcaagacgagaataagaaactgtctacgagattcgaaagctccgggcaggatatgttcagagaaaccattcagaaccttagtagaatcatcagggagaaggatattgaaatcgatgcattatcccaaaaatgccagaccctacttgctgtccttcaaacctctagcacaggcaatgaagctgggggagttaattctaaccaatttgaggaactgctgcaggaacgcgataagcttaaacagcaggtcaagaagatggaggaatggaagcagcaggttatgaccacagtgcaaaacatgcagcacgaaagtgcccagctccaagaagaactgcatcaattgcaggctcaggtgctcgtcgatagtgataacaattctaagcttcaggtggattacacaggccttatccaaagctacgagcaaaacgaaacaaaactcaagaactttgggcaggaacttgcacaggtgcagcattccattggacagctgtgtaacactaaagatctactcctcggcaagctcgatataatttccccacagctgtcttcggcatctttactcacaccccaatcagccgaatgcctgagagcaagcaaatccgaggtgctctccgagtctagtgaattgctgcagcaagagttggaagagttgaggaaaagtctgcaagagaaggatgcaaccatcaggaccctccaggagaacaaccaccgccttagcgactcaattgcagcaacgagcgagctggaaagaaaggaacacgagcagaccgatagcgagattaagcagctcaaagagaagcaggacgtactacagaagctgttgaaggagaaggaccttctaatcaaagcaaaaagtgaccaactgttaagtagcaacgagaatttcactaacaaggtgaacgaaaacgaactgcttcgccaagccgtcaccaacctgaaagaacgtatcctgattttagagatggatattggcaagctgaagggagagaatgagaaaatcgtggagacttataggggcaaagagactgagtaccaggcattgcaggaaaccaatatgaaattcagcatgatgttgagggagaaggaattcgaatgccactcaatgaaggaaaaggctctcgcgtttgagcaactcctaaaggaaaaggagcagggaaaaaccggagagctgaaccaactgttgaatgccgtgaaatccatgcaggagaaaaccgttgtttttcagcaagaacgcgatcaggtaatgcttgctctcaagcaaaagcagatggaaaacaccgcactccaaaacgaggtgcaaaggttgagagacaaggagttccgatccaatcaggaattagagaggctacgcaaccacctcctggaaagtgaggatagctacactcgagaggcattggctgccgaagatcgggaagccaagctcaggaagaaggtgactgttcttgaggagaagctcgtttcctctagtaatgctatggaaaatgcgagccatcaagcgagtgtgcaggtcgagtccctgcaggagcagctgaatgtggtgagcaagcagagagatgagactgccctgcagcttagcgtctcacaagaacaagtgaagcagtacgccttgtccttagctaatctgcaaatggtgctggaacacttccaacaggaagagaaggctatgtactcagccgaactagagaaacagaaacaactgattgccgagtggaagaaaaatgcagagaatctggagggaaaagttatttcgctgcaggagtgtctggatgaggccaacgccgcccttgatagcgcttctaggttgaccgagcagctggacgtcaaagaagaacagatcgaggagctcaaaagacaaaatgaacttcgtcaggagatgctggatgatgttcaaaagaaactgatgtctctagccaactcaagtgaaggaaaggtggacaaggtactgatgagaaatctgttcattggacattttcatactcccaaaaaccagcgccatgaagtgctaagactgatgggctccattctcggtgtcaggagggaagaaatggagcagctgtttcatgacgatcaggggggggtgactcgctggatgactggctggctcggcggtggctcaaagtccgtgcctaatacgcccttgcggccaaaccagcagtcagtggtcaatagttctttctccgaactgtttgtaaagtttctcgagacggagagccacccctcgattcccccgccaaagcttagcgtgcatgatatgaaacctctcgacagtccaggacggagaaaaagagacacaaatgctccagaaagctttaaggacaccgcagaaagcagaagcggtcgccgcactgatgtaaacccctttctggcgccaaggtcagctgctgtgcccctgattaatccggctggcctaggcccaggcggtccaggccacctgctcttaaaaccaattagtgacgtgctgccaactttcaccccactgccagccctgcctgacaattctgcaggggttgtactcaaggatctgttgaaacaatag

SEQ ID NO: 144489 - DNA, 5148 bp, Artificial Sequence
  derived and/or modified sequence
atgagcgtgctgcagaacgcccaccagcagaagctgaccgagatcagcaggagacatagggaggagttgagcgactatgaggagcggattgaggaattggagaacttactgcagcagggggggagcggtgttatcgagactgacctgagtaagatatacgaaatgcagaagaccatccaggtgctgcaaatcgaaaaagtggaaagcacgaagaagatggaacaattggaagataagattaaagacattaataaaaagctctcttctgccgagaacgacagagatatccttcgacgcgagcaggagcagttaaacgttgagaagaggcagattatggaggaatgcgagaacctgaaattggagtgctctaaactgcagccgagcgcagttaaacaatcagatactatgaccgagaaggagcgcatcctggcacagtctgccagcgtggaagaggtattccgccttcagcaggccttaagcgacgcggagaacgaaatcatgcgcctgagttccctgaaccaagaagaactgcagatgagcttgctcaaactgaataatgagtatgaagtgatcaaaagcacagctacaagagatataagcctggattccgagctccatgatcttcgcctgaaccttgaggctaaagagcaggagctgaaccagtccatctcagaaaaggaaacgttgatagctgaaattgaggaactggatcgccagaaccaggaagctaccaaacacatgatactaatcaaagatcaactcagcaaacagcagaatgaaggggacagcatcatttccaaacttaagcaggacctgaatgacgagaaaaaacgcgttcatcagctagaggacgacaagatggatattactaaagagctggacgtgcagaaggaaaaattaatccagtccgaagtagccttgaacgatctgcaccttaccaagcagaagctcgaggacaaggttgagaacctcgttgatcagctgaataaatctcaggagagcaacgtctcgatccagaaagaaaatctggagctgaaggagcacatacgccagaacgaggaggaactgtctcggattcgcaatgagctcatgcagtctctgaatcaggatagtaatagcaacttcaaggacacactgctcaaggaacgggaggccgaggttaggaacctgaaacaaaacctgagcgaactagagcagctgaacgagaacttaaaaaaggtggcatttgatgtgaagatggagaatgagaaacttgtgctggcttgcgaggacgtacgacaccagctggaagaatgccttgccgggaataaccaacttagcctcgagaagaacaccattgtggaaacacttaaaatggaaaagggcgaaatagaagccgagctgtgctgggccaaaaaaagactgctggaggaagctaacaaatacgaaaagacaatcgaggagttgagcaacgcccgaaacctcaacaccagcgcactccagttagagcacgaacacctgattaaactgaatcagaagaaggacatggagattgccgaactgaagaaaaatattgaacagatggataccgatcacaaagaaacaaaagatgtattgtctagttccctggaggagcagaaacaattgactcagcttattaacaaaaaggagatctttatagagaaactcaaagagcggtcctccaagctgcaggaggagctggacaagtattcccaggcacttaggaagaacgagatcctccgccagacgatagaggagaaggaccgcagcttaggcagcatgaaggaggagaataaccacttgcaggaggaactggagaggttaagagaggagcagtcaaggaccgcgcctgtcgccgacccgaaaactctggatagcgttacggagctagcttccgaggtgagccagctgaacaccataaaagagcacttggaggaagaaattaaacaccaccagaaaattattgaagatcagaaccagtctaagatgcagctgctgcaaagtctgcaggaacagaaaaaggaaatggatgaattccgatatcagcacgaacaaatgaacgctacacacacccagttatttttggaaaaggacgaggagataaaatcattacagaaaaccattgaacagattaagacccaactccacgaggaacggcaggacatccaaacagacaactcagatatattccaagaaaccaaagtccagtcgctcaatattgagaacggctccgagaagcatgacttgagtaaggctgaaactgagcgtctcgttaagggtataaaagagcgggagcttgaaatcaaacttctcaacgagaagaatatatctctgacaaagcagattgaccagctctcaaaggatgaagtgggaaaactgacacagattattcagcagaaggacttggaaattcaggctctgcacgccaggatttcgagcacctctcacactcaggatgtggtgtacctgcaacagcaactgcaggcgtacgcaatggaaagagaaaaagtattcgccgtcctcaacgaaaaaactcgtgaaaactcccacctcaagaccgagtaccataaaatgatggacattgtggctgccaaggaagctgccttaataaaactgcaggacgagaataagaagcttagtacgaggtttgagtcgagtggccaggacatgtttcgcgaaacgattcagaacttgtcacgcattatccgggagaaggacatagaaattgatgccctgagtcagaagtgccaaacccttcttgctgtcctgcaaacaagctccacggggaacgaggctggtggagtaaactccaaccagtttgaagaactgctgcaggagagagacaagctcaagcaacaagtaaagaaaatggaggaatggaaacagcaagtcatgacaaccgtccagaacatgcaacatgaatcggcacagctgcaagaagaactgcaccagctgcaggcccaggtattggtggacagtgacaataacagcaagcttcaagtggattatactgggttgatccagtcctacgagcagaacgagacaaagctaaagaacttcggccaggagttggctcaggtccagcacagcatcggacagttatgcaataccaaggatcttctgctggggaagctggacatcatcagcccccagctctcatctgcatccctcctgactccacagtcggccgaatgtctccgagccagcaaaagtgaggtcttgagtgagtcatcggagctgctgcagcaagaactggaggagctccgcaagagcttgcaagaaaaagacgcaacgatcagaactttacaggagaataaccacagactgtcggactctatagccgccactagcgaactggagcgaaaagaacacgaacagacggactcagaaataaaacagttgaaggaaaaacaggatgtacttcagaagttgctgaaggaaaaggacctgcttatcaaggccaagtctgatcaactcctcagttccaatgagaatttcacaaataaggtgaatgaaaatgagctgcttcgacaggccgtaaccaatttaaaggagaggatcctgatcctggagatggacattggcaaactcaagggtgagaacgagaaaatagttgagacctaccgaggcaaggaaacggagtaccaggccctgcaggagaccaatatgaagttctcaatgatgctcagagagaaggagtttgagtgtcatagtatgaaggagaaggctttggctttcgagcaattgctaaaggagaaggagcagggaaagacaggggaattgaaccagttactcaacgccgtcaagtccatgcaagaaaaaacagtggtgttccaacaggagcgagaccaggtcatgctcgcccttaagcagaagcagatggagaatacagcgcttcagaatgaggtgcaaagactgagggacaaagagtttagaagtaatcaggaactagagcggctgagaaaccacctgctagagtcagaagattcttatacaagagaagcactagctgccgaagaccgggaagccaagctccggaaaaaggtgaccgtcctcgaagagaagctggtctcatctagcaatgccatggagaatgccagccaccaggcctctgttcaggtcgagagcctccaggagcaactaaacgtcgtaagcaagcagagagacgagactgccttacaactgtctgtgagtcaggaacaggtgaaacagtacgcactctcactggctaacctacaaatggttctcgagcacttccagcaggaggagaaggccatgtatagcgccgagctcgaaaagcaaaagcagttaatcgccgaatggaaaaaaaatgctgagaatctggagggcaaggttataagccttcaggaatgtcttgacgaggccaatgccgcattggacagcgcaagccggctcaccgagcagttggatgtgaaggaggaacagattgaggagcttaaaaggcaaaacgagctgcgacaagaaatgctagacgacgtgcaaaagaaattgatgtccttagcgaatagcagtgagggaaaggttgataaagtcctaatgagaaaccttttcatcgggcactttcacaccccgaaaaaccaacggcacgaggtcctcaggctcatggggtctattttaggcgtgcgacgagaagagatggaacagctctttcacgacgatcagggtggagtgaccaggtggatgaccgggtggcttggtggaggatccaaatctgtgcccaacacccccctgcgcccaaaccagcaatctgttgttaacagcagctttagtgagctgttcgtcaaatttctggaaacagaatcacatccgtccattcctcccccgaaattatctgtgcacgatatgaagcctttagattcccctggtcgtagaaagcgggatactaatgcaccagagagtttcaaggacacagctgagagcagatctggccgacggactgacgtcaatccttttctggcccccaggagtgccgctgtgcccctgattaaccccgcgggtctcggtcccggtggcccagggcacttgcttctcaagcctatctcagatgtgctgcccacatttacccctttgccagccctgcccgacaatagcgctggtgtggtcttgaaagatttgctgaagcagtag

SEQ ID NO: 144490 - DNA, 5939 bp, Artificial Sequence
  derived and/or modified sequence
atgagctcatggcttggaggacttggaagcggtctgggacagtctctgggacaagtcgggggatcactggccagccttactggtcagataagtaatttcactaaggatatgctcatggagggtactgaagaagtcgaagccgaactgcccgacagtaggacgaaggagattgaggccatccatgcaatcctccgaagcgagaatgagagacttaaaaagctctgtaccgatctggaagaaaaacacgaggcatcagaaattcagattaaacaacagtccactagttacaggaaccagctccagcagaaagaagtggagatttctcaccttaaggcaagacagattgctctgcaggaccaactcttaaagcttcagtccgcagctcagtctgtgccgtctggggcaggcgttcccgcaaccactgcctctagctccttcgcctatgggatcagtcatcacccctccgcatttcatgatgacgacatggacttcggagatattatatcaagccaacaggaaatcaacagactgagcaatgaggtgtcccggcttgagtccgaggtgggccactggaggcacatcgcccagactagcaaggctcaaggcacagataatagcgaccagtcagagatctgcaagcttcaaaacattattaaggagttaaaacagaaccgctcccaagaaatcgatgaccaccagcacgagatgagtgtgctgcaaaacgcacaccaacagaaacttaccgaaatttctcgcagacatcgcgaagagctctccgattatgaagagagaatcgaagaattagagaatcttctgcagcaaggtggctctggggtgatcgagaccgacctcagtaagatatacgagatgcagaaaacgatccaagttctgcagatagagaaggtggagtccactaaaaagatggagcaactggaggacaaaataaaggatattaataaaaagttatccagcgccgagaacgatagagatatactgaggagggagcaggaacaactaaatgtggaaaagcggcagatcatggaggagtgtgagaatttgaaactggagtgtagcaaactgcagccatccgcagtgaaacagtctgacactatgaccgaaaaggaaaggatactggcgcagagtgccagtgtggaagaagtttttagactccaacaggcacttagtgacgccgagaatgagatcatgaggctttccagtctgaatcaggataactcgcttgccgaagataaccttaaactgaagatgagaatcgaggtgttggaaaaagaaaagtcacttctgagtcaggaaaaagaggaactgcagatgagccttctgaagctcaacaatgaatacgaggtgataaagagcacagccactagagatattagcctcgattccgagttgcacgacctccgcctgaatctggaggcgaaggagcaagaactaaaccagtctatttcagagaaggaaactctcatcgccgagatcgaagagctggatagacagaatcaggaagcaaccaagcacatgattctaataaaagatcagctgagtaaacagcagaacgagggcgatagcattatctctaagctgaaacaagacctaaacgatgagaagaaacgagtccaccagctggaggacgacaagatggatatcacaaaggaattagatgttcaaaaggaaaagctaatacaatcagaagtggctctcaatgacctgcacctcacgaagcagaaactcgaggacaaggtggaaaacctggtggaccagctgaacaaatcgcaagagtcgaacgtcagcattcagaaggagaatctggagcttaaagagcacatacggcagaacgaagaagaacttagccgaattagaaatgagcttatgcagagcctaaaccaagactccaattctaatttcaaggacactctgctcaaagaaagggaggctgaagtgcggaatctcaaacagaatctctccgaactcgagcaactcaatgagaacctgaagaaggtcgcctttgacgtgaaaatggagaacgagaagctagtactggcatgcgaagacgtcaggcatcagctcgaagaatgtctggcagggaataaccagctcagtctggagaagaacactatagtcgaaactctcaaaatggagaaaggagagattgaggcagaactgtgctgggccaagaaaagactgcttgaggaggccaataaatatgaaaagacaatcgaggaacttagtaacgcacggaacttgaatacaagtgccctgcagctggagcatgaacacctcatcaagttaaaccagaagaaggacatggagatcgccgaattgaaaaaaaacattgagcaaatggatacggatcacaaggagaccaaggatgttttgtcaagctccctggaggagcagaagcagttgacccagctaatcaataagaaagaaatttttatagaaaaactgaaagaaaggtcctccaagctgcaggaagagttagacaagtactcgcaggccctcaggaagaatgagattctgaggcaaaccatcgaggagaaggataggagtttgggttccatgaaagaggagaacaatcatctccaggaggagctggaacggctgcgtgaagaacagagccggaccgccccagtagccgatcccaagactcttgattccgtaactgagcttgcatcagaggtctcccaacttaacacaataaaagagcacctggaggaggagattaagcaccatcagaagattattgaagatcagaaccagagcaaaatgcagctcctgcaaagccttcaagagcaaaagaaggaaatggatgaatttcgctaccagcacgaacagatgaatgctacgcatacgcagcttttcttggagaaggacgaggagatcaagtccctgcagaagacaatcgagcagattaagacccaactccatgaggaacggcaggatatacagactgacaatagcgacattttccaggagacaaaagtccagtcactcaatattgagaacgggagcgagaagcacgatctgtccaaggcagaaaccgagagattagtcaagggtataaaagagcgtgagctcgagattaaactcctaaacgaaaagaatatttctttaacaaaacagatcgatcagcttagcaaggacgaggtgggaaaactaacacagattatacagcagaaagacctggaaattcaagctctgcacgcccgaatctcttctacgtcccacactcaggatgtagtttacctgcaacagcagctgcaagcatatgcaatggagagggagaaagtttttgctgttcttaacgagaaaacaagagaaaactcccacttgaaaactgagtaccacaagatgatggatatcgtggccgctaaggaggctgccctgatcaaacttcaggacgaaaacaagaaattgtccacaagatttgagtcatccggacaggatatgttccgtgagacaattcaaaaccttagccgcataatcagggaaaaagacatcgaaatcgatgctttgtctcagaagtgccaaaccttactggccgtactgcaaacaagctcaactgggaacgaggctggcggtgtaaactctaatcagttcgaggagctgttacaggaacgggacaagctgaagcagcaggtgaaaaagatggaggaatggaaacaacaagttatgacaacggtgcagaacatgcaacacgagtccgcacagctgcaagaggaattgcaccagctgcaggctcaggtgttagttgactccgataacaattctaagctgcaggtggattatacaggcctcatccagtcatatgagcagaatgaaactaagctcaagaacttcggccaggaactggcgcaggtgcagcatagcatcgggcaattgtgcaacactaaggatctcctgctaggaaaattggatatcatttcacctcagctgtctagcgcgtcccttctgacccctcagtccgctgaatgcctccgcgctagcaagtccgaggttctgtccgagtcctctgagctgctgcagcaagaactagaggagcttaggaagagcctccaagagaaggatgccactatcagaactctgcaagaaaataatcaccgtctgagtgactccattgcggctaccagcgagttggagcgaaaagagcatgagcagacggacagcgagattaaacaactcaaagaaaagcaggatgtgttacaaaaactcttaaaggagaaagacttgttgataaaagctaaatcagaccagcttctgtcatccaatgaaaattttacaaacaaggtgaatgaaaacgaattgttgcggcaggctgtaaccaacctgaaggaacgaattctaatattagaaatggacatcggcaagctgaagggagagaacgagaaaatcgtagagacgtatcggggtaaagagacagaatatcaagcactacaagagacaaatatgaagttttcaatgatgctgcgcgaaaaggagtttgagtgtcactcaatgaaagagaaagcactggccttcgagcagctcctgaaggaaaaagagcagggaaaaactggggaactgaatcagctgcttaacgcagtgaagagtatgcaggagaaaaccgtcgtgtttcagcaggagcgggatcaggtcatgttggcccttaagcagaagcagatggagaataccgccctccagaacgaggtgcagcgactacgagacaaggagttcaggagtaatcaagagttggaacggctgcgcaatcatctgcttgaatctgaggatagttacacgagggaagcactggcagccgaggatagagaggctaagttaaggaaaaaggtcacagtactggaagagaagctggtgagcagcagtaatgccatggagaacgcatcacatcaggcatcagtgcaggtagagtccttgcaggagcagctgaatgtcgtgtcaaaacaaagagatgagacagctctgcagctcagcgtgtcacaggaacaagtgaaacagtacgcgctctcactggctaatcttcagatggtgctagagcattttcagcaggaggagaaagccatgtacagtgcagagctggagaaacagaagcagctgatcgctgagtggaagaaaaacgcagagaacctggaggggaaggtcatctcattgcaagagtgcttggatgaagccaatgctgccttggactcagctagccgcctgacggagcagctggacgtcaaagaggagcaaattgaagaactgaaacggcagaatgagctgcggcaggaaatgctggacgacgttcaaaaaaagctgatgtctctcgctaatagctccgagggcaaagtggataaagtgctaatgcggaatctgtttattgggcacttccacacgcctaaaaaccagaggcacgaagtgttgaggctgatggggtctatcctgggtgtgcgaagagaggaaatggagcagctgtttcatgacgatcagggtggcgttacacgttggatgacagggtggcttggcggtggatctaaatcagtgcccaatacgccgttgaggccaaaccagcaaagcgtggtcaactcctctttctctgaactcttcgtcaagtttcttgagacagagagtcacccgtcaattccgccaccaaaactctcagtccacgacatgaagccgctggactcccccggaagacgcaaaagggatacaaatgcgccagagtctttcaaggacactgctgagtctagatctggaagaagaacagatgttaatccattcctggctccgcgaagtgcagccgtgcccttgattaaccctgcaggtctggggcctggagggcctggccacctactattaaaacctatatccgatgtcctgcccaccttcacacccctgcccgcactgcctgataactcagctggagtggtactgaaagatttactgaagcagta

SEQ ID NO: 144491 - DNA, 5147 bp, Artificial Sequence
  derived and/or modified sequence
atgagcgtcctccagaatgcccaccagcagaaactgaccgagatatctcggaggcaccgggaagaactatcagactacgaggagaggattgaggagctggagaacctgttgcagcagggaggcagtggagtgatcgagacagatctgtctaagatctatgagatgcaaaagaccatccaggtactgcagatagagaaagttgagagcaccaagaaaatggaacagttagaagataagattaaggacattaacaaaaaactttcctctgcagagaacgatcgagatatccttcgtagggaacaggaacagctaaatgtggagaaacggcagatcatggaggagtgtgaaaacctcaaactcgagtgctctaaattgcagccttccgctgttaagcagagtgacaccatgacagagaaagaaagaattctcgcacagtctgcatcggtggaggaggtctttaggctgcagcaggcgctgagcgatgctgagaatgagatcatgagactttcaagccttaaccaggaggaactgcaaatgagtctgctaaaattgaacaacgaatatgaagtcattaagagcactgccactcgagacattagcctcgattctgagctgcacgacttgaggcttaatttagaggcaaaggaacaggaattaaaccagagcattagcgagaaggaaacgctgatcgcagagattgaggagctggataggcagaaccaagaggcaaccaaacatatgattcttatcaaggaccagctgtcgaagcagcaaaatgagggagactccatcataagcaagctgaagcaggatctgaatgacgaaaaaaagagggtgcaccaactggaagatgataagatggacatcaccaaagagctcgacgttcaaaaagaaaagcttatccaaagtgaagtggcactgaatgatttacaccttacgaaacagaaactggaggacaaggtggaaaacctcgtggaccagttgaataaatctcaggaaagcaacgtaagcatccagaaggagaacctggagcttaaagagcacatccggcagaatgaggaagaactgtccagaattcgtaatgagttaatgcagtcactgaatcaggactcaaacagcaacttcaaggataccttactgaaggagagagaagccgaggtacgcaacctcaagcagaaccttagcgagctggaacagctgaacgaaaacctgaagaaggtggcgtttgatgtaaagatggaaaatgaaaaattagtgctggcctgcgaagacgtgcgacatcagcttgaggagtgcctggctgggaataaccagttaagcctggagaaaaacacgatcgtggaaactctcaagatggagaaaggggagatcgaggcagagttatgctgggctaagaagcgccttttggaagaagcgaataaatatgaaaaaaccattgaagaactaagtaatgcgagaaatctgaatacctccgccctgcaattggagcacgaacacctgattaagctaaaccagaagaaggatatggaaattgccgagttgaagaaaaacatcgaacagatggacactgaccataaggagactaaggacgtgttgtcaagctctcttgaagagcagaagcaactcacccaattgataaataagaaggaaatatttatcgagaagttgaaggagaggtccagcaaacttcaggaggaactggacaaatatagtcaggccttgcgcaagaacgagatacttcgccagactattgaagagaaggacagaagtctcgggagtatgaaggaggaaaacaaccaccttcaggaagagctggagcggcttagggaagaacagtctcgcactgcccctgtggctgaccctaaaacactagatagcgtgactgaactggcttctgaagtgtctcagctgaacactatcaaggagcacctagaggaggaaatcaaacaccaccagaaaattatagaggaccaaaaccagtccaaaatgcagctccttcagagcctgcaagagcagaagaaagaaatggacgagtttcggtaccagcatgagcagatgaacgctacccatactcagctatttctcgaaaaagatgaggaaattaagtctcttcagaagacaatagaacaaatcaagactcagctccacgaggaacgccaagacattcagaccgacaattccgacatatttcaggagacaaaagtccaatctttaaacatagagaacggatccgaaaagcacgatcttagtaaagccgaaactgagcggttggtcaagggtattaaggaacgcgaactagagataaaattactgaatgaaaagaacatttcccttaccaaacagatagaccagttaagcaaggatgaggtcgggaagctcacacagattatccagcagaaagaccttgaaatccaagcgctccatgctaggatcagctcgactagccatacccaggatgtggtctacctgcagcaacagcttcaggcatacgccatggaacgtgagaaggtgttcgccgtcctgaacgagaaaactcgagagaactcacacctaaaaacggagtatcataaaatgatggacatcgtagcagctaaagaggctgctcttatcaagttacaggatgaaaataaaaaactgtccacacggtttgaatcttctggacaggatatgtttcgagagactattcagaacctttctcgcataattagagagaaggatatcgaaatcgatgctttgtctcagaagtgccagactctgctcgccgttctacagacctcatccactgggaacgaagccggaggtgtcaacagcaatcagtttgaggagcttctccaagagagagataagcttaaacagcaggttaagaagatggaggagtggaaacaacaggtaatgacaactgtgcagaatatgcaacatgagagcgcacaactccaagaggagctgcatcagctgcaagctcaagtccttgtagactctgataacaacagtaaactacaggttgactacactggcttaatccaaagctacgaacaaaacgagaccaaactgaagaattttggccaggagctcgcccaggtacagcattccatcggccagttgtgcaatactaaggatctcttgttagggaagctggatatcatatctccccagttgtcttcagcatcactgctgaccccacagagcgccgaatgtctcagggcctcgaagagcgaagtgctcagcgagagcagcgaactgttacagcaagagctcgaggaattacgcaagtccctgcaagaaaaagatgctactatacgtaccctgcaggagaataatcatcgattgtctgatagcatcgctgctacatcagagctcgaacgaaaggaacatgaacaaacagactcagagatcaagcagttaaaggaaaaacaggacgtgctgcagaagctccttaaagagaaagacctgttaattaaagccaagtcagatcaattgctatccagtaacgagaactttacaaacaaagtaaatgagaatgagcttctgcgacaggccgtgacaaacctgaaagagcgcatactcattcttgagatggatattggcaagctgaaaggcgaaaatgagaaaatagtcgaaacttaccggggtaaggaaaccgaataccaggctctccaggagactaatatgaagttctccatgatgttgcgagagaaggagtttgagtgccacagtatgaaagaaaaagccctggccttcgaacagttgctgaaagagaaggagcaaggcaagaccggagagctgaatcagctgttaaacgccgtcaagtctatgcaggagaagactgtcgtctttcaacaggagcgggatcaagtgatgctggcacttaagcagaagcagatggagaacacagccctgcaaaatgaggtgcagcgattgcgagacaaagagtttcggtccaaccaggagttagaacggcttaggaatcatctgctcgagtctgaggattcttacacacgggaggccctcgcggctgaggatcgtgaagctaagttgagaaaaaaggtcaccgtcctcgaggagaagttagtcagttcaagcaacgccatggagaacgcatcccatcaagcctcagtccaagtcgagtcactgcaggagcagcttaatgtggtgagcaaacaaagagatgaaaccgccctccagctgtccgtgtcacaggaacaagtgaaacagtacgccctcagcctagctaatctccagatggtgttggaacacttccagcaggaggagaaagcaatgtactccgccgagctcgagaaacagaagcagctgattgccgagtggaaaaaaaacgccgagaacctggaaggcaaggtgatatctttgcaggagtgcctggacgaggccaatgctgctttggacagcgcaagcaggctcactgaacaactggatgttaaagaagaacagatcgaggagttgaagagacagaatgagcttagacaggagatgctggacgacgtccagaagaaactgatgagccttgcgaattcttcagagggtaaagtggacaaagttctcatgcggaacctgttcattggtcacttccacactcctaagaatcagagacacgaggtattgcgtcttatggggtccattctgggtgtgcggagggaagaaatggagcagctgtttcacgacgaccaaggaggagttacaagatggatgacaggatggctgggaggaggctccaaatcggtccccaacacccctctccgtcctaaccagcagagcgtagtgaattcttccttctccgagttatttgtcaagtttctcgagacagagtcccacccttcgattcctccaccgaagctcagcgttcacgacatgaaaccactggactcccccggtaggaggaagcgagatacaaatgcacctgagagcttcaaggacaccgctgagagtcgcagcggcagaagaaccgacgtgaatccctttttagcaccaagatctgctgccgtcccgctcataaatcccgcaggactcgggccaggaggccctggccacctcttgctgaagcccatctctgatgtcttgcctacgtttacgccactcccagcccttccagacaattcagccggagtggtgctcaaagaccttctgaagcagta

SEQ ID NO: 144492 - DNA, 9996 bp, Artificial Sequence
  derived and/or modified sequence
gatccgctgccgctttccgagcgagtgtcatggcggccggcgtcgagttggcaggagtaacccacggaactgaggaaagtcattagagctgagaaagaagtggcccaatctggacggtgggaattcgtgggaatgagcagaaggccctccgtaggtgactgtgtcactagaggcgggcccctggtaaaattccaggccaggcctctgcgtttctaggcagaacctggagtcggccttgcctgagaacccagctttgtgttatcgtatcctgtctcgcgaaggcaggcgttcaaggatatttggtcggatcgcccggcggcgctaaacgttttcttttttccgagcggaccgggtcgttctctaaactcgccgcgatgtcgtcctggcttgggggcctcggctccggattgggccagtctctgggtcaagtcgggggcagcctggcttccctcactggccagatatcaaactttacaaaggatatgctgatggagggcacggaggaagtggaagcagaattacctgattctaggacaaaggaaattgaagccattcatgcaatcttgagatcagagaatgaaaggcttaagaaactttgtactgatctagaagagaaacatgaagcatcagagattcaaataaagcagcaatctacaagttaccgaaatcaacttcaacaaaaagaggtagaaatcagccatcttaaagccagacagattgcactccaggatcagttgctgaaactgcagtcagctgctcagtcagtaccttcaggagctggtgtaccagcaaccactgcatcatcttcattcgcttatgggattagtcatcatccttcagctttccatgacgatgacatggactttggtgatataatttcatcccaacaagaaataaaccgactctcaaatgaagtttcaagacttgagtctgaagttggccattggaggcatattgctcagacttccaaagcacaaggaacagataactctgatcaaagtgaaatatgtaaactacaaaatatcattaaggaactaaaacagaaccgaagtcaggaaattgatgaccatcaacatgaaatgtcagtactgcagaatgcacaccaacagaaattgacagaaataagtcgacgacatcgagaagaattaagtgactatgaagaacgaattgaagaacttgaaaatctgttacaacaaggtggctctggagttatagaaactgatctctctaaaatctatgagatgcaaaaaactattcaagttctacaaatagaaaaagtggagtctaccaaaaaaatggaacaacttgaggataaaataaaagatataaataaaaaattatcttctgcagaaaatgacagagatattttgaggagagaacaagaacagctaaatgtggaaaagagacaaataatggaagaatgtgaaaacttgaaattggaatgtagtaaattgcagccttctgctgtgaagcaaagtgatactatgacagaaaaggaaagaattcttgcccagagtgcatcagtggaagaagtgttcagactacaacaagcactgtctgatgccgaaaatgaaataatgagattgagtagtttaaaccaggataacagtcttgctgaagacaatctgaaacttaaaatgcgtatcgaagttttagaaaaagagaagtcattactgagtcaagaaaaggaagaacttcagatgtcacttttaaaattgaacaatgaatatgaagtaattaaaagtacagctacaagagacataagtttggattcagaattacatgacttaagacttaatttggaggcaaaggaacaagaactcaatcagagtattagtgaaaaggaaacactgatagctgagatagaagaattggacagacagaatcaagaagctacaaagcacatgattttgataaaagatcagctatcaaaacaacaaaatgaaggagatagcatcatcagtaaactgaaacaagatctaaatgatgaaaaaaagagagttcatcaacttgaagatgataaaatggacattactaaagagttagatgtacagaaagaaaagctaattcaaagtgaagtggccctaaatgatttacatttaaccaagcagaaacttgaggacaaagtagaaaatttagtagatcagctaaataaatcacaagaaagtaatgtaagcatccagaaggagaatttagaacttaaggagcatattagacaaaatgaggaggagctttctagaataaggaatgagttaatgcagtctctaaatcaagactctaatagtaattttaaggataccttacttaaagaaagagaagctgaagttagaaacttaaagcaaaatctttcagaattagaacagctcaatgaaaatttaaagaaagttgcttttgatgtcaaaatggaaaatgaaaagttagttttagcatgtgaagatgtgaggcatcagttagaagaatgtcttgctggtaacaatcagctttctctggaaaaaaacactattgtggagactctaaaaatggaaaaaggagagatagaggcagaattgtgttgggctaaaaagaggctgttggaagaagcaaacaagtatgagaaaaccattgaagaactgtcaaatgcacgtaatttgaatacctctgccttacagctggaacatgagcatttaattaaactcaatcaaaagaaagacatggaaatagcagaactcaaaaagaatattgaacaaatggatactgaccataaagaaactaaggacgttttgtcatctagtttagaagagcagaagcagttgacacaacttataaacaagaaagaaatttttattgaaaagcttaaagaaagaagttcaaagctgcaggaggaattggataaatattctcaggccttaagaaaaaatgaaattttaagacagaccatagaggaaaaagaccgaagtcttggatccatgaaagaggaaaataatcatctgcaagaagaattggaacgactcagggaagagcagagtcgaaccgcacctgtggctgaccctaaaacccttgatagtgttactgaactagcatctgaggtatctcaactgaacacgatcaaggaacatcttgaagaggaaattaaacatcatcaaaagataattgaagatcaaaaccagagtaagatgcaactacttcagtctttacaagagcaaaagaaggaaatggatgagtttagataccagcatgagcaaatgaacgccacacacacccagctctttttagagaaggatgaggaaattaagagtttgcaaaaaacaattgaacaaatcaaaacccagttgcatgaagaaagacaggacattcaaacagataactctgatatttttcaagaaacaaaagttcagagccttaatatagaaaatggaagtgaaaagcatgatttatctaaagctgaaacggaaagattagtgaaaggaataaaagagcgagaactggagattaaacttctaaatgaaaagaatatatctttaactaaacagattgatcagttgtccaaagatgaagttggtaaactaactcagattattcagcagaaagatttggagatacaagctcttcatgctagaatttcttcaacttcccatactcaagatgttgtttaccttcaacagcaactgcaggcttatgctatggaaagagaaaaggtatttgctgttttgaatgagaagactagggaaaatagccatctaaaaacagaatatcacaaaatgatggatattgttgctgccaaggaagcagctcttatcaaactgcaagatgaaaataaaaaattgtccactagatttgaaagtagtggccaagatatgtttagagaaactattcagaatttatcacgtatcattcgagaaaaagacatcgaaatagatgcactaagtcagaaatgtcagactttattggcagttttacaaacatccagcactggtaatgaggctggaggtgttaatagtaatcaatttgaggagcttctacaggaacgtgacaagttaaaacagcaagtaaagaaaatggaagagtggaagcagcaggtgatgaccacagtacaaaatatgcaacacgagtcagcccagcttcaggaagagcttcaccaacttcaagcacaggttttggttgacagtgataataattctaaattacaagtggactatactggcctgatccaaagttatgagcagaatgaaaccaaactcaaaaattttgggcaggaattagcacaagttcagcacagcattgggcagctttgcaataccaaggatcttcttttaggaaaacttgatattatttcaccccagctgtcttctgcatcattgcttactccccagtctgcagagtgtcttagagcaagtaagtctgaagtattgagtgaatcttctgaattgcttcagcaagagttagaagagctaagaaaatcactacaggaaaaagatgcaacaattagaactctccaggaaaataaccacagattgtctgattcgattgctgccacctcagagctagaaagaaaagaacacgaacaaaccgattcagaaatcaagcagctaaaggagaaacaagatgttttgcaaaagttacttaaggaaaaagacctcttaatcaaagccaaaagtgatcaactactttcttccaatgaaaatttcactaacaaagtaaatgaaaacgaacttttgaggcaggcagtaacaaacctgaaggagagaatattaattctagagatggacattggcaaactaaaaggagaaaatgaaaaaatagtggaaacatacaggggaaaggaaacagaatatcaagcgttacaagagactaacatgaagttttctatgatgctgcgagaaaaagagtttgagtgccactcaatgaaggagaaggctcttgcttttgaacagctattgaaagagaaagaacagggcaagactggagagttaaatcagcttttaaatgcagttaaatcaatgcaggagaagacagttgtgtttcaacaggagagagaccaagtcatgttggccctgaaacaaaaacaaatggaaaatactgccctacagaatgaggttcaacgtttacgtgacaaagaatttcgttcaaaccaagagctagagagattgcgtaatcatcttttagaatcagaagattcttatacccgtgaagctttggctgcagaagatagagaggctaaactaagaaagaaagtcacagtattggaggaaaagctagtttcatcctctaatgcaatggaaaatgcaagccatcaagccagtgtgcaggtagagtcattgcaagaacagttgaatgtagtttccaagcaaagggatgaaactgcgctgcagctttctgtctctcaggaacaagtaaagcagtatgctctgtcactggccaacctgcagatggtactagagcatttccaacaagaggaaaaagctatgtattctgctgaactcgaaaagcaaaaacagcttatagctgaatggaagaaaaacgcagaaaatctggaaggaaaagtgatatcattacaggaatgtttggatgaagcaaatgctgcattggattcagcatcaagacttacagaacagttagatgtaaaagaagaacaaattgaagaacttaaaagacaaaatgagctccgacaagaaatgctggatgatgtacaaaagaaattgatgagcttagcaaacagctcagaaggaaaagtagacaaagtcctaatgagaaacctcttcattggtcatttccacacaccgaaaaatcagcgtcatgaagtgttacggttaatggggagcatcctgggcgtcagaagggaggagatggagcagttgtttcatgacgatcagggcggtgttaccaggtggatgactgggtggcttggaggaggatcaaaaagtgttcccaacacacctttgagaccaaatcagcaatctgtggttaatagttctttttcagaactttttgttaaatttctagaaacagaatctcatccatccattccaccaccaaagctttctgttcatgatatgaaacctctggattcaccaggaagaagaaaaagagatacaaatgcaccagaaagttttaaagatacagcagaatccaggtctggtagaagaacagatgtaaatccgtttttggctcctcgctcggcagctgtacctcttattaacccagctggacttggacctggtgggcccgggcatcttcttctgaaacccatctcagatgttttgcccacatttacacctttgccagcgttacctgacaacagtgctggggttgtgctgaaagaccttttaaagcaatagatgattctcaagccagagacaatctagcactttaaagaaaccatgaacactatatgtatgtactttatcacaaagtggcctttggggagaaagtcatgtatttgttcgcaattatgctttctctgaatttaataaaaatattcctaatgcttttagaaactgcaggtgtcaggagcaagtgtttgctatataatctgctttattccttctgatttgacctaatttaagctaggaacatttaatttatcttttaccttaatttacaaaaatacagacagacaaaaatactagtagctatatggcagctttttatttccttttgtgatttccaagctcatttaagctagagattgtggtttatcaagagagtgttttttttttttaaacgaagaataaaaaaatactagtagtggcttctctgcatagtgcagaaagttgatttgaagcatatattgatcatctttagaggactttgtggagacaggccaacaagattgttgctggaaggtcataggttccctgaggtgaagtatgtatttggtcctgtgcaatattatcatgtgtgtagattctttttttgtttgttttaaatagagatggggtctcactatgttgccaggctggcctcaaactcctgggctcaagtgatcctcccacctcagcctcccaaagtgctgggattaaggcatgagccactgcgcctggccctgtgtgtaaattcatgtgactaccaccacaggcaagacacggaagacttccattacaagcatccccctgtgttgccctctcataatcattgccacctctctccctggccctctccttaatccctgacaaccacttactgttctccatctcagtcattttgttattttgagaatgttatataaatggaatcaatatataccctcttgagactggctttttttcactcagcataattcccttgagatccatccaaggctttggatgtatcactagtttgttcctttttattgttgagcatatagtgcagatatatcacttagttttaacagctaaggtatctatttaaagataccatcttaaaactaaatgttacacaaattcatgcaactttcatataagcattaaaccatacagctgcatctacgtaagtataattagcaaaatcactgaacatgccacttcctgcctccgtctgcggtgttgacatatgaggtacagcaatccgagagtcaactgttatcacggtggccactgagggcagtgaaatcactttgatagcaccagtacccagatgtttgaaacttaagaaagtatttctttaatttttcataaacccatcataaaaaaaaaatcccgacttgaaacttaactgtatctggatgttcatatttttattagttgttgaagttgtacatttaaaaagatatttcttgcaaattttgtaaatttctatatgcttttaaaatagaaacatttgtataacaaggaaggatgaaaataaaacaaattcaaatatgtgaatagtcctggctgaggccagaactaaatttggttatttgcaagttttactgtgattaactgtactttctaatgtatttggaagactggaagtcttaattccatgttgatgggtgaaacttgtttttctgaaaaatgaagtaactgaaaatgctgcttcagaatgtcttgtatctccttagataactaatttatattgccattctttatttactatactttaaaggaagttgtcatgcaagttctatattagaactgtcaaactgcctcttggtttttgcctattattatttctctgtgagttgttactccttggtttttatatgctcctaacaaagatactttcactgactatcctacattatttgctgcttgccattgaaatttcatttcagtgtggagaaatgaaatactagtttctaagttaaaaaagacacatggtcctttatttttaagaaatagaatatgtaaaaagttttctcttttaatttgaaaaagagatgcatggttggtatttaagtagtatgtcatcatatttgaaatgccttttgtgacatttttgagtatttccttctctgaccaaaacaacttgtccgcctctcatcccatggtttaacgtaagtttaaaagctgttgtgggtggattgcatagctaaacatcacagagcatgatattaaatggctgctatttaaataaatatgtgaccttgtcctaaagctataatactggccgggcacagtggctcacgcctgtaatcccagaactttgggagggtgaggtgggtggatcacctgaggtcaggagttcaagaccagcctggccaacatggtgaaaccccatctctactaaaaatacaaaaattagctgggcatggtggcaggcgcctataatcccagctactcaggaggctgaggcaggagaattgcttgaccccgggaagtggaggttgcagttagcaaccactccactgcactccagcctgagcgacagagcgagactctgtctcaaaaaaaaaaaaaaaaaaaaaaaagctatagtacctaatgttttcattgtgtcattgaaactatagctgactggtatgtatactaagtgttcgttgatctaaaccagatataagtcattgacttttctgaaacttagttgtgtcagagatgaaccacctgctcactgaaccgtcttagtaaccagtgatgaagcatataattctaatgttggcaataggacattgctaacagtgcgtttaactgcaatattttaactacagtaatttttctgtttatttctctatccactcagtagaatttgtggttgaattccaccttcgctgccatagttttttaccacattcctaatggttttcaacctctatactgtagtagaaaattcatctaactactgaatttaattttagcataatactggatcaaattgtttgaattttcattcctgtcatttttgatttttaaaaaatgaaacaaaactaaacaacaaaaccctaggaaaagaatggcttctttccaactagtcaattaaaacgtccagtatctccccaaataaagccttaggtttcttttaacctcttaatggttaattgaaaagagtacagaaactatcaaaatacttatccaatcaatggggggaaaagctatgtcttcagggacagtagagtgatgagaattttttagaaaacactattatccatcaaacttaaaagcatttggacctgatatttaaagataatgaagttttccacatattgaagtattcaagacatcttccatccacaaaaatttatctttaagttttgtaaatatcaagtaagtatagatgatatttattttatatattcctatggaaaaaatgctactttaatgttctgacatttgtgattatttgccagtctttactttttaacttattaaaaagttaaatacttattaaggtttctctatgtaaaacaatttaaattgtcttttgatttttagggaaatatctaaacgtgggaaatttccaacgcaaccttaatattaggttgtgttatttatagagctaaagttaatgcatttttgaatttctcaggagcactgcaaggcaaaaaaatactccaaataaaaatgatatatgtaagttggcaatgtcttcagtcacaataaaaaaaatttttagcaaaca

SEQ ID NO: 144493 - DNA, 8001 bp, Artificial Sequence
  derived and/or modified sequence
gatccgctgccgctttccgagcgagtgtcatggcggccggcgtcgagttggcaggagtaacccacggaactgaggaaagtcattagagctgagaaagaagtggcccaatctggacggtgggaattcgtgggaatgagcagaaggccctccgtaggtgactgtgtcactagaggcgggcccctggtaaaattccaggccaggcctctgcgtttctaggcagaacctggagtcggccttgcctgagaacccagctttgtgttatcgtatcctgtctcgcgaaggcaggcgttcaaggatatttggtcggatcgcccggcggcgctaaacgttttcttttttccgagcggaccgggtcgttctctaaactcgccgcgatgtcgtcctggcttgggggcctcggctccggattgggccagtctctgggtcaagtcgggggcagcctggcttccctcactggccagatatcaaactttacaaaggatatgctgatggagggcacggaggaagtggaagcagaattacctgattctaggacaaaggaaattgaagccattcatgcaatcttgagatcagagaatgaaaggcttaagaaactttgtactgatctagaagagaaacatgaagcatcagagattcaaataaagcagcaatctacaagttaccgaaatcaacttcaacaaaaagaggtagaaatcagccatcttaaagccagacagattgcactccaggatcagttgctgaaactgcagtcagctgctcagtcagtaccttcaggagctggtgtaccagcaaccactgcatcatcttcattcgcttatgggattagtcatcatccttcagctttccatgacgatgacatggactttggtgatataatttcatcccaacaagaaataaaccgactctcaaatgaagtttcaagacttgagtctgaagttggccattggaggcatattgctcagacttccaaagcacaaggaacagataactctgatcaaagtgaaatatgtaaactacaaaatatcattaaggaactaaaacagaaccgaagtcaggaaattgatgaccatcaacatgaaatgtcagtactgcagaatgcacaccaacagaaattgacagaaataagtcgacgacatcgagaagaattaagtgactatgaagaacgaattgaagaacttgaaaatctgttacaacaaggtggctctggagttatagaaactgatctctctaaaatctatgagatgcaaaaaactattcaagttctacaaatagaaaaagtggagtctaccaaaaaaatggaacaacttgaggataaaataaaagatataaataaaaaattatcttctgcagaaaatgacagagatattttgaggagagaacaagaacagctaaatgtggaaaagagacaaataatggaagaatgtgaaaacttgaaattggaatgtagtaaattgcagccttctgctgtgaagcaaagtgatactatgacagaaaaggaaagaattcttgcccagagtgcatcagtggaagaagtgttcagactacaacaagcactgtctgatgccgaaaatgaaataatgagattgagtagtttaaaccaggaagaacttcagatgtcacttttaaaattgaacaatgaatatgaagtaattaaaagtacagctacaagagacataagtttggattcagaattacatgacttaagacttaatttggaggcaaaggaacaagaactcaatcagagtattagtgaaaaggaaacactgatagctgagatagaagaattggacagacagaatcaagaagctacaaagcacatgattttgataaaagatcagctatcaaaacaacaaaatgaaggagatagcatcatcagtaaactgaaacaagatctaaatgatgaaaaaaagagagttcatcaacttgaagatgataaaatggacattactaaagagttagatgtacagaaagaaaagctaattcaaagtgaagtggccctaaatgatttacatttaaccaagcagaaacttgaggacaaagtagaaaatttagtagatcagctaaataaatcacaagaaagtaatgtaagcatccagaaggagaatttagaacttaaggagcatattagacaaaatgaggaggagctttctagaataaggaatgagttaatgcagtctctaaatcaagactctaatagtaattttaaggataccttacttaaagaaagagaagctgaagttagaaacttaaagcaaaatctttcagaattagaacagctcaatgaaaatttaaagaaagttgcttttgatgtcaaaatggaaaatgaaaagttagttttagcatgtgaagatgtgaggcatcagttagaagaatgtcttgctggtaacaatcagctttctctggaaaaaaacactattgtggagactctaaaaatggaaaaaggagagatagaggcagaattgtgttgggctaaaaagaggctgttggaagaagcaaacaagtatgagaaaaccattgaagaactgtcaaatgcacgtaatttgaatacctctgccttacagctggaacatgagcatttaattaaactcaatcaaaagaaagacatggaaatagcagaactcaaaaagaatattgaacaaatggatactgaccataaagaaactaaggacgttttgtcatctagtttagaagagcagaagcagttgacacaacttataaacaagaaagaaatttttattgaaaagcttaaagaaagaagttcaaagctgcaggaggaattggataaatattctcaggccttaagaaaaaatgaaattttaagacagaccatagaggaaaaagaccgaagtcttggatccatgaaagaggaaaataatcatctgcaagaagaattggaacgactcagggaagagcagagtcgaaccgcacctgtggctgaccctaaaacccttgatagtgttactgaactagcatctgaggtatctcaactgaacacgatcaaggaacatcttgaagaggaaattaaacatcatcaaaagataattgaagatcaaaaccagagtaagatgcaactacttcagtctttacaagagcaaaagaaggaaatggatgagtttagataccagcatgagcaaatgaacgccacacacacccagctctttttagagaaggatgaggaaattaagagtttgcaaaaaacaattgaacaaatcaaaacccagttgcatgaagaaagacaggacattcaaacagataactctgatatttttcaagaaacaaaagttcagagccttaatatagaaaatggaagtgaaaagcatgatttatctaaagctgaaacggaaagattagtgaaaggaataaaagagcgagaactggagattaaacttctaaatgaaaagaatatatctttaactaaacagattgatcagttgtccaaagatgaagttggtaaactaactcagattattcagcagaaagatttggagatacaagctcttcatgctagaatttcttcaacttcccatactcaagatgttgtttaccttcaacagcaactgcaggcttatgctatggaaagagaaaaggtatttgctgttttgaatgagaagactagggaaaatagccatctaaaaacagaatatcacaaaatgatggatattgttgctgccaaggaagcagctcttatcaaactgcaagatgaaaataaaaaattgtccactagatttgaaagtagtggccaagatatgtttagagaaactattcagaatttatcacgtatcattcgagaaaaagacatcgaaatagatgcactaagtcagaaatgtcagactttattggcagttttacaaacatccagcactggtaatgaggctggaggtgttaatagtaatcaatttgaggagcttctacaggaacgtgacaagttaaaacagcaagtaaagaaaatggaagagtggaagcagcaggtgatgaccacagtacaaaatatgcaacacgagtcagcccagcttcaggaagagcttcaccaacttcaagcacaggttttggttgacagtgataataattctaaattacaagtggactatactggcctgatccaaagttatgagcagaatgaaaccaaactcaaaaattttgggcaggaattagcacaagttcagcacagcattgggcagctttgcaataccaaggatcttcttttaggaaaacttgatattatttcaccccagctgtcttctgcatcattgcttactccccagtctgcagagtgtcttagagcaagtaagtctgaagtattgagtgaatcttctgaattgcttcagcaagagttagaagagctaagaaaatcactacaggaaaaagatgcaacaattagaactctccaggaaaataaccacagattgtctgattcgattgctgccacctcagagctagaaagaaaagaacacgaacaaaccgattcagaaatcaagcagctaaaggagaaacaagatgttttgcaaaagttacttaaggaaaaagacctcttaatcaaagccaaaagtgatcaactactttcttccaatgaaaatttcactaacaaagtaaatgaaaacgaacttttgaggcaggcagtaacaaacctgaaggagagaatattaattctagagatggacattggcaaactaaaaggagaaaatgaaaaaatagtggaaacatacaggggaaaggaaacagaatatcaagcgttacaagagactaacatgaagttttctatgatgctgcgagaaaaagagtttgagtgccactcaatgaaggagaaggctcttgcttttgaacagctattgaaagagaaagaacagggcaagactggagagttaaatcagcttttaaatgcagttaaatcaatgcaggagaagacagttgtgtttcaacaggagagagaccaagtcatgttggccctgaaacaaaaacaaatggaaaatactgccctacagaatgaggttcaacgtttacgtgacaaagaatttcgttcaaaccaagagctagagagattgcgtaatcatcttttagaatcagaagattcttatacccgtgaagctttggctgcagaagatagagaggctaaactaagaaagaaagtcacagtattggaggaaaagctagtttcatcctctaatgcaatggaaaatgcaagccatcaagccagtgtgcaggtagagtcattgcaagaacagttgaatgtagtttccaagcaaagggatgaaactgcgctgcagctttctgtctctcaggaacaagtaaagcagtatgctctgtcactggccaacctgcagatggtactagagcatttccaacaagaggaaaaagctatgtattctgctgaactcgaaaagcaaaaacagcttatagctgaatggaagaaaaacgcagaaaatctggaaggaaaagtgatatcattacaggaatgtttggatgaagcaaatgctgcattggattcagcatcaagacttacagaacagttagatgtaaaagaagaacaaattgaagaacttaaaagacaaaatgagctccgacaagaaatgctggatgatgtacaaaagaaattgatgagcttagcaaacagctcagaaggaaaagtagacaaagtcctaatgagaaacctcttcattggtcatttccacacaccgaaaaatcagcgtcatgaagtgttacggttaatggggagcatcctgggcgtcagaagggaggagatggagcagttgtttcatgacgatcagggcggtgttaccaggtggatgactgggtggcttggaggaggatcaaaaagtgttcccaacacacctttgagaccaaatcagcaatctgtggttaatagttctttttcagaactttttgttaaatttctagaaacagaatctcatccatccattccaccaccaaagctttctgttcatgatatgaaacctctggattcaccaggaagaagaaaaagagatacaaatgcaccagaaagttttaaagatacagcagaatccaggtctggtagaagaacagatgtaaatccgtttttggctcctcgctcggcagctgtacctcttattaacccagctggacttggacctggtgggcccgggcatcttcttctgaaacccatctcagatgttttgcccacatttacacctttgccagcgttacctgacaacagtgctggggttgtgctgaaagaccttttaaagcaatagatgattctcaagccagagacaatctagcactttaaagaaaccatgaacactatatgtatgtactttatcacaaagtggcctttggggagaaagtcatgtatttgttcgcaattatgctttctctgaatttaataaaaatattcctaatgcttttagaaactgcaggtgtcaggagcaagtgtttgctatataatctgctttattccttctgatttgacctaatttaagctaggaacatttaatttatcttttaccttaatttacaaaaatacagacagacaaaaatactagtagctatatggcagctttttatttccttttgtgatttccaagctcatttaagctagagattgtggtttatcaagagagtgttttttttttttaaacgaagaataaaaaaatactagtagtggcttctctgcatagtgcagaaagttgatttgaagcatatattgatcatctttagaggactttgtggagacaggccaacaagattgttgctggaaggtcataggttccctgaggtgaagtatgtatttggtcctgtgcaatattatcatgtgtgtagattctttttttgtttgttttaaatagagatggggtctcactatgttgccaggctggcctcaaactcctgggctcaagtgatcctcccacctcagcctcccaaagtgctgggattaaggcatgagccactgcgcctggccctgtgtgtaaattcatgtgactaccaccacaggcaagacacggaagacttccattacaagcatccccctgtgttgccctctcataatcattgccacctctctccctggccctctccttaatccctgacaaccacttactgttctccatctcagtcattttgttattttgagaatgttatataaatggaatcaatatataccctcttgagactggctttttttcactcagcataattcccttgagatccatccaaggctttggatgtatcactagtttgttcctttttattgttgagcatatagtgcagatatatcacttagttttaacagctaaggtatctatttaaagataccatcttaaaactaaatgttacacaaattcatgcaactttcatataagcattaaaccatacagctgcatctacgtaagtataattagcaaaatcactgaacatgccacttcctgcctccgtctgcggtgttgacatatgaggtacagcaatccgagagtcaactgttatcacggtggccactgagggcagtgaaatcactttgatagcaccagtacccagatgtttgaaacttaagaaagtatttctttaatttttcataaacccatcataaaaaaaaaatcccgacttgaaacttaactgtatctggatgttcatatttttattagttgttgaagttgtacatttaaaaagatatttcttgcaaattttgtaaatttctatatgcttttaaaatagaaacatttgtataacaaggaaggatgaaaataaaacaaattcaaatatgtgaatagtcctggctgaggccagaactaaatttggttatttgcaagttttactgtgattaactgtactttctaatgtatttggaagactggaagtcttaattccatgttgatgggtgaaacttgtttttctgaaaaatgaagtaactgaaaatgctgcttcagaatgtcttgtatctccttagataactaatttatattgccattctttatttactatactttaaaggaagttgtcatgcaagttctatattagaactgtcaaactgcc

SEQ ID NO: 144494 - protein, 545 aa, Artificial Sequence
  derived and/or modified sequence
MDWGTELWDQFEVLERHTQWGLDLLDRYVKFVKERTEVEQAYAKQLRSLVKKYLPKRPAKDDPESKFSQQQSFVQILQEVNDFAGQRELVAENLSVRVCLELTKYSQEMKQERKMHFQEGRRAQQQLENGFKQLENSKRKFERDCREAEKAAQTAERLDQDINATKADVEKAKQQAHLRSHMAEESKNEYAAQLQRFNRDQAHFYFSQMPQIFDKLQDMDERRATRLGAGYGLLSEAELEVVPIIAKCLEGMKVAANAVDPKNDSHVLIELHKSGFARPGDVEFEDFSQPMNRAPSDSSLGTPSDGRPELRGPGRSRTKRWPFGKKNKTVVTEDFSHLPPEQQRKRLQQQLEERSRELQKEVDQREALKKMKDVYEKTPQMGDPASLEPQIAETLSNIERLKLEVQKYEAWLAEAESRVLSNRGDSLSRHARPPDPPASAPPDSSSNSASQDTKESSEEPPSEESQDTPIYTEFDEDFEEEPTSPIGHCVAIYHFEGSSEGTISMAEGEDLSLMEEDKGDGWTRVRRKEGGEGYVPTSYLRVTLN

SEQ ID NO: 144495 - DNA, 1638 bp, Artificial Sequence
  derived and/or modified sequence
atggactggggcaccgagctgtgggaccagttcgaggtgctggagagacacacccagtggggcctggacctgctggacagatacgtgaagttcgtgaaggagagaaccgaggtggagcaggcctacgccaagcagctgagaagcctggtgaagaagtacctgcccaagagacccgccaaggacgaccccgagagcaagttcagccagcagcagagcttcgtgcagatcctgcaggaggtgaacgacttcgccggccagagagagctggtggccgagaacctgagcgtgagagtgtgcctggagctgaccaagtacagccaggagatgaagcaggagagaaagatgcacttccaggagggcagaagagcccagcagcagctggagaacggcttcaagcagctggagaacagcaagagaaagttcgagagagactgcagagaggccgagaaggccgcccagaccgccgagagactggaccaggacatcaacgccaccaaggccgacgtggagaaggccaagcagcaggcccacctgagaagccacatggccgaggagagcaagaacgagtacgccgcccagctgcagagattcaacagagaccaggcccacttctacttcagccagatgccccagatcttcgacaagctgcaggacatggacgagagaagagccaccagactgggcgccggctacggcctgctgagcgaggccgagctggaggtggtgcccatcatcgccaagtgcctggagggcatgaaggtggccgccaacgccgtggaccccaagaacgacagccacgtgctgatcgagctgcacaagagcggcttcgccagacccggcgacgtggagttcgaggacttcagccagcccatgaacagagcccccagcgacagcagcctgggcacccccagcgacggcagacccgagctgagaggccccggcagaagcagaaccaagagatggcccttcggcaagaagaacaagaccgtggtgaccgaggacttcagccacctgccccccgagcagcagagaaagagactgcagcagcagctggaggagagaagcagagagctgcagaaggaggtggaccagagagaggccctgaagaagatgaaggacgtgtacgagaagaccccccagatgggcgaccccgccagcctggagccccagatcgccgagaccctgagcaacatcgagagactgaagctggaggtgcagaagtacgaggcctggctggccgaggccgagagcagagtgctgagcaacagaggcgacagcctgagcagacacgccagaccccccgacccccccgccagcgccccccccgacagcagcagcaacagcgccagccaggacaccaaggagagcagcgaggagccccccagcgaggagagccaggacacccccatctacaccgagttcgacgaggacttcgaggaggagcccaccagccccatcggccactgcgtggccatctaccacttcgagggcagcagcgagggcaccatcagcatggccgagggcgaggacctgagcctgatggaggaggacaagggcgacggctggaccagagtgagaagaaaggagggcggcgagggctacgtgcccaccagctacctgagagtgaccctgaactag

SEQ ID NO: 144496 - DNA, 1638 bp, Artificial Sequence
  derived and/or modified sequence
atggactggggcactgaactctgggaccagttcgaagtcctcgagcggcacacacagtggggcctggatctgctggacaggtacgtgaaatttgtcaaggaacgtaccgaggtggagcaggcctatgcgaagcagttacggtccctcgtgaagaaatacttgcccaaaaggcccgctaaggacgatccggaaagcaagttctcacagcagcagagctttgtgcagattcttcaggaggtgaatgacttcgcggggcagcgggagctcgtagctgagaacctgagtgtgagagtgtgcctggagctcactaaatattcacaggaaatgaaacaggagcgcaagatgcattttcaagaaggccgtcgggcccaacaacagttggagaatggcttcaagcagctggaaaactctaaacgaaaattcgagcgagattgccgtgaagcagaaaaggctgctcagacagccgaaaggctggaccaggacatcaacgccaccaaggccgacgtcgagaaagctaagcagcaggctcacttgaggagccatatggccgaggaaagtaagaatgaatatgcagcacagctccagcgattcaaccgcgatcaggctcacttctattttagtcagatgccccagatttttgacaaactccaagacatggacgaaagacgggccacccggctgggggctggttacggcctcttgtccgaggcagagcttgaggtcgtccccattatagctaaatgtctggaaggtatgaaggtcgcagccaacgcagtggatcccaagaatgactcccatgtactcatcgagttacacaaaagtggattcgccaggcctggcgacgtcgagtttgaagattttagtcagcccatgaatagggcccccagcgactctagcctcggcacgccttccgacggcagacccgaattgaggggacctggacgatctcgcacaaaacgatggcccttcggaaagaagaataagacagtagtgactgaagacttctcacacctcccccccgaacagcagcggaagaggctgcaacaacagctcgaggagagaagccgagagctccagaaggaggtcgaccaaagagaggccctgaaaaaaatgaaggacgtatatgaaaaaactccgcagatgggagatcccgcaagtctcgaaccccagatcgccgagactctatcaaatatcgaaaggttgaagctggaggtacagaaatacgaggcgtggctggcggaagctgagtcccgagtgctctcaaatcgaggcgattcattatccaggcacgccagaccccccgaccccccggcttccgcacctcctgactcatcctctaattctgcatcccaggacactaaggagtcctcagaggagcctcctagcgaagaatcacaagatacccctatctatacagaatttgatgaggacttcgaagaagaaccaactagccctattggacattgcgttgcaatttaccattttgagggcagctctgaagggactattagtatggcagagggcgaggatctctcactgatggaagaggacaagggggatggttggacccgcgtgcggcgcaaggaaggcggggaggggtatgttccaacaagctaccttagggtgaccctcaactag

SEQ ID NO: 144497 - DNA, 1638 bp, Artificial Sequence
  derived and/or modified sequence
atggactggggcacagagctgtgggaccagtttgaggtgctggagcggcacacccagtggggcctggacctgctggaccgctacgtgaagtttgtgaaggagaggacagaggtggagcaggcctatgccaagcagctgcggagcctggtgaagaagtacctgcccaagaggcctgccaaggatgatcctgagagcaagttcagccagcagcagagctttgtgcagatcctgcaggaggtgaatgactttgctggccagcgggagctggtggccgagaacctgtctgtgcgggtgtgcctggagctgaccaagtacagccaggagatgaagcaggagaggaagatgcacttccaggagggcagaagagcccagcagcagctggagaatggcttcaagcagctggagaacagcaagaggaagtttgagcgggactgccgggaggccgagaaggccgcccagacagctgagcggctggaccaggacatcaatgccaccaaggcagatgtggagaaggccaagcagcaggcccacctgcggagccacatggccgaggagagcaagaatgaatatgctgcccagctgcagcgcttcaacagagaccaggcccacttctacttcagccagatgccccagatctttgacaagctgcaggacatggatgagcggcgggccacccggctgggcgccggctacggcctgctgtctgaggccgagctggaggtggtgcccatcatcgccaagtgcctggagggcatgaaggtggccgccaatgctgtggaccccaagaatgacagccacgtgctgattgagctgcacaagagcggctttgcccggcctggagatgtggagtttgaggacttcagccagcccatgaacagagcccccagcgacagcagcctgggcacccccagtgatggccggcctgagctgcggggccctggccgcagcaggaccaagcgctggccctttgggaagaagaacaagacagtggtgacagaggacttcagccacctgcccccagagcagcagaggaagaggctgcagcagcagctggaggagaggagccgggagctgcagaaggaggtggaccagcgggaggccctgaagaagatgaaggatgtgtatgagaagaccccccagatgggagaccctgccagcctggagccccagattgctgagaccctgagcaacatcgagcggctgaagctggaggtgcagaagtatgaggcctggctggccgaggccgagagccgggtgctgagcaacagaggagacagcctgagcagacatgcccggcccccagaccccccagccagcgcccccccagacagcagcagcaacagcgccagccaggacaccaaggagagcagcgaggagccccccagcgaggagagccaggacacccccatctacacagaatttgatgaggactttgaggaggagcccaccagccccatcggccactgtgtggccatctaccactttgagggcagcagcgagggcaccatctccatggccgagggggaggacctgagcctgatggaggaggacaagggagatggctggaccagggtgcggaggaaggagggcggggagggctacgtgcccaccagctacctgcgggtgaccctgaactag

SEQ ID NO: 144498 - DNA, 1638 bp, Artificial Sequence
  derived and/or modified sequence
atggactggggcaccgagctgtgggaccagttcgaggtgctggagaggcatacacagtggggtctggacctgttggatcgttatgtcaaattcgtgaaagagcgtacggaggttgagcaagcatatgccaagcagctgagaagccttgtgaaaaaatatcttccgaaaaggccagcgaaagacgacccagagtctaagttctctcaacagcagtcattcgtgcagatcctacaggaagtgaacgactttgcgggacagagggaacttgtggctgaaaacctgtccgtgcgtgtatgtctggagcttactaagtacagtcaggaaatgaaacaggagcgaaaaatgcactttcaggaaggccgtagagcccaacaacagctggagaatgggtttaaacaactggaaaactcgaaacgaaagtttgagcgcgactgtcgggaggctgaaaaggccgcgcagactgccgagagactggaccaggatataaacgccactaaggccgacgtggagaaggcaaaacagcaggcccacttaaggtctcacatggccgaagagtccaagaacgagtacgccgcacagctgcaacgtttcaaccgagaccaagcccatttctatttcagtcagatgccacaaatttttgacaaactgcaggatatggacgaaagacgggctacccgattaggggctggctatggtctgctgagcgaggctgagctggaagtggtcccgataattgccaaatgcctagaaggcatgaaagttgctgccaacgccgtagatcccaagaatgactcacatgtgctgatcgagctgcataaaagcggatttgctaggcccggagacgttgagttcgaagacttttcccagccaatgaaccgggcaccgagtgactcttcgttgggcactccttcggatgggcgacctgaacttaggggtcccgggcggtcaaggaccaagcggtggcctttcggaaaaaaaaataagacagtcgtgacagaggacttttcacatctccccccagagcaacaaaggaagagactgcagcagcagctggaggaacgtagtcgtgagttacagaaggaggtggatcaacgggaggcccttaagaaaatgaaagacgtctacgaaaaaaccccccaaatgggtgaccccgcttctctggaacctcagattgcggagactttgtctaatatcgaaagactgaagttggaggtacagaaatatgaagcttggctggctgaggccgaatccagggtgctcagtaacaggggtgactcactaagcaggcacgcacggccccccgaccctccagccagtgcgccacccgacagctcttctaacagcgcatcccaggacacaaaagagtcctcagaagaacccccctccgaagagtctcaggataccccaatctacactgaattcgacgaagactttgaggaggagccaacaagccccatcggtcactgcgtggctatttaccatttcgaagggtcaagcgaaggcacaattagcatggccgagggcgaggatctgagcctcatggaagaggataagggggatgggtggaccagggtgaggcggaaagagggaggcgagggctacgtccctacatcttacctgcgtgttacactcaactag

SEQ ID NO: 144499 - DNA, 1638 bp, Artificial Sequence
  derived and/or modified sequence
atggactggggcaccgagttgtgggaccagtttgaagtgctggaaagacacacccagtggggcctggacctccttgaccgctatgtcaagtttgtcaaggaacgcacagaggtcgagcaggcttacgctaaacagcttagatctttggttaaaaaatacttgcccaagcgtccagcgaaggatgacccagaaagcaagttctctcaacagcagtcgtttgttcagatcttgcaggaagtgaacgactttgcaggccagagagagcttgtggctgagaacctttccgtgagggtgtgtctggaactgactaagtatagtcaggagatgaagcaggaacgcaaaatgcactttcaggaaggcaggagggcgcaacagcagctggagaacggatttaaacagctggaaaactctaagcgaaaatttgaacgggactgtcgagaagccgaaaaagccgctcaaaccgcagagcggctagatcaggacatcaatgcaactaaagccgatgttgaaaaggccaaacagcaggctcatttacgttcgcacatggctgaggaaagcaagaacgaatacgctgcccagctgcagagatttaacagggatcaggcacatttttatttctcacagatgccccagattttcgataaactccaggacatggatgaaagacgcgctacaagattaggcgctgggtacggattgctatccgaggcagagctggaagtcgtaccaattatcgcgaagtgtctagaagggatgaaagtagccgcaaacgccgtagatcctaagaacgacagccacgtgttgattgaactgcataagagtggtttcgccagaccaggggacgtggagttcgaagacttcagccagcccatgaacagagccccttctgactcctcacttggtaccccgtccgatggccgaccagagctgcggggacctggcagatccaggaccaagagatggccgttcggaaagaaaaacaagacggtagtcacagaggacttctcccatctccctccagagcaacaacggaaacgtcttcagcagcagctggaggaacgctcgcgagagctccagaaagaagttgaccagcgtgaagcactgaagaaaatgaaagacgtctacgagaagacccctcaaatgggtgaccccgcttccctcgagccccagatcgccgaaactctgagcaatatcgagcgtcttaagctggaagtgcaaaaatatgaggcttggctggcagaagccgaatcaagagtgctcagcaaccgcggagattctctctccaggcatgcacgtccacccgacccacccgctagtgcaccccctgatagctcatctaacagcgcctcccaggataccaaagagagcagcgaggagcccccttctgaagagagccaggacactccaatttatacagagttcgatgaagactttgaagaggagccaactagtcctattgggcactgtgtggccatatatcattttgagggcagctcagaaggaacaatttcaatggccgagggggaggatctgagtctgatggaagaggataaaggcgacgggtggaccagagtgcgccgtaaagagggcggagaaggttatgtaccaacgtcatatttacgggtgacactgaactag

SEQ ID NO: 144500 - DNA, 2018 bp, Artificial Sequence
  derived and/or modified sequence
gagtctccccggggagggcggcgggcggcgggcggcggggaccgggtgcggtggtggctgcggcggcggcggcgggagcagcatggattggggcactgagctgtgggatcagttcgaggtgctcgagcgccacacgcagtgggggctggacctgttggacagatatgtaaagttcgtgaaagaacgcaccgaagtggaacaggcttacgccaaacaactgcggagcctggtgaaaaaatatctgcccaagagacctgccaaggatgatcctgagtccaaattcagccagcaacagtccttcgtacagattctccaggaggtgaatgactttgcaggccagcgggagctggtggctgagaacctcagtgtccgtgtatgtcttgagctgaccaagtactcacaagagatgaaacaggagaggaagatgcacttccaagaagggcggcgggcccagcagcagctggaaaatggctttaaacagctggagaatagtaagcgtaaatttgagcgggactgccgggaggcagagaaggcagcccagactgctgaacggctagaccaggatatcaacgccaccaaggctgatgtggagaaggccaagcagcaagcccaccttcggagtcacatggccgaagaaagcaaaaacgaatatgcggctcaactgcagcgcttcaaccgagaccaagcccacttctatttttcacagatgccccagatattcgataagctccaagacatggatgaacgcagggccacccgcctgggtgccgggtatgggctcctgtcggaggccgagctggaggtggtgcccataatagccaagtgcttggagggcatgaaggtggctgcaaatgctgtggatcccaagaacgactcccacgtccttatagagctgcacaagtcaggttttgcccgcccgggcgacgtggaattcgaggacttcagccagcccatgaaccgtgcaccctccgacagcagtctgggcaccccctcggatggacggcctgaactccgaggcccgggtcgcagccgcaccaagcgctggccttttggcaagaagaacaagacagtggtgaccgaggattttagccacttgcccccagagcagcagcgaaaacggcttcaacagcagttggaagaacgcagtcgtgaacttcagaaggaggttgaccagagggaagccctaaagaaaatgaaggatgtctatgagaagacacctcagatgggggaccccgccagcttggagccccagatcgctgaaaccctgagcaacattgaacggctgaaattggaagtgcagaagtatgaggcgtggctggcagaagctgaaagtcgagtccttagcaaccggggagacagcctgagccggcacgcccggcctcccgacccccccgctagcgccccgccagacagcagcagcaacagcgcatcacaggacaccaaggagagctctgaagagcctccctcagaagagagccaggacacccccatttacacggagtttgatgaggatttcgaggaggaacccacatcccccataggtcactgtgtggccatctaccactttgaagggtccagcgagggcactatctctatggccgagggtgaagacctcagtcttatggaagaagacaaaggggacggctggacccgggtcaggcggaaagagggaggcgagggctacgtgcccacctcctacctccgagtcacgctcaattgaaccctgccagagacgggaagaggggggctgtcggctgctgcttctgggccacggggagccccaggacctatgcactttatttctgaccccgtggcttcggctgagacctgtgtaacctgctgccccctccacccccaacccagtcctacctgtcacaccggacggacccgctgtgccttctaccatcgttccaccattgatgtacatactcatgttttacatcttttctttctgccgctcggctccggccattttgttttatacaaaaatgggaaaaaaaaaaaagaaattatataaa

SEQ ID NO: 144501 - protein, 693 aa, Artificial Sequence
  derived and/or modified sequence
SLPQSEAQGQAVDLRTPVSCLRGRLPPGHTEARLVGGEHPCAGRLEVTWGTVCDAALDLATAHVVCRELQCGAVVSTPEGARFGRGSGPVWTEAFRCAGNESLLFHCPRGRGSQCGHGHDAGLRCSEFRMVNGSSSCEGRVEFQVQGSWAPLCATHWDIADATVLCHQLNCGNAVAAPGGGHFGDGDAAIWPDAFHCEGTESYLWNCPVSTLGAPACAPGNTASAVCSGLAHALRLREGQSRCDGRVEVSLDGVWGRVLDDAWDLRGAGVVCRQLGCRGAQQAYDAPAPSRGSVQVALSRVRCLGTETRLTQCNVSATLQEPAGTSRDAGVVCSGEVGTASPMARRHGIPGALTLSLHREPQGAAGRGAGALHGGAWGTVCDDAWDLRDAHVVCRQLGCGRALSPGGRTLRSRGRAHLAGRAGLPGPRVCAVAVPVGGLGAARLEAQGGRRRLLLRVGGSEAARWDLLLCWVAGRVLQWDLGRHVQQCPEGPLLVHHLQAAGVWGVGLAGEQALPLCGHRDRLGGQHRVPQAAQLHSVAMPFPPMAPALLRPSRAGLDYLCRIVRGQATGCWGAPQLLLLARLPRGGRTARARGRGPLLRARGALARGLLGHRVRRWLGPGGRGGRVPPAGLWSGRRRPGGRRLWPWLRARVAGRGGVPGQRGVPVGLPRSGGDAETARTRRTRACAAGKTNS

SEQ ID NO: 144502 - protein, 1156 aa, Artificial Sequence
  derived and/or modified sequence
MSKLRMVLLEDSGSADFRRHFVNLSPFTITVVLLLSACFVTSSLGGTDKELRLVDGENKCSGRVEVKVQEEWGTVCNNGWSMEAVSVICNQLGCPTAIKAPGWANSSAGSGRIWMDHVSCRGNESALWDCKHDGWGKHSNCTHQQDAGVTCSDGSNLEMRLTRGGNMCSGRIEIKFQGRWGTVCDDNFNIDHASVICRQLECGSAVSFSGSSNFGEGSGPIWFDDLICNGNESALWNCKHQGWGKHNCDHAEDAGVICSKGADLSLRLVDGVTECSGRLEVRFQGEWGTICDDGWDSYDAAVACKQLGCPTAVTAIGRVNASKGFGHIWLDSVSCQGHEPAIWQCKHHEWGKHYCNHNEDAGVTCSDGSDLELRLRGGGSRCAGTVEVEIQRLLGKVCDRGWGLKEADVVCRQLGCGSALKTSYQVYSKIQATNTWLFLSSCNGNETSLWDCKNWQWGGLTCDHYEEAKITCSAHREPRLVGGDIPCSGRVEVKHGDTWGSICDSDFSLEAASVLCRELQCGTVVSILGGAHFGEGNGQIWAEEFQCEGHESHLSLCPVAPRPEGTCSHSRDVGVVCSRYTEIRLVNGKTPCEGRVELKTLGAWGSLCNSHWDIEDAHVLCQQLKCGVALSTPGGARFGKGNGQIWRHMFHCTGTEQHMGDCPVTALGASLCPSEQVASVICSGNQSQTLSSCNSSSLGPTRPTIPEESAVACIESGQLRLVNGGGRCAGRVEIYHEGSWGTICDDSWDLSDAHVVCRQLGCGEAINATGSAHFGEGTGPIWLDEMKCNGKESRIWQCHSHGWGQQNCRHKEDAGVICSEFMSLRLTSEASREACAGRLEVFYNGAWGTVGKSSMSETTVGVVCRQLGCADKGKINPASLDKAMSIPMWVDNVQCPKGPDTLWQCPSSPWEKRLASPSEETWITCDNKIRLQEGPTSCSGRVEIWHGGSWGTVCDDSWDLDDAQVVCQQLGCGPALKAFKEAEFGQGTGPIWLNEVKCKGNESSLWDCPARRWGHSECGHKEDAAVNCTDISVQKTPQKATTGRSSRQSSFIAVGILGVVLLAIFVALFFLTKKRRQRQRLAVSSRGENLVHQIQYREMNSCLNADDLDLMNSSENSHESADFSAAELISVSKFLPISGMEKEAILSHTEKENGNL

SEQ ID NO: 144503 - DNA, 3471 bp, Artificial Sequence
  derived and/or modified sequence
atgtcgaaattgaggatggtgctactggaggactctggatccgcagactttcgacgccatttcgtaaacctgagcccgtttacgatcaccgtggttctgctgctctccgcctgctttgtgacgtcctctttggggggtactgataaagaactgagactagtggatggcgagaacaagtgctccggccgggtggaagtgaaagtgcaggaagaatgggggacagtgtgtaacaacgggtggagcatggaagcagtttctgttatctgcaaccagctgggatgtcccacagcaataaaggctcccggctgggctaattcaagcgctggttctggcaggatatggatggaccacgtgagttgcagaggcaatgaatccgccctttgggactgcaaacacgatggatggggtaagcactctaactgtacccaccaacaggacgcaggagttacttgtagcgacggctcgaacctggaaatgcggcttacacgtggtgggaatatgtgcagcggccgcattgaaataaaatttcaagggcgctggggtacagtgtgcgatgacaacttcaacatcgaccatgcttccgtcatctgcagacaactcgaatgcggctccgcagtctccttcagcggaagcagtaattttggtgaagggagcggccctatctggtttgacgatctgatctgcaatgggaacgagtccgccctctggaattgcaaacatcagggatgggggaagcataactgcgatcacgcggaggacgccggcgtcatttgctctaagggcgcggatctctccctgcggctcgtcgacggggtgaccgaatgcagtggaagactggaggtccgatttcagggcgagtggggtacaatctgtgacgacggttgggatagctacgacgctgcagttgcttgcaaacagctggggtgtcctaccgctgtgaccgccattggacgggttaatgcaagcaagggtttcggccacatttggctggactccgtctcctgccagggacacgagcctgcaatctggcagtgcaagcaccatgaatggggaaaacactattgtaaccacaacgaagatgctggtgtaacctgctctgacggttccgacctcgaactgcgtctgagaggagggggaagccgctgcgccggaacagtggaagtggagattcagaggctgcttgggaaagtgtgtgatcgaggctggggcctgaaagaggctgacgtggtctgccggcagctgggctgcggcagtgccttgaagaccagttaccaggtgtactccaagatccaagctactaatacctggctgttcctcagctcttgtaatggcaatgagaccagcctctgggactgtaagaattggcagtggggaggccttacctgcgaccattatgaagaagcgaagattacctgtagcgcgcaccgagagcctcggcttgttggtggagacatcccttgttctggacgagtggaggtaaagcacggtgatacttggggctcaatctgcgacagcgacttttcattggaggccgcatctgtcctgtgcagggaactccagtgtgggactgtggtgagcatcttgggcggtgctcactttggcgagggcaacggacagatctgggccgaggaattccagtgtgaaggccatgaatcccacctgtccctttgcccagtagccccacgccctgagggtacatgctcccacagcagggatgtcggtgtagtgtgcagccggtacacagagattagactcgtgaacggcaagaccccctgtgagggacgtgtcgagctcaagacattaggggcttggggatcactctgtaacagccactgggacatcgaggacgctcacgtgctgtgccaacaacttaaatgcggggtcgccttgagcactccaggaggcgccaggttcgggaaaggcaacgggcagatttggcggcacatgtttcattgcaccggtaccgagcagcatatgggcgattgtcctgtcacagctttgggagcctctctgtgccctagcgagcaagtcgcctctgtaatttgttctggtaatcaatctcagactttgagttcatgtaacagctcctccctcggtcccacacgcccaaccataccagaggagtccgcagtcgcctgcattgagtctgggcagctgcgcctagtgaacggcgggggccgatgcgccgggcgggtcgaaatctaccacgaaggcagctggggaacgatctgtgatgactcatgggacttatccgacgcccacgtggtctgccgtcagcttgggtgcggtgaggccataaacgccacaggatccgcgcacttcggggagggtaccgggcccatttggctggacgaaatgaagtgtaacggtaaggagtctagaatctggcagtgccacagccacggatggggccagcaaaactgtaggcacaaagaggacgcgggcgttatctgttctgagttcatgagtcttcggctgaccagcgaagcgagccgagaagcctgtgctggtcggctggaggtgttttacaatggagcttggggaactgtcggcaaatcctccatgtccgagaccaccgtgggtgtggtgtgtcgccagcttggttgcgcagataaggggaaaattaacccagcctcactcgataaggccatgagtatacccatgtgggttgataatgttcaatgtcccaagggacccgacactttgtggcagtgtccgtcctcgccatgggagaagcgtcttgcctccccgtccgaagagacatggataacttgcgataacaaaatacggcttcaagagggcccaactagttgttccggtcgtgtggagatttggcacggcggcagctggggaacagtctgcgacgactcctgggatttggacgatgcccaggtggtctgccaacaactgggttgcggacctgccttaaaagctttcaaggaagctgagttcggacaaggaactggccctatatggctgaacgaggtcaagtgcaagggcaacgaaagctctttgtgggattgtcctgctcgccgatggggccactctgagtgtggccataaagaggacgctgccgtgaactgtactgacatcagtgtgcagaagacgcctcagaaagctacgacaggtaggagcagcaggcaatcctcttttattgctgtcggcatcctaggagtcgtgcttctggcgatcttcgtcgcactttttttccttacaaaaaaacgcagacaacgtcaacgcttggctgtgtccagccgaggcgaaaatctcgtccaccaaattcaatatagagagatgaatagctgcctcaacgcggacgaccttgacctgatgaatagctccgaaaactcacatgagagtgctgattttagtgcagccgagcttatctcagtgagtaaatttctcccaatcagtggcatggagaaggaggcaattttatctcatacagagaaagagaatgggaacttgtag

SEQ ID NO: 144504 - DNA, 3471 bp, Artificial Sequence
  derived and/or modified sequence
atgagcaagctgaggatggtgctgctggaggacagcggcagcgctgacttccgccgccactttgtgaacctgagccccttcaccatcaccgtggtgctgctgctgagcgcctgctttgtgaccagcagcctgggcggcacagacaaggagctgcggctggtggatggagaaaataaatgttctggccgggtggaggtgaaggtgcaggaggagtggggcaccgtgtgcaacaacggctggagcatggaggccgtgtctgtcatctgcaaccagctgggctgccccacagccatcaaggcccctggctgggccaacagcagcgctggcagcggccgcatctggatggaccacgtgtcctgcagaggaaatgaaagtgccctgtgggactgcaagcatgatggctggggcaagcacagcaactgcacccaccagcaggatgctggggtgacctgcagtgatggcagcaacctggagatgaggctgacccggggcggcaacatgtgcagcggccgcatcgagatcaagttccagggccgctggggcaccgtgtgtgatgacaacttcaacatcgaccacgccagcgtcatctgccggcagctggagtgtggcagcgctgtgtccttcagcggcagcagcaactttggagagggcagcggccccatctggtttgatgacctgatctgcaatggaaatgaaagtgccctgtggaactgcaagcaccagggctggggcaagcacaactgtgaccatgctgaagatgctggggtcatctgcagcaaaggagctgacctgagcctgcggctggtggatggagtgacagagtgcagcggccgcctggaggtgcgcttccagggcgagtggggcaccatctgtgatgatggctgggacagctatgatgctgctgtggcctgcaagcagctgggctgccccacagctgtgacagccatcggccgggtgaatgccagcaaaggatttggccacatctggctggacagcgtgtcctgccagggccacgagcccgccatctggcagtgcaagcaccacgagtggggcaagcactactgcaaccacaatgaagatgctggggtgacctgcagtgatggcagtgacctggagctgcggctgcggggcggcggcagccgctgtgccggcaccgtggaggtggagatccagaggctgctgggcaaggtgtgtgaccggggctggggcctgaaggaggctgatgtggtgtgccggcagctgggctgcggcagcgccctgaagaccagctaccaggtgtacagcaagatccaggccaccaacacctggctgttcctgagcagctgcaatggaaatgagaccagcctgtgggactgcaagaactggcagtggggcggcctgacctgtgaccactatgaggaggccaagatcacctgcagcgcccaccgggagccccggctggtgggcggggacatcccctgcagcggccgggtggaggtgaagcatggagacacctggggcagcatctgtgacagcgacttcagcctggaggccgcctctgtgctgtgccgggagctgcagtgtggcaccgtggtgtccatcctgggcggggcccactttggagagggcaatggccagatctgggccgaggagttccagtgtgagggccacgagagccacctgagcctgtgccctgtggcccccaggcctgagggcacctgcagccacagcagagatgtgggcgtggtgtgcagccgctacacagagatccggctggtgaatggcaagaccccctgtgagggccgggtggagctgaagaccctgggcgcctggggcagcctgtgcaacagccactgggacattgaagatgcccacgtgctgtgccagcagctgaagtgtggggtggccctgagcaccccaggaggagccaggtttggaaaaggaaatggccagatctggaggcacatgttccactgcacaggaacagagcagcacatgggagactgccctgtgacagccctgggcgccagcctgtgccccagcgagcaggtggccagcgtcatctgcagcggcaaccagagccagaccctgagcagctgcaacagcagcagcctgggccccacccggcccaccatccctgaggagagcgctgtggcctgcatcgagagcggccagctgcggctggtgaatggaggcggccgctgtgccggccgggtggagatctaccacgagggctcctggggcaccatctgtgatgacagctgggacctgagtgatgcccacgtggtgtgccggcagctgggctgtggggaggccatcaatgccactggaagtgcccactttggagagggcaccggccccatctggctggatgagatgaagtgcaatggcaaggagagccgcatctggcagtgccacagccacggctggggccagcagaactgccgccacaaggaggatgctggggtcatctgcagcgagttcatgagcctgcggctgaccagcgaggccagccgggaggcctgtgccggccgcctggaggtgttctacaacggggcctggggcaccgtgggcaagagctccatgtctgagaccaccgtgggcgtggtgtgccggcagctgggctgtgccgacaagggcaagatcaacccagccagcctggacaaggccatgagcatccccatgtgggtggacaacgtgcagtgccccaagggccctgacaccctgtggcagtgccccagcagcccctgggagaagaggctggccagccccagcgaggagacctggatcacctgtgacaacaagatccggctgcaggagggccccaccagctgcagcggccgggtggagatctggcacggcggctcctggggcaccgtgtgtgatgacagctgggacctggatgatgcccaggtggtgtgccagcagctgggctgcggccctgccctgaaggccttcaaggaggccgagtttggccagggcaccggccccatctggctgaatgaggtgaagtgcaagggaaatgaaagcagcctgtgggactgcccagcccggcgctggggccacagtgaatgtggccacaaggaggatgctgctgtgaactgcacagacatctctgtgcagaagaccccccagaaggccaccaccggccgcagcagccggcagagcagcttcatcgctgtgggcatcctgggcgtggtgctgctggccatctttgtggccctcttcttcctgaccaagaagaggcggcagaggcagaggctggccgtgagcagcagaggagagaacctggtgcaccagatccagtaccgggagatgaacagctgcctgaatgctgatgacctggacctgatgaacagcagcgagaacagccatgagagcgctgacttctctgctgctgagctgatctctgtgtccaagttcctgcccatcagcggcatggagaaggaggccatcctgagccacacagagaaggaaaatggaaacctgtag

SEQ ID NO: 144505 - DNA, 3471 bp, Artificial Sequence
  derived and/or modified sequence
atgagcaagctgcggatggtgctgctggaggacagcggcagcgccgacttccgccgtcattttgtgaacctttccccatttaccattacggtcgtgcttctcttgtctgcttgcttcgtgacatcgagtctgggaggcacggataaagaactccgattggtggatggggagaataagtgtagtggtcgagtggaggtcaaggtgcaagaagaatgggggacggtgtgtaataatggctggtccatggaagcggtttccgtaatttgcaatcagctcggatgtccaacagccattaaagccccaggatgggcgaattccagcgctgggagcgggaggatctggatggatcatgtgtcttgtaggggtaacgagtcggctctgtgggactgtaaacatgacggatggggtaaacatagcaactgcacacatcaacaggatgcaggagttacttgctcggacgggtcaaacttggagatgaggctgacccgcggcggaaacatgtgctccggcagaatcgagattaaatttcagggcaggtggggtacagtatgtgacgacaacttcaatattgaccacgcttctgtcatctgtcggcagctcgaatgcgggtcagctgtgtctttctctggcagcagcaactttggcgagggttcagggcccatctggttcgacgatctaatctgtaatggcaatgaaagcgccttgtggaattgcaaacaccagggatggggtaaacataattgtgaccacgctgaggatgcgggtgttatctgttctaagggtgctgacctgtcattacggttggttgatggcgtaactgaatgttcagggagactcgaggtgcgcttccagggcgagtgggggaccatctgtgacgatggatgggactcttacgatgctgccgtggcctgtaagcagctgggttgcccgactgctgtgacagctataggtagagttaatgcaagcaaaggattcgggcatatctggctggattcggtgtcatgtcaagggcatgagccggcaatttggcagtgcaagcaccatgagtggggaaagcattactgcaaccacaacgaggacgctggcgtgacctgctctgacggctcagacctcgagctgcgtttgcgtggaggtggcagcaggtgtgcaggcacagtggaggtggaaattcaacgccttttgggaaaggtttgtgatagaggatggggcctgaaggaggctgatgtagtgtgtcgtcagctcggatgcggatccgccctgaaaacctcctaccaggtgtactctaagatccaggcaaccaacacatggctgttccttagttcttgtaatggtaacgagacaagcttgtgggattgtaaaaactggcagtggggcggcctcacttgcgatcattatgaggaagcgaaaatcacttgttccgcgcatcgcgagcctaggctggtgggcggcgacatcccttgttcaggcagggtcgaggtaaagcatggagacacctggggcagtatatgtgatagcgactttagcctggaagctgccagcgtcctgtgccgggaactccaatgcggcactgtagttagcatccttggaggcgcacatttcggcgagggtaatgggcaaatatgggccgaggaatttcagtgcgaaggccacgaatcgcatttgtctctctgccctgtggctcctcgaccagagggaacgtgcagtcattcgcgtgatgtgggcgtcgtttgctctagatacaccgagattcggcttgtgaatggaaagacgccctgcgaggggcgcgtcgaactcaaaaccttgggagcctggggaagtctgtgcaattcccactgggatatcgaagatgctcatgtcttgtgtcagcaactgaaatgcggcgtcgcactttcgacccctggaggcgcccgttttgggaagggtaatgggcaaatatggaggcacatgttccattgtacaggaactgagcaacacatgggcgattgtcctgttaccgctctcggggcgagcctgtgcccaagtgagcaggtggcatcagtgatatgctctggaaaccagtctcagactctctcttcatgcaattcgagcagcctgggtcctactcgcccaaccatccctgaggagtctgccgtggcctgtatagagagtggacaactgagactcgtcaatggcgggggcagatgtgccggacgagtggaaatctaccacgaaggttcctggggaaccatctgtgatgactcctgggatcttagcgacgcccatgtggtgtgcaggcaactcggatgtggggaggctatcaacgcaactgggtcagcccatttcggcgagggcaccggaccaatttggttggacgaaatgaagtgtaacgggaaggagagtaggatctggcagtgtcacagtcacggatgggggcaacaaaactgtcgtcacaaggaggatgcaggtgtgatttgttccgagttcatgtcactaaggctgacgtcggaggcctccagagaagcctgtgctggacggctggaggtgttttacaacggcgcttgggggaccgtgggaaagtcgtctatgtcggagacaactgtgggagtggtgtgcagacagcttggctgtgctgataaaggcaaaattaatcctgcctcactagacaaggccatgagcatccctatgtgggttgacaatgtacagtgccctaagggaccagataccctctggcaatgtccatccagcccctgggaaaagcgcctggccagcccatcagaggagacatggatcacttgtgacaacaagatccgtctgcaggagggacctacaagctgctctggccgggtggaaatctggcatggtggctcttgggggacagtgtgtgacgatagttgggatctggacgatgcccaggtggtttgccagcaactgggctgtggacccgccctgaaggcctttaaagaggccgaattcggacaaggcaccggaccaatctggctgaatgaggtgaaatgcaaaggaaacgagtccagtctgtgggattgccccgcccgtcggtggggacactccgagtgtggccataaggaggacgccgccgttaattgcactgatatcagcgtccaaaagacaccacagaaagctacaactggtaggtcaagccgccagtcctcttttattgctgttggcatcctgggcgttgtcctattggccatctttgttgctcttttctttctgaccaagaaaagacgtcaacgccagcgtttggccgtcagtagccgtggggagaacttggttcaccagatccagtaccgggagatgaattcatgcctgaatgcggacgatctcgatctgatgaactcaagtgagaatagtcatgagtccgctgatttcagcgcagctgagcttatttccgtctccaagttcttgcctatctccgggatggagaaagaagcaatcttatcacataccgagaaggagaacgggaacctctag

SEQ ID NO: 144506 - DNA, 3471 bp, Artificial Sequence
  derived and/or modified sequence
atgtctaagctgcgaatggtcttactagaagattccggcagcgccgactttagacgccattttgttaacctgtccccttttacaattaccgtggtcctgctcctgagtgcgtgctttgtgacctcaagtctcggcggaacggacaaagaactgcgcctggtcgatggggagaataaatgcagcggtagagtggaggtgaaagtgcaggaggaatgggggacggtctgcaataatggatggtctatggaagcagtgtccgtgatctgcaatcaactgggttgcccaaccgctattaaagcaccaggctgggctaactcttctgctggctctgggcgaatctggatggaccacgtgtcttgtagagggaacgagtccgccctttgggattgtaagcatgacggttggggaaagcacagcaattgtacacaccagcaggatgccggtgtgacctgctccgacggctctaatctggagatgagactaacaaggggcggtaatatgtgcagcggtcgcatcgaaatcaagtttcagggtcggtgggggaccgtctgtgacgacaattttaacattgatcacgcaagtgtaatttgtaggcagctggaatgcggcagtgctgtgtctttcagtggctctagcaatttcggagaagggtccggacccatatggtttgacgatttaatttgcaacggtaacgagtcagcgctgtggaactgtaagcaccagggctggggcaaacacaattgcgaccatgccgaggatgccggtgtcatttgctccaaaggagccgatttatccctgcgcctcgttgatggagtcacagagtgttcaggcaggttagaagtaaggtttcaaggggaatggggcaccatctgtgatgatggatgggatagctacgacgctgccgtagcttgcaaacagctcggctgtccaaccgccgttacggccataggaagagtgaatgcaagcaagggattcggtcatatctggctggattccgtctcatgccagggtcatgagccagctatctggcagtgtaagcaccatgaatgggggaagcactattgcaaccacaatgaagatgccggtgtcacatgctccgatggttcggatcttgagttgagattgcgcggaggcggttcccgttgcgcaggcactgtcgaggtggaaatccaaaggttgcttgggaaggtgtgcgacaggggttggggcctgaaggaagctgatgtggtctgtcgacagcttgggtgcggctccgctcttaagacaagctatcaagtctactcaaagatccaggcaaccaatacctggctattcctatcctcatgcaacgggaacgaaacatcactgtgggactgcaaaaactggcagtggggtgggctgacatgtgatcattacgaagaggccaagatcacctgttcagcacatagggagccacggctcgtggggggagacataccctgttctggcagggtagaagtcaagcacggggacacatggggctccatttgcgactccgatttcagcttagaggctgccagtgtcctttgtcgggaactgcagtgtgggaccgttgtgtccatcctgggaggcgcacacttcggtgaaggtaacggccagatttgggccgaagagtttcagtgcgagggccacgaatcgcacctatcactatgccctgtggcacctcgtcccgagggaacgtgttcccatagccgcgatgtgggcgtcgtttgctcccggtataccgaaatcaggctcgtgaatggtaagactccatgcgaggggagagtggagctgaagacgcttggcgcttggggcagcttgtgcaattctcactgggacattgaagacgcacacgttttgtgtcaacaactaaagtgtggcgtggctctgtccacccccggaggtgcgaggttcggaaaaggaaatgggcagatatggagacacatgtttcattgcactggtaccgagcaacacatgggcgattgccctgtcaccgctcttggcgctagcctctgccctagtgagcaagtggccagcgttatttgctctggcaaccaatcccaaaccctctcatcctgtaacagcagctcgctgggccctacaaggccaaccattcctgaggaaagtgctgtggcttgcattgaaagcggacagctcagactggtgaatggtggtgggcgatgtgccggaagggtcgagatctaccatgaaggaagttggggtacaatatgtgatgacagctgggacttgtccgacgcgcacgtcgtgtgccgccagctgggctgcggagaggcgatcaacgcgactggctcggctcacttcggcgaaggcactggtcctatctggcttgacgagatgaagtgcaacggcaaagagtcaaggatttggcagtgtcattcccacggctgggggcagcagaactgcaggcacaaggaagatgccggagtgatttgttcggagttcatgagtttgaggttaacttccgaagctagcagagaggcctgcgccggtcggctcgaagttttctacaatggcgcttggggaactgtaggtaagagcagtatgagcgagaccaccgtgggcgtggtctgcagacagttaggttgtgctgacaagggcaagattaatccagcatcactggacaaggcgatgagcattccgatgtgggtcgacaatgtccagtgccccaagggccctgatactttatggcagtgcccctcctccccttgggaaaagagactggcaagcccaagcgaagaaacatggatcacgtgtgataacaagattagattgcaggaggggccaacttcttgctcgggtcgggtggaaatctggcacggaggttcatggggtacagtttgtgatgatagttgggatctggacgacgcccaagtcgtctgtcagcagctggggtgtggacccgctcttaaggccttcaaggaggctgaattcggacaagggaccgggcctatctggctgaacgaggttaagtgcaaaggaaacgagtctagcttgtgggattgtccagcgagacgttggggccacagcgagtgcgggcacaaggaggatgcggcagtcaactgcacggatattagcgtccagaagaccccacagaaagcaacaactggacggagctcgaggcagagtagcttcatcgctgttggcatccttggcgtggtgctgctggccatattcgttgctctgttttttctaaccaaaaaacggcgtcaacgacagagactggccgtgagctccaggggggagaacttggtgcatcagatccaatatagggaaatgaattcctgtctaaatgcggatgatctcgatttaatgaactcttctgagaactcccatgagtccgccgacttctctgcagctgaactaatttccgtgtccaaatttctgcccatatctggcatggagaaagaagctatactctctcacaccgagaaggagaatggcaacttgtag

SEQ ID NO: 144507 - DNA, 4268 bp, Artificial Sequence
  derived and/or modified sequence
attgaagaaaacatgagtatgaaatggaacctcagctctttcaatgacttccctttttgagttgactccgcctccatatgtagccttttcattttcatgaaagtgaagtgatttttagaattcttagttgttttctttagaagaacatttctagggaataatacaagaagatttaggaatcattgaagttataaatctttggaatgagcaaactcagaatggtgctacttgaagactctggatctgctgacttcagaagacattttgtcaacttgagtcccttcaccattactgtggtcttacttctcagtgcctgttttgtcaccagttctcttggaggaacagacaaggagctgaggctagtggatggtgaaaacaagtgtagcgggagagtggaagtgaaagtccaggaggagtggggaacggtgtgtaataatggctggagcatggaagcggtctctgtgatttgtaaccagctgggatgtccaactgctatcaaagcccctggatgggctaattccagtgcaggttctggacgcatttggatggatcatgtttcttgtcgtgggaatgagtcagctctttgggattgcaaacatgatggatggggaaagcatagtaactgtactcaccaacaagatgctggagtgacctgctcagatggatccaatttggaaatgaggctgacgcgtggagggaatatgtgttctggaagaatagagatcaaattccaaggacggtggggaacagtgtgtgatgataacttcaacatagatcatgcatctgtcatttgtagacaacttgaatgtggaagtgctgtcagtttctctggttcatctaattttggagaaggctctggaccaatctggtttgatgatcttatatgcaacggaaatgagtcagctctctggaactgcaaacatcaaggatggggaaagcataactgtgatcatgctgaggatgctggagtgatttgctcaaagggagcagatctgagcctgagactggtagatggagtcactgaatgttcaggaagattagaagtgagattccaaggagaatgggggacaatatgtgatgacggctgggacagttacgatgctgctgtggcatgcaagcaactgggatgtccaactgccgtcacagccattggtcgagttaacgccagtaagggatttggacacatctggcttgacagcgtttcttgccagggacatgaacctgctatctggcaatgtaaacaccatgaatggggaaagcattattgcaatcacaatgaagatgctggcgtgacatgttctgatggatcagatctggagctaagacttagaggtggaggcagccgctgtgctgggacagttgaggtggagattcagagactgttagggaaggtgtgtgacagaggctggggactgaaagaagctgatgtggtttgcaggcagctgggatgtggatctgcactcaaaacatcttatcaagtgtactccaaaatccaggcaacaaacacatggctgtttctaagtagctgtaacggaaatgaaacttctctttgggactgcaagaactggcaatggggtggacttacctgtgatcactatgaagaagccaaaattacctgctcagcccacagggaacccagactggttggaggggacattccctgttctggacgtgttgaagtgaagcatggtgacacgtggggctccatctgtgattcggacttctctctggaagctgccagcgttctatgcagggaattacagtgtggcacagttgtctctatcctggggggagctcactttggagagggaaatggacagatctgggctgaagaattccagtgtgagggacatgagtcccatctttcactctgcccagtagcaccccgcccagaaggaacttgtagccacagcagggatgttggagtagtctgctcaagatacacagaaattcgcttggtgaatggcaagaccccgtgtgagggcagagtggagctcaaaacgcttggtgcctggggatccctctgtaactctcactgggacatagaagatgcccatgttctttgccagcagcttaaatgtggagttgccctttctaccccaggaggagcacgttttggaaaaggaaatggtcagatctggaggcatatgtttcactgcactgggactgagcagcacatgggagattgtcctgtaactgctctaggtgcttcattatgtccttcagagcaagtggcctctgtaatctgctcaggaaaccagtcccaaacactgtcctcgtgcaattcatcgtctttgggcccaacaaggcctaccattccagaagaaagtgctgtggcctgcatagagagtggtcaacttcgcctggtaaatggaggaggtcgctgtgctgggagagtagagatctatcatgagggctcctggggcaccatctgtgatgacagctgggacctgagtgatgcccacgtggtttgcagacagctgggctgtggagaggccattaatgccactggttctgctcattttggggaaggaacagggcccatctggctggatgagatgaaatgcaatggaaaagaatcccgcatttggcagtgccattcacacggctgggggcagcaaaattgcaggcacaaggaggatgcgggagttatctgctcagaattcatgtctctgagactgaccagtgaagccagcagagaggcctgtgcagggcgtctggaagttttttacaatggagcttggggcactgttggcaagagtagcatgtctgaaaccactgtgggtgtggtgtgcaggcagctgggctgtgcagacaaagggaaaatcaaccctgcatctttagacaaggccatgtccattcccatgtgggtggacaatgttcagtgtccaaaaggacctgacacgctgtggcagtgcccatcatctccatgggagaagagactggccagcccctcggaggagacctggatcacatgtgacaacaagataagacttcaggaaggacccacttcctgttctggacgtgtggagatctggcatggaggttcctgggggacagtgtgtgatgactcttgggacttggacgatgctcaggtggtgtgtcaacaacttggctgtggtccagctttgaaagcattcaaagaagcagagtttggtcaggggactggaccgatatggctcaatgaagtgaagtgcaaagggaatgagtcttccttgtgggattgtcctgccagacgctggggccatagtgagtgtgggcacaaggaagacgctgcagtgaattgcacagatatttcagtgcagaaaaccccacaaaaagccacaacaggtcgctcatcccgtcagtcatcctttattgcagtcgggatccttggggttgttctgttggccattttcgtcgcattattcttcttgactaaaaagcgaagacagagacagcggcttgcagtttcctcaagaggagagaacttagtccaccaaattcaataccgggagatgaattcttgcctgaatgcagatgatctggacctaatgaattcctcagaaaattcccatgagtcagctgatttcagtgctgctgaactaatttctgtgtctaaatttcttcctatttctggaatggaaaaggaggccattctgagccacactgaaaaggaaaatgggaatttataacccagtgagttcagcctttaagataccttgatgaagacctggactattgaatggagcagaaattcacctctctcactgactattacagttgcatttttatggagttcttcttctcctaggattcctaagactgctgctgaatttataaaaattaagtttgtgaatgtgactacttagtggtgtatatgagactttcaagggaattaaataaataaataagaatgttattgatttgagtttgctttaattacttgtccttaattctattaatttctaaatgggcttcctaattttttgtagagtttcctagatgtattataatgtgttttatttgacagtgtttcaatttgcatatacagtactgtatattttttcttatttggtttgaataattttcctattaccaaataaaaataaatttatttttactttagtttttctaagacaggaaaagttaatgatattgaagggtctgtaaataatatatggctaactttataaggcatgactcacaacgattctttaactgctttttgttactgtaattctgttcactagaataaaatgcagagccacacctggtgagggcacaaa

SEQ ID NO: 144508 - DNA, 3471 bp, Artificial Sequence
  derived and/or modified sequence
atgagcaagctgagaatggtgctgctggaggacagcggcagcgccgacttcagaagacacttcgtgaacctgagccccttcaccatcaccgtggtgctgctgctgagcgcctgcttcgtgaccagcagcctgggcggcaccgacaaggagctgagactggtggacggcgagaacaagtgcagcggcagagtggaggtgaaggtgcaggaggagtggggcaccgtgtgcaacaacggctggagcatggaggccgtgagcgtgatctgcaaccagctgggctgccccaccgccatcaaggcccccggctgggccaacagcagcgccggcagcggcagaatctggatggaccacgtgagctgcagaggcaacgagagcgccctgtgggactgcaagcacgacggctggggcaagcacagcaactgcacccaccagcaggacgccggcgtgacctgcagcgacggcagcaacctggagatgagactgaccagaggcggcaacatgtgcagcggcagaatcgagatcaagttccagggcagatggggcaccgtgtgcgacgacaacttcaacatcgaccacgccagcgtgatctgcagacagctggagtgcggcagcgccgtgagcttcagcggcagcagcaacttcggcgagggcagcggccccatctggttcgacgacctgatctgcaacggcaacgagagcgccctgtggaactgcaagcaccagggctggggcaagcacaactgcgaccacgccgaggacgccggcgtgatctgcagcaagggcgccgacctgagcctgagactggtggacggcgtgaccgagtgcagcggcagactggaggtgagattccagggcgagtggggcaccatctgcgacgacggctgggacagctacgacgccgccgtggcctgcaagcagctgggctgccccaccgccgtgaccgccatcggcagagtgaacgccagcaagggcttcggccacatctggctggacagcgtgagctgccagggccacgagcccgccatctggcagtgcaagcaccacgagtggggcaagcactactgcaaccacaacgaggacgccggcgtgacctgcagcgacggcagcgacctggagctgagactgagaggcggcggcagcagatgcgccggcaccgtggaggtggagatccagagactgctgggcaaggtgtgcgacagaggctggggcctgaaggaggccgacgtggtgtgcagacagctgggctgcggcagcgccctgaagaccagctaccaggtgtacagcaagatccaggccaccaacacctggctgttcctgagcagctgcaacggcaacgagaccagcctgtgggactgcaagaactggcagtggggcggcctgacctgcgaccactacgaggaggccaagatcacctgcagcgcccacagagagcccagactggtgggcggcgacatcccctgcagcggcagagtggaggtgaagcacggcgacacctggggcagcatctgcgacagcgacttcagcctggaggccgccagcgtgctgtgcagagagctgcagtgcggcaccgtggtgagcatcctgggcggcgcccacttcggcgagggcaacggccagatctgggccgaggagttccagtgcgagggccacgagagccacctgagcctgtgccccgtggcccccagacccgagggcacctgcagccacagcagagacgtgggcgtggtgtgcagcagatacaccgagatcagactggtgaacggcaagaccccctgcgagggcagagtggagctgaagaccctgggcgcctggggcagcctgtgcaacagccactgggacatcgaggacgcccacgtgctgtgccagcagctgaagtgcggcgtggccctgagcacccccggcggcgccagattcggcaagggcaacggccagatctggagacacatgttccactgcaccggcaccgagcagcacatgggcgactgccccgtgaccgccctgggcgccagcctgtgccccagcgagcaggtggccagcgtgatctgcagcggcaaccagagccagaccctgagcagctgcaacagcagcagcctgggccccaccagacccaccatccccgaggagagcgccgtggcctgcatcgagagcggccagctgagactggtgaacggcggcggcagatgcgccggcagagtggagatctaccacgagggcagctggggcaccatctgcgacgacagctgggacctgagcgacgcccacgtggtgtgcagacagctgggctgcggcgaggccatcaacgccaccggcagcgcccacttcggcgagggcaccggccccatctggctggacgagatgaagtgcaacggcaaggagagcagaatctggcagtgccacagccacggctggggccagcagaactgcagacacaaggaggacgccggcgtgatctgcagcgagttcatgagcctgagactgaccagcgaggccagcagagaggcctgcgccggcagactggaggtgttctacaacggcgcctggggcaccgtgggcaagagcagcatgagcgagaccaccgtgggcgtggtgtgcagacagctgggctgcgccgacaagggcaagatcaaccccgccagcctggacaaggccatgagcatccccatgtgggtggacaacgtgcagtgccccaagggccccgacaccctgtggcagtgccccagcagcccctgggagaagagactggccagccccagcgaggagacctggatcacctgcgacaacaagatcagactgcaggagggccccaccagctgcagcggcagagtggagatctggcacggcggcagctggggcaccgtgtgcgacgacagctgggacctggacgacgcccaggtggtgtgccagcagctgggctgcggccccgccctgaaggccttcaaggaggccgagttcggccagggcaccggccccatctggctgaacgaggtgaagtgcaagggcaacgagagcagcctgtgggactgccccgccagaagatggggccacagcgagtgcggccacaaggaggacgccgccgtgaactgcaccgacatcagcgtgcagaagaccccccagaaggccaccaccggcagaagcagcagacagagcagcttcatcgccgtgggcatcctgggcgtggtgctgctggccatcttcgtggccctgttcttcctgaccaagaagagaagacagagacagagactggccgtgagcagcagaggcgagaacctggtgcaccagatccagtacagagagatgaacagctgcctgaacgccgacgacctggacctgatgaacagcagcgagaacagccacgagagcgccgacttcagcgccgccgagctgatcagcgtgagcaagttcctgcccatcagcggcatggagaaggaggccatcctgagccacaccgagaaggagaacggcaacctgtag

SEQ ID NO: 144509 - protein, 638 aa, Artificial Sequence
  derived and/or modified sequence
MAQGLEVALTDLQSSRNNVRHHTEEITVDHLLVRRGQAFNLTLYFRNRSFQPGLDNIIFVVETEDAVYLDSEPQRQEYVMNDYGFIYQGSKNWIRPCPWNYGQFEDKIIDICLKLLDKSLHFQTDPATDCALRGSPVYVSRVVCAMINSNDDNGVLNGNWSENYTDGANPAEWTGSVAILKQWNATGCQPVRYGQCWVFAAVMCTVMRCLGIPTRVITNFDSGHDTDGNLIIDEYYDNTGRILGNKKKDTIWNFHVWNECWMARKDLPPAYGGWQVLDATPQEMSNGVYCCGPASVRAIKEGEVDLNYDTPFVFSMVNADCMSWLVQGGKEQKLHQDTSSVGNFISTKSIQSDERDDITENYKYEEGSLQERQVFLKALQKLKARSFHGSQRGAELQPSRPTSLSQDSPRSLHTPSLRPSDVVQVSLKFKLLDPPNMGQDICFVLLALNMSSQFKDLKVNLSAQSLLHDGSPLSPFWQDTAFITLSPKEAKTYPCKISYSQYSQYLSTDKLIRISALGEEKSSPEKILVNKIITLSYPSITINVLGAAVVNQPLSIQVIFSNPLSEQVEDCVLTVEGSGLFKKQQKVFLGVLKPQHQASIILETVPFKSGQRQIQANMRSNKFKDIKGYRNVYVDFAL

SEQ ID NO: 144510 - DNA, 1917 bp, Artificial Sequence
  derived and/or modified sequence
atggcccagggcctggaggtggccctgaccgacctgcagagcagcagaaacaacgtgagacaccacaccgaggagatcaccgtggaccacctgctggtgagaagaggccaggccttcaacctgaccctgtacttcagaaacagaagcttccagcccggcctggacaacatcatcttcgtggtggagaccgaggacgccgtgtacctggacagcgagccccagagacaggagtacgtgatgaacgactacggcttcatctaccagggcagcaagaactggatcagaccctgcccctggaactacggccagttcgaggacaagatcatcgacatctgcctgaagctgctggacaagagcctgcacttccagaccgaccccgccaccgactgcgccctgagaggcagccccgtgtacgtgagcagagtggtgtgcgccatgatcaacagcaacgacgacaacggcgtgctgaacggcaactggagcgagaactacaccgacggcgccaaccccgccgagtggaccggcagcgtggccatcctgaagcagtggaacgccaccggctgccagcccgtgagatacggccagtgctgggtgttcgccgccgtgatgtgcaccgtgatgagatgcctgggcatccccaccagagtgatcaccaacttcgacagcggccacgacaccgacggcaacctgatcatcgacgagtactacgacaacaccggcagaatcctgggcaacaagaagaaggacaccatctggaacttccacgtgtggaacgagtgctggatggccagaaaggacctgccccccgcctacggcggctggcaggtgctggacgccaccccccaggagatgagcaacggcgtgtactgctgcggccccgccagcgtgagagccatcaaggagggcgaggtggacctgaactacgacacccccttcgtgttcagcatggtgaacgccgactgcatgagctggctggtgcagggcggcaaggagcagaagctgcaccaggacaccagcagcgtgggcaacttcatcagcaccaagagcatccagagcgacgagagagacgacatcaccgagaactacaagtacgaggagggcagcctgcaggagagacaggtgttcctgaaggccctgcagaagctgaaggccagaagcttccacggcagccagagaggcgccgagctgcagcccagcagacccaccagcctgagccaggacagccccagaagcctgcacacccccagcctgagacccagcgacgtggtgcaggtgagcctgaagttcaagctgctggacccccccaacatgggccaggacatctgcttcgtgctgctggccctgaacatgagcagccagttcaaggacctgaaggtgaacctgagcgcccagagcctgctgcacgacggcagccccctgagccccttctggcaggacaccgccttcatcaccctgagccccaaggaggccaagacctacccctgcaagatcagctacagccagtacagccagtacctgagcaccgacaagctgatcagaatcagcgccctgggcgaggagaagagcagccccgagaagatcctggtgaacaagatcatcaccctgagctaccccagcatcaccatcaacgtgctgggcgccgccgtggtgaaccagcccctgagcatccaggtgatcttcagcaaccccctgagcgagcaggtggaggactgcgtgctgaccgtggagggcagcggcctgttcaagaagcagcagaaggtgttcctgggcgtgctgaagccccagcaccaggccagcatcatcctggagaccgtgcccttcaagagcggccagagacagatccaggccaacatgagaagcaacaagttcaaggacatcaagggctacagaaacgtgtacgtggacttcgccctgtag

SEQ ID NO: 144511 - DNA, 1917 bp, Artificial Sequence
  derived and/or modified sequence
atggcccagggcctagaagtggccttaacagacctgcagtctagcagaaataacgtgaggcaccacactgaagagataaccgttgaccacctcctggtgcgcaggggccaggccttcaacctcacgttgtatttccgaaacaggtcctttcagcccggactcgataatatcatattcgtcgttgaaacggaggacgctgtctacctcgattcagaaccccagcgtcaggaatacgtcatgaacgattatggcttcatttaccaaggttcaaaaaactggatccggccgtgtccttggaactacggccagtttgaggacaagatcatcgatatctgcctgaagttgttggataagagtttgcacttccagacagacccagccaccgactgtgcactgcgtggatccccagtgtatgtgtcgcgcgtggtgtgtgccatgataaattcaaatgacgacaatggggtccttaatggaaactggtccgagaattatacagacggggcgaatcccgcggaatggactggatccgtggctatcttgaagcagtggaacgcgacagggtgtcagccagtacgctacggacagtgctgggtgttcgccgcggtgatgtgtacagtgatgcggtgtttgggtatcccaacacgcgtgattactaacttcgacagtggccacgacaccgacggcaatctgataatcgatgaatattacgataatacagggcgtatcttgggaaataagaaaaaagataccatctggaactttcacgtttggaacgagtgctggatggcgcggaaagacctccctcctgcctacggcgggtggcaggttttggacgccaccccacaggaaatgtccaatggggtgtattgctgtggtcccgcaagtgtgagggctatcaaggagggggaggtagacctgaactacgacactccttttgtcttctcaatggtgaatgccgattgcatgtcctggctcgtccagggaggcaaagaacagaagctgcaccaagacacttcttctgtcggcaattttatttccaccaagtcgatccagtccgacgagcgcgatgacatcactgagaattacaagtacgaagagggtagcctccaggagaggcaggttttcctgaaagctctgcagaagttaaaagctcgctcttttcacgggagccagcgcggcgccgaattacaaccaagccggcctacgtctctctcgcaggacagcccaaggagcttacacactcctagtttacgacccagcgatgtcgtgcaggtgtctctgaaattcaagctactggatccccctaacatgggccaggatatttgtttcgtactccttgctctcaacatgtctagccagttcaaggacctaaaggtgaacctaagcgcacagtcacttctgcatgatgggtcccctctgagccctttttggcaggacactgcctttataactctgtcccctaaggaggccaaaacatacccatgcaagatcagttattctcagtactcccagtacctgagtactgataagctgatacgcatttcagcattgggcgaggagaagagcagccccgaaaaaatactggtaaataagatcattacccttagttaccctagtattaccatcaacgtcctcggagccgccgtggtgaatcaacccctttccattcaggttatttttagtaaccccctcagtgaacaggtcgaagattgtgtgctgaccgtggaagggagcgggttattcaaaaagcagcagaaggttttcctaggagttctaaagccacaacaccaggcaagcattatcctcgagacagtgccctttaaaagcggccagcgccagatccaggcaaacatgcgaagcaacaaatttaaggatattaagggataccgaaacgtgtatgtggattttgccttgtag

SEQ ID NO: 144512 - DNA, 1917 bp, Artificial Sequence
  derived and/or modified sequence
atggcccagggcctggaggtggccctgacagacctgcagagcagcaggaacaacgtgcgccaccacacagaggagatcaccgtggaccacctgctggtgcggcggggccaggccttcaacctgaccctgtacttcaggaacagaagcttccagcccggcctggacaacatcatctttgtggtggagacagaagatgctgtgtacctggacagcgagccccagaggcaggagtatgtgatgaatgactatggcttcatctaccagggcagcaagaactggatccggccctgcccctggaactacggccagtttgaggacaagatcatcgacatctgcctgaagctgctggacaagagcctgcacttccagacagatcctgccacagactgtgccctgcggggcagccctgtgtatgtgtcccgggtggtgtgtgccatgatcaacagcaatgatgacaatggagtgctgaatggaaactggagcgagaactacacagatggagccaacccagctgagtggacaggctctgtggccatcctgaagcagtggaatgccaccggctgccagcctgtgcgctatggccagtgctgggtgtttgctgctgtgatgtgcaccgtgatgcgctgcctgggcatccccaccagggtcatcaccaactttgacagcggccatgacacagatggcaacctgatcattgatgagtactatgacaacacaggccgcatcctgggcaacaagaagaaggacaccatctggaacttccacgtgtggaatgaatgctggatggccaggaaggacctgcccccagcctatggaggctggcaggtgctggatgccaccccccaggagatgagcaatggagtgtactgctgcggccctgcctctgtgcgggccatcaaggagggggaggtggacctgaactatgacaccccatttgtgttctccatggtgaatgctgactgcatgtcctggctggtgcagggcggcaaggagcagaagctgcaccaggacaccagctctgtgggcaacttcatcagcaccaagagcatccagagtgatgaaagagatgacatcacagagaactacaagtatgaggagggcagcctgcaggagcggcaggtgttcctgaaggccctgcagaagctgaaggcccggagcttccacggcagccagagaggagctgagctgcagcccagccggcccaccagcctgagccaggacagccccaggagcctgcacacccccagcctgcggcccagtgatgtggtgcaggtgtccctgaagttcaagctgctggacccccccaacatgggccaggacatctgctttgtgctgctggccctgaacatgagcagccagttcaaggacctgaaggtgaacctgagcgcccagagcctgctgcatgatggcagccccctgagccccttctggcaggacacagccttcatcaccctgagccccaaggaggccaagacctacccctgcaagatctcctacagccagtacagccagtacctgagcacagacaagctgatccgcatcagcgccctgggggaggagaagagcagccctgagaagatcctggtgaacaagatcatcaccctgagctaccccagcatcaccatcaacgtgctgggcgctgctgtggtgaaccagcccctgagcatccaggtgatcttcagcaaccccctgtctgagcaggtggaggactgtgtgctgactgtggagggcagcggcctcttcaagaagcagcagaaggtgttcctgggcgtgctgaagccccagcaccaggccagcatcatcctggagaccgtgcccttcaagagcggccagaggcagatccaggccaacatgaggagcaacaagttcaaggacatcaagggctacagaaatgtgtatgtggactttgccctgtag

SEQ ID NO: 144513 - DNA, 1917 bp, Artificial Sequence
  derived and/or modified sequence
atggcccagggcctggaggtggccctgaccgacctgcagagcagccgcaataacgtgcggcaccacactgaggagattacggttgatcacctactggtgcgtcgcggacaggccttcaatctcactctgtacttcagaaataggtcatttcagccgggactcgacaatattatatttgtcgttgaaacagaggacgcagtgtatcttgacagcgaaccgcaacgccaggagtacgtaatgaatgactatggattcatataccagggatcaaaaaattggatcagaccctgcccttggaactacggacaatttgaggacaagattatcgatatatgtctgaagcttctagataagtctttgcattttcaaacggaccctgctacagactgcgcactgcgcggaagccccgtgtacgtgtcccgcgtggtgtgcgccatgatcaattctaacgacgataacggggtgcttaacggaaattggtcggagaactacaccgacggtgccaaccctgcagagtggactggttccgtggccatactcaagcaatggaatgcaaccggatgccagcctgtgcgctacggacagtgctgggtattcgcagcagtgatgtgtaccgtcatgcgttgtcttggcatacctactagagttatcaccaatttcgatagtggacacgacactgatgggaacttgattatagacgagtactatgacaacaccgggcgcatcttgggcaataagaaaaaggacaccatctggaatttccatgtgtggaacgaatgctggatggccaggaaagaccttccgcccgcttatggaggctggcaggtgctggatgcaacacctcaagaaatgtctaatggcgtgtactgttgtggcccagcatcagtgagagccatcaaagaaggcgaggtggatctgaactacgacacccccttcgtgttctctatggtaaacgccgattgtatgtcttggctagtccagggagggaaggagcaaaaactgcatcaggataccagctctgtgggtaactttataagcacaaagtccattcagtccgacgaaagagatgacatcacagagaactataagtacgaagaaggcagtctccaagagcgccaggtcttcctgaaggccctgcaaaaacttaaggcgagaagttttcatgggtcccagagaggggccgagctgcaaccatcacgccctacgtccctatctcaagactcgccccggtccctacacaccccatccctgcgaccttccgatgttgtgcaggtgtcattgaaatttaagctgttggatccccctaacatggggcaggatatctgctttgtgctgctggccctgaatatgtcctcgcagttcaaagatcttaaagtcaatctttctgcacagagcttgcttcatgacggatctcccctgagccccttctggcaggacacagcattcatcaccctttccccgaaggaggcgaaaacctacccctgtaaaatttcttactcccagtattcccagtacctctctaccgataaattgattcggatctcagccctgggggaggaaaagtcatctcccgagaagatccttgtgaataagattatcaccttgagctatccatccattacgattaacgtgctcggagccgccgtcgtgaaccagcccctgtctatacaagtaatattcagtaacccactctcagaacaagtagaggattgcgtgcttacggtcgaaggctctggactgttcaagaagcaacagaaagtctttctcggagtgctcaaaccacaacaccaagcttcgattattctggaaacagttccttttaagagcggtcagcggcagattcaagccaatatgcgcagcaacaaattcaaagacatcaaaggatacaggaatgtatatgtcgactttgcactctag

SEQ ID NO: 144514 - DNA, 1917 bp, Artificial Sequence
  derived and/or modified sequence
atggcccagggcctggaagtcgcccttactgatttgcagagttccaggaataacgttaggcaccatactgaggagatcaccgtggatcatctcttggtacgcagagggcaggcctttaacctaaccctttatttccggaatagaagcttccaacctggcctcgataatattatttttgtcgtcgaaaccgaagatgccgtctacctcgatagcgagccacaacgtcaggaatacgtaatgaatgattacggattcatctaccagggaagcaagaattggattaggccatgtccctggaattatgggcaattcgaggacaagattattgatatttgtctcaagctactcgacaaatccctccatttccagacggacccggcaacggactgtgctctgcgcggatccccagtttacgtctctagagtcgtatgtgcgatgatcaatagtaacgatgacaatggtgtcctgaacggcaactggtccgagaattacaccgatggcgcaaatccagccgaatggaccggatcggtggccattttgaagcaatggaatgccacaggctgccagcctgttaggtatggacagtgctgggtattcgctgccgttatgtgcactgtaatgaggtgcctggggattccaacgcgggtgattacaaacttcgactcagggcacgacaccgatggcaatctgattattgatgagtactacgacaacactggtagaatactgggcaataagaagaaggataccatctggaacttccatgtgtggaatgagtgctggatggcgaggaaagacctgcccccagcctacggcggttggcaggtcttagacgctaccccccaggaaatgagcaacggagtttactgctgtggccctgcaagcgtgagggcaatcaaagaaggggaagtcgacctcaactacgacacccctttcgtgttttcaatggtgaatgcagactgcatgtcatggttggtccagggcggtaaagagcagaagctccatcaagacactagctcagtaggaaacttcatctctaccaaatctatccagtccgatgagcgggatgacatcacggagaactataagtacgaagaagggtctctgcaggagcgacaggtttttttgaaagctctgcagaaattgaaggcgagatcctttcatgggtcacagaggggagctgaattgcagccatcccgaccgactagtttgagtcaagattccccacgtagtctacatacccctagtctgaggccctcagatgtcgttcaagtgagtctcaagtttaaattgctcgacccacccaatatggggcaggatatttgttttgtcttattggcgctgaatatgagctctcagtttaaagacctaaaggtaaacctgtccgcacagtcgttactccatgacgggtctccactgtcccccttttggcaggacaccgccttcatcaccttgtccccaaaggaagcgaagacgtatccttgcaaaattagttatagtcaatacagccagtatctgtccaccgataagctcatccgcatcagcgcattaggtgaagaaaagtcaagcccggagaaaattctggtaaataagataattactctctcctatcctagcattaccataaatgttcttggcgctgccgtagtgaatcaacccctcagtattcaagtgatctttagtaacccgctgagcgagcaggttgaggactgcgttctaacggtcgagggctcaggcctgtttaagaaacagcaaaaagtgttcttgggcgtactgaaacctcagcatcaggccagcatcattctggaaaccgtcccgtttaaaagcggtcagaggcagatccaggcgaacatgcgctccaacaagttcaaggatataaagggctatcgcaatgtatatgtcgacttcgcgttgtag

SEQ ID NO: 144515 - DNA, 2521 bp, Artificial Sequence
  derived and/or modified sequence
cagctaccatggcccaagggctagaagtggccctcacagacctccagagctccagaaataatgtgcggcaccacacggaggagatcactgtggaccacctgcttgttcgccggggccaggccttcaacctcaccctgtacttcaggaaccggagcttccagccaggcctggacaacatcatcttcgtggttgaaactgaggatgctgtctacttggacagtgaaccccagaggcaggagtatgtcatgaatgattatggcttcatctaccaaggcagcaagaactggatccgcccatgtccctggaactatggacagtttgaagacaaaatcatagacatctgcctgaagctgctagacaagagcctgcacttccagactgacccagccacagactgtgctctgcggggaagccccgtctacgtcagcagagtggtgtgtgccatgatcaacagcaatgatgataatggggtgctcaatggaaactggagtgagaattacacagacggcgccaaccctgcggagtggacgggcagcgtggccatcctgaagcagtggaacgccacaggctgccagcccgtgcgctacgggcaatgctgggtctttgctgccgtcatgtgcacagtgatgaggtgtctggggatccctacccgtgtgatcaccaacttcgactctggccacgatacagatggaaacctgatcatagatgagtattatgacaacacaggcaggattttggggaataagaagaaggatactatctggaacttccatgtctggaatgagtgctggatggcccggaaggatctgccccctgcatatggaggctggcaggtgctggacgccacacctcaggagatgagcaacggcgtctactgctgtggccctgcctctgtcagagccatcaaagaaggagaagtggacctgaactatgacacgccctttgtgttttcgatggtgaatgctgactgcatgtcctggctcgtccagggagggaaggagcagaagcttcaccaggacacgagttctgttggcaattttatcagcacaaagagcatccagagtgacgagcgggatgacatcacagagaactacaagtatgaagaaggatccctccaggagaggcaggtgtttctgaaggctctgcagaagctgaaggctagaagcttccatggctcccaaagaggagcagagttgcaaccttccaggcccacatcactgagccaggacagccctcggagcctgcatacaccttcccttcgacccagtgatgtggtgcaagtctccctgaaattcaagctgctcgacccgcccaacatgggccaggatatatgctttgtcctgctggccctcaacatgtcctcccagttcaaggacctcaaagtgaacctgagtgcccagtctctgctgcacgatggcagccccctgtccccattctggcaggacacagcgttcatcacactctctcctaaagaagcaaagacctacccctgcaaaatctcctattcccagtacagccagtacctgtcaacagacaagctgatccgcatcagtgccctgggtgaagagaaaagcagtcctgagaaaatcctggtgaacaagatcatcaccttatcttatccaagcatcacgattaatgttctaggagcagccgttgtgaaccagccactctccatacaggtgatattttcaaaccccctctcggagcaggttgaggactgtgtgctgactgtggaaggaagtggcctcttcaagaaacagcagaaagtcttccttggagtcctcaaaccccaacaccaagcaagcatcattctggagaccgtccccttcaagagtggacaaaggcagatccaagctaatatgagaagcaacaagtttaaggacattaagggttacaggaatgtttatgtagactttgcattataaattctggaacaacgcgccagacgtgtgaatttcaagcttcaggaaaaggagcaagttcaaatgcaagctgcgccattccccaccacaacagaggcttcacagggctccagcaagagccacagaggggatgacgtgttcattttctgtctctcctgactccactagaaatttaagctccatgagggcaaagactttgctttgtttactacccctatactcagaaccatttctggcatatgctaggcactcaacaaatattttttgaatgaatgaataggagactccagcatccagagaacaggtaggaaatgtctatggatggatatttccctggaccatttgcacagctcccctggactcttttcagggcccagggattccactgtgtcccatccagagattccaggattccagtctcctatccagaagcgtgatttggcacagaggtcagaggatactggtaggacttggccatgacttaactgccccctgccccagatatccaggaaagaaaaagacaggctgaacagctcactgttgttttgttgttgcgaaagctaattccctagtatgaataaacttcagaccttgctctc

SEQ ID NO: 144516 - protein, 553 aa, Artificial Sequence
  derived and/or modified sequence
MKLGSSRAGPGRGSAGLLPGVHELPMGIPAPWGTSPLSFHRKCSLWAPGRPFLTLVLLVSIKQVTGSLLEETTRKWAQYKQACLRDLLKEPSGIFCNGTFDQYVCWPHSSPGNVSVPCPSYLPWWSEESSGRAYRHCLAQGTWQTIENATDIWQDDSECSENHSFKQNVDRYALLSTLQLMYTVGYSFSLISLFLALTLLLFLRKLHCTRNYIHMNLFASFILRTLAVLVKDVVFYNSYSKRPDNENGWMSYLSEMSTSCRSVQVLLHYFVGANYLWLLVEGLYLHTLLEPTVLPERRLWPRYLLLGWAFPVLFVVPWGFARAHLENTGCWTTNGNKKIWWIIRGPMMLCVTVNFFIFLKILKLLISKLKAHQMCFRDYKYRLAKSTLVLIPLLGVHEILFSFITDDQVEGFAKLIRLFIQLTLSSFHGFLVALQYGFANGEVKAELRKYWVRFLLARHSGCRACVLGKDFRFLGKCPKKLSEGDGAEKLRKLQPSLNSGRLLHLAMRGLGELGAQPQQDHARWPRGSSLSECSEGDVTMANTMEEILEESEI

SEQ ID NO: 144517 - protein, 350 aa, Artificial Sequence
  derived and/or modified sequence
MGIPAPWGTSPLSFHRKCSLWAPGRPFLTLVLLVSIKQVTGSLLEETTRKWAQYKQACLRDLLKEPSGIFCNGTFDQYVCWPHSSPGNVSVPCPSYLPWWSEESSGRAYRHCLAQGTWQTIENATDIWQDDSECSENHSFKQNVDRYALLSTLQLMYTVGYSFSLISLFLALTLLLFLRKLHCTRNYIHMNLFASFILRTLAVLVKDVVFYNSYSKRPDNENGWMSYLSEMSTSCRSVQVLLHYFVGANYLWLLVEGLYLHTLLEPTVLPERRLWPRYLLLGWAFPVLFVVPWGFARAHLENTGCWTTNGNKKIWWIIRGPMMLCVTALGLEETGLKRNGSIPFGHKEDI

SEQ ID NO: 144518 - protein, 554 aa, Artificial Sequence
  derived and/or modified sequence
MKLGSSRAGPGRGSAGLLPGVHELPMGIPAPWGTSPLSFHRKCSLWAPGRPFLTLVLLVSIKQVTGSLLEETTRKWAQYKQACLRDLLKEPSGIFCNGTFDQYVCWPHSSPGNVSVPCPSYLPWWSEESSGRAYRHCLAQGTWQTIENATDIWQDDSECSENHSFKQNVDRYALLSTLQLMYTVGYSFSLISLFLALTLLLFLRKLHCTRNYIHMNLFASFILRTLAVLVKDVVFYNSYSKRPDNENGWMSYLSEMSTSCRSVQVLLHYFVGANYLWLLVEGLYLHTLLEPTVLPERRLWPRYLLLGWAFPVLFVVPWGFARAHLENTGCWTTNGNKKIWWIIRGPMMLCVTVNFFIFLKILKLLISKLKAHQMCFRDYKYRLAKSTLVLIPLLGVHEILFSFITDDQVEGFAKLIRLFIQLTLSSFHGFLVALQYGFANGEVKAELRKYWVRFLLARHSGCRACVLGKDFRFLGKCPKKLSEGDGAEKLRKLQPSLNSGRLLHLAMRGLGELGAQPQQDHARWPRGSSLSECSEGDVTMANTMEEILEEKRSQ

SEQ ID NO: 144519 - DNA, 1662 bp, Artificial Sequence
  derived and/or modified sequence
atgaaattgggttcctctcgggccggtccaggacgaggtagcgctggattgctcccaggcgtgcacgagctgcccatgggcatacctgccccctggggaacaagcccactgagcttccaccgcaaatgttcactgtgggctccgggtcgaccatttctcacactggtccttctggtgagcataaagcaggtgactggctccctgctcgaagaaacaacgcgcaaatgggcccagtacaagcaggcttgccttcgcgatctcctgaaagagccctcaggaatcttctgcaatgggactttcgatcagtacgtatgttggccacatagcagtcctggaaacgtctctgtgccctgtccatcttatctcccatggtggtctgaggaaagcagcggaagggcataccgccactgtctggcccaggggacctggcaaactatcgaaaacgcaactgacatttggcaggacgattcagagtgttccgaaaatcacagctttaaacagaacgtggacaggtacgcactcctgagtaccctccagctgatgtacacagtgggctatagcttttccctgataagccttttccttgcactcaccttattacttttcctgcgaaagctccattgcacgcgcaattacattcacatgaatctcttcgctagtttcatcctgcggaccctggctgtgctggttaaggacgttgtcttctataattcatacagcaaaagaccggacaacgagaatggctggatgagttatctaagcgaaatgtccacatcctgccggtcagtgcaggtgctgctccattatttcgtgggggctaattacctctggctcctggtggaaggactgtacctgcataccctgctggaacccacagtgttgccagagcggcggctgtggcccaggtatctgctgttgggatgggcctttccagtgctattcgttgtgccctggggctttgctcgcgcccatctggaaaacaccggatgttggacaactaatggcaacaaaaagatctggtggattatccggggcccaatgatgctgtgcgtgacagtaaacttttttatctttctaaaaattttgaagctgcttatttccaagttgaaagctcatcagatgtgtttccgcgattataagtaccggcttgcgaagagcacacttgttctcattcccttactcggagtgcatgagatcctgttttctttcatcactgacgaccaagtggagggcttcgccaagctgatacggctcttcattcagcttaccctttcaagctttcacggttttttagtggctctgcagtacggatttgctaatggcgaagtcaaggctgaactcaggaaatattgggtccgcttcttgctggcaaggcatagcgggtgccgggcttgcgtactggggaaggattttcgcttcctgggcaagtgccccaagaaactttcagaaggcgatggagctgagaagctccgaaaactgcagccaagtctcaattctggaagactgcttcatctggccatgcggggcctcggggaactgggagctcaacctcaacaggaccacgctagatggccccggggctcttccctttcagaatgtagtgaaggggatgtgacaatggccaacactatggaggagattctggaagagtcagaaatttag

SEQ ID NO: 144520 - DNA, 1053 bp, Artificial Sequence
  derived and/or modified sequence
atgggcattcctgccccatgggggacctccccacttagctttcatagaaagtgctccttgtgggctccaggacgccccttcctgacactggtgctgctggtgtccatcaagcaggtaacgggctctctgttggaggagaccacacggaagtgggctcagtataagcaagcctgcttgcgcgatctgctgaaggagccctcaggcatattctgcaacggaaccttcgaccaatatgtttgttggcctcacagcagccctggaaatgtaagcgtgccatgtccttcctacctcccctggtggagcgaggagagctctgggcgggcttataggcactgcttggcccaggggacctggcagaccatcgagaatgcgaccgacatctggcaagacgatagtgagtgctccgagaatcacagttttaagcaaaacgtggaccggtatgctctgttgtccaccctgcagttgatgtatactgtagggtatagtttctcgctgattagcctgtttctagcactgacactgctcctcttccttaggaaactccattgtactcgcaattatattcacatgaacttgtttgcctccttcatccttaggacattagcggtattggtcaaagacgtggtattctacaattcgtacagtaaaagacctgataacgaaaatggctggatgagctacttatcagagatgtcaacaagttgccgatcggttcaggtactattgcactactttgtgggcgccaattacctatggctcttagtggaagggctctatctgcacaccctactagagccgaccgtgctccctgaacgacgtctgtggcccaggtatttattgttgggttgggccttcccagtgctctttgttgtgccttggggtttcgccagggcacacctagagaacaccgggtgctggacaactaacggcaacaagaagatctggtggatcatccggggacctatgatgttgtgcgtcacagccctcgggctggaagaaacgggcctgaagaggaatggcagcattccctttgggcataaggaggatatatag

SEQ ID NO: 144521 - DNA, 1665 bp, Artificial Sequence
  derived and/or modified sequence
atgaaactgggatcctctagagcagggccgggcagaggaagcgccggcctgctccctggtgttcacgaactgcccatgggcatacctgctccatggggtacttcaccgctgagtttccataggaaatgttccctgtgggcccctggccgcccattcctgactctcgtcttactggtctcaatcaagcaggttacaggctcacttctagaggaaacaacacgaaagtgggctcagtataagcaggcctgcctgcgggacctgctgaaggaacccagtgggattttctgcaacggtactttcgaccagtacgtttgctggccacattcatctcccgggaatgtgtccgtgccctgtccttcctatctgccttggtggtctgaggagtcaagcggcagggcatacagacactgtctggcccaagggacatggcagactatcgagaatgccaccgacatttggcaagatgactctgagtgctctgaaaaccattcattcaagcaaaacgtggataggtatgccctgctgagtacactgcaattaatgtacaccgttggttatagtttttctctcattagcctcttcctggctctcactctcctgttgttcctgcggaagctgcactgcacacggaattacatccacatgaatctgttcgcatcatttattctcaggaccctggccgttctggtgaaggacgttgtgttttacaactcctacagcaagagacccgacaatgaaaacggctggatgtcatacctctcagagatgtctacgtcatgtcggagcgtccaggtcctcttacattacttcgtgggagccaactatttatggctgttagtggaagggctctatctgcataccctgctggagcccacagtcctccctgagaggagattatggccgaggtacctgctgctgggatgggctttcccggtgctgtttgttgtcccctgggggttcgctagggcacacctcgaaaacactggttgttggacaacgaacggcaacaaaaaaatttggtggataatcaggggccctatgatgctttgcgtgactgtgaactttttcattttccttaaaatccttaagttattgataagcaagctaaaagctcatcagatgtgcttcagggattacaaataccgccttgccaagtcaaccctggttctcatccccctccttggggtccacgagattttgttctcattcattaccgatgatcaagtggaaggatttgcaaagttgatacgactgttcatccagctaactctgagctcctttcatggattcctggtcgccctgcagtacggtttcgccaatggggaggttaaggccgagctgcggaagtactgggtgcgttttctcttagcgcgccattcaggttgcagggcctgtgtgcttggcaaagattttaggttcctcggaaagtgcccaaaaaaactgtccgaaggtgatggagccgaaaaacttagaaaactgcagccaagtctcaactcaggccggctgctgcacctcgctatgagggggctgggcgagctcggcgcccaacctcagcaggatcatgcacgatggccccggggctcatctctgtctgagtgttccgaaggtgatgtcactatggcaaatacaatggaagaaatcctggaagaaaagcgttcccaatag

SEQ ID NO: 144522 - DNA, 687 bp, Artificial Sequence
  derived and/or modified sequence
taggccacagatatctggcaggatgactccgagtgtagtgagaaccattcatttaaacaaaatgtcgatcgatatgccctccttagtacactacagctgatgtacaccgtaggctacagttttagtttgatatccctgtttttagccttgactcttctcctcttccttagaaagttgcattgcaccagaaattacattcacatgaacctgtttgcatcctttattctgcgaacgctggcagtgttagttaaggacgtggtgttttataattcttacagcaaaagaccagacaatgaaaatggctggatgagttatctgtccgagatgagcacatcatgccggtctgtgcaggtgttgctgcactatttcgtgggcgcaaactatctgtggctgctggtggagggcctgtacctgcacacactgttagagcctaccgtcctgcccgaacggcggctatggcctaggtatctgctgcttggctgggccttccccgttctgttcgtggtgccatgggggttcgcaagagcccatttggagaacacaggctgctggacgacgaacgggaacaaaaagatttggtggatcatacgtggaccaatgatgctgtgtgttactgccctcggcctagaggaaactgggcttaagagaaatgggtctataccattcggccacaaggaggatatctag

SEQ ID NO: 144523 - DNA, 4059 bp, Artificial Sequence
  derived and/or modified sequence
atgaagctgggatcgagcagggcagggcctgggagaggaagcgcgggactcctgcctggcgtccacgagctgcccatgggcatccctgccccctgggggaccagtcctctctccttccacaggaagtgctctctctgggcccctgggaggcccttcctcactctggtcctgctggtttccatcaagcaagttacaggatccctccttgaggaaacgactcggaagtgggctcagtacaaacaggcatgtctgagagacttactcaaggaaccttctggcatattttgtaacgggacatttgatcagtacgtgtgttggcctcattcttctcctggaaatgtctctgtaccctgcccttcatacttaccttggtggagtgaagagagctcaggaagggcctacagacactgcttggctcaggggacttggcagacgatagagaacgccacggatatttggcaggatgactccgaatgctccgagaaccacagcttcaagcaaaacgtggatcgttatgccttgctgtcaaccttgcagctgatgtacaccgtgggatactccttctctcttatctccctcttcctggctctcaccctcctcttgtttcttcgaaaactccactgcacgcgcaactacatccacatgaacttgtttgcttctttcatcctgagaaccctggctgtactggtgaaggacgtcgtcttctacaactcttactccaagaggcctgacaatgagaatgggtggatgtcctacctgtcagagatgtccacctcctgccgctcagtccaggttctcttgcattactttgtgggtgccaattacttatggctgctggttgaaggcctctacctccacacgctgctggagcccacagtgcttcctgagaggcggctgtggcccagatacctgctgttgggttgggccttccctgtgctatttgttgtaccctggggtttcgcccgtgcacacctggagaacacagggtgctggacaacaaatgggaataagaaaatctggtggatcatccgaggacccatgatgctctgtgtaacagtcaatttcttcatcttcctgaaaattctcaagcttctcatttctaagctcaaagctcatcaaatgtgcttcagagattataaatacagattggcaaaatcaacactggtcctcattcctttattgggcgttcatgagatcctcttctctttcatcactgatgatcaagttgaaggatttgcaaaacttatacgacttttcattcagttgacactgagctcctttcatgggttcctggtggccttgcagtatggttttgccaatggagaggtgaaggctgagctgcggaaatactgggtccgcttcttgctagcccgccactcaggctgcagagcctgtgtcctggggaaggacttccggttcctaggaaaatgtcccaagaagctctcggaaggagatggcgctgagaagcttcggaagctgcagccctcacttaacagtgggcggctcctacatctagccatgcgaggtcttggggagctgggcgcccagccccaacaggaccatgcacgctggccccggggcagcagcctgtccgagtgcagtgagggggatgtcaccatggccaacaccatggaggagattctggaagagagtgagatctagggtggagttccaccaccctggctctgctcccagggactcttgagggggcccaggaagaggaagcaaagcaggacacacgttgctgggcacggaatcattctcgttccattcaccatgccactttgatatgaaagctatcacaaggttcttcaagctctgtatgaaagaggctgtgtgtcatgctcacagcctctgcctgctcttctcatcctaataacccccaccagtgtgttttccacaatgcccaccagaccctagggcctggctctaaattcaagccaatgaagtcccaccatgaagagaggtctcctgttatagagaagccagccaatatctcttcctttatcccttggggtgcatgctttccatctgaggttgggtttagggtgcgtgaaaacctcctaggaagcttttaaaatgcagaatcctagacttgtggctaagattctaagacagtgagtctgggaccatggccaggaattggagctgtttaataagcatcccaggtaattctgctgcaagcccacccttggagaacactgggcagggtgagagggagctagaagcgcccccatgtggccatggcaggatgctgcaagagacagtctgctctcccaggtcagctggggtgtgcctgccctccttggagagtatgtaactccacccaccagagtgccactcctctctgctcttcctctcctatcaagtcttgcctctctctctctttgcctcagttctctgtccctgcacagcaggagttctgcttgatcctccctttgaggattggccccagtgcctggggaccctctgaatgtcgtctttggtctgttcctctcctttctggctctatctacctttctgagtttggcttctaccagcctgatttacactaccattctcttggggcaaggaatgtccccaccatttttggtttgccattgatgcattgattgtcacacctgttgtcccaggaagttgacctataactctccatggccagagtccctgctgatcagaattcaatttgcccagtgggaataaatactgaaagcaggagggcccaggtaaagcaataggagtttggctggatctggacatgcccagggtggctctgagagatccaagactttgcatccaccagcctgtgggatctttcctgcctactgtgacccatggaggctgaggagggcccaggcagttggggtcaggctcaatgactgaaagtatagggcaagaggctgtaggaagatcaagggatggacatcctttggaaacagtgtgttaatgcacaggagtgtcactttcatggtatgtaaaatgcatgtgtacgtgggtggggtatgttgctatgggactaaataccaccttgtcttcgggggagtcagtttgatactcctcaagcagggctgccatatttagcaaacaaaaacaaggtactcaattaaatttgaatttcagacaaatagtcttcttgtataagtatatcccatgggcatatttaatctgagattggaattcaatcatgcatcttgtcttttactggcatctctgttttcaaggatactttgccacagggctgggactagggtgaaataatcaaggcactcatctctaaaaagctcaaagtaaatgatcaaaataaatcatattttaatgcaatattctaaaaaaacaaattaacaaactacagcccatgagccatttatagaaatgaaatttgattggagccaggggcaggataagggtgaggcaggagaggccagctcttgcaagtgcaggctctggtcctgactttcaaatgttgtctatgagggacttttaatgtgaatttttatttttagacaattgcattaaaatgttatttatattgactatggggacttttggggcccccttaaattttgcacttgaaatgggatccccacttgtgtcaccccatagtccagccctggttttaggatggggatggaggcaaaggcatcaggcaagtaatgaagcaaaggtttattttttggtgtccagattatccatagctcagtcatgaaaatctatgtctttctatttttctcctttctgcaaatgtccctgcctcggctcatcagccaattagctcctagaaagctggggtcatctcgtattcccagcaagtacccagcacagtgccggttcagagcaggtgctccacacacattcctggaatgagacagcacagaaatggctctcgggagcctcggatgctgctgggagtaagtgatccaggaccttaccgctaagaggagaaactttttttcaaagcatttataaatactccctccacccctcactccacaaatggggtgatcaacacttactgcttgctcttgttctgctaatgattaaaacaagtttatttaattt

SEQ ID NO: 144524 - DNA, 1641 bp, Artificial Sequence
  derived and/or modified sequence
gaggagattttgcctttgtggttagcctcagcccagcctggacaagcttaatgccttagaaagaaataccctgcctcaaaaagacacctgcctctaaactggctcgagccccatcgccttctgccagccattcctctgtagctcgaaccccagcctgtctcagccagcttcgtgcattgagcagaaccttcagggtggagcccgctgaccgccttgttctttctcctcagcctgtcaaggaagtcccagaaagcacagctgacttagggaaggtctgggaaaaatctccctgcttttgggggggcaggggcgggggatgagccagggccgagaaggaactctgaagactccgtagattgctctagaccgcctcagacactctcggcgcagcgtggagaggatttgtgcaaacatttcctctgtggaccaagaggaatgcaagaggaggctgcctgcggtgcatcttggacggctagagagatgtacccctacttgtgaaggtgcacgaggaagatgaagctgggatcgagcagggcagggcctgggagaggaagcgcgggactcctgcctggcgtccacgagctgcccatgggcatccctgccccctgggggaccagtcctctctccttccacaggaagtgctctctctgggcccctgggaggcccttcctcactctggtcctgctggtttccatcaagcaagttacaggatccctccttgaggaaacgactcggaagtgggctcagtacaaacaggcatgtctgagagacttactcaaggaaccttctggcatattttgtaacgggacatttgatcagtacgtgtgttggcctcattcttctcctggaaatgtctctgtaccctgcccttcatacttaccttggtggagtgaagagagctcaggaagggcctacagacactgcttggctcaggggacttggcagacgatagagaacgccacggatatttggcaggatgactccgaatgctccgagaaccacagcttcaagcaaaacgtggatcgttatgccttgctgtcaaccttgcagctgatgtacaccgtgggatactccttctctcttatctccctcttcctggctctcaccctcctcttgtttcttcgaaaactccactgcacgcgcaactacatccacatgaacttgtttgcttctttcatcctgagaaccctggctgtactggtgaaggacgtcgtcttctacaactcttactccaagaggcctgacaatgagaatgggtggatgtcctacctgtcagagatgtccacctcctgccgctcagtccaggttctcttgcattactttgtgggtgccaattacttatggctgctggttgaaggcctctacctccacacgctgctggagcccacagtgcttcctgagaggcggctgtggcccagatacctgctgttgggttgggccttccctgtgctatttgttgtaccctggggtttcgcccgtgcacacctggagaacacagggtgctggacaacaaatgggaataagaaaatctggtggatcatccgaggacccatgatgctctgtgtaacagcacttggactagaggaaacgggcttgaagagaaatgggagcattccctttggtcacaaggaagacatttaa

SEQ ID NO: 144525 - DNA, 2175 bp, Artificial Sequence
  derived and/or modified sequence
gaggagattttgcctttgtggttagcctcagcccagcctggacaagcttaatgccttagaaagaaataccctgcctcaaaaagacacctgcctctaaactggctcgagccccatcgccttctgccagccattcctctgtagctcgaaccccagcctgtctcagccagcttcgtgcattgagcagaaccttcagggtggagcccgctgaccgccttgttctttctcctcagcctgtcaaggaagtcccagaaagcacagctgacttagggaaggtctgggaaaaatctccctgcttttgggggggcaggggcgggggatgagccagggccgagaaggaactctgaagactccgtagattgctctagaccgcctcagacactctcggcgcagcgtggagaggatttgtgcaaacatttcctctgtggaccaagaggaatgcaagaggaggctgcctgcggtgcatcttggacggctagagagatgtacccctacttgtgaaggtgcacgaggaagatgaagctgggatcgagcagggcagggcctgggagaggaagcgcgggactcctgcctggcgtccacgagctgcccatgggcatccctgccccctgggggaccagtcctctctccttccacaggaagtgctctctctgggcccctgggaggcccttcctcactctggtcctgctggtttccatcaagcaagttacaggatccctccttgaggaaacgactcggaagtgggctcagtacaaacaggcatgtctgagagacttactcaaggaaccttctggcatattttgtaacgggacatttgatcagtacgtgtgttggcctcattcttctcctggaaatgtctctgtaccctgcccttcatacttaccttggtggagtgaagagagctcaggaagggcctacagacactgcttggctcaggggacttggcagacgatagagaacgccacggatatttggcaggatgactccgaatgctccgagaaccacagcttcaagcaaaacgtggatcgttatgccttgctgtcaaccttgcagctgatgtacaccgtgggatactccttctctcttatctccctcttcctggctctcaccctcctcttgtttcttcgaaaactccactgcacgcgcaactacatccacatgaacttgtttgcttctttcatcctgagaaccctggctgtactggtgaaggacgtcgtcttctacaactcttactccaagaggcctgacaatgagaatgggtggatgtcctacctgtcagagatgtccacctcctgccgctcagtccaggttctcttgcattactttgtgggtgccaattacttatggctgctggttgaaggcctctacctccacacgctgctggagcccacagtgcttcctgagaggcggctgtggcccagatacctgctgttgggttgggccttccctgtgctatttgttgtaccctggggtttcgcccgtgcacacctggagaacacagggtgctggacaacaaatgggaataagaaaatctggtggatcatccgaggacccatgatgctctgtgtaacagtcaatttcttcatcttcctgaaaattctcaagcttctcatttctaagctcaaagctcatcaaatgtgcttcagagattataaatacagattggcaaaatcaacactggtcctcattcctttattgggcgttcatgagatcctcttctctttcatcactgatgatcaagttgaaggatttgcaaaacttatacgacttttcattcagttgacactgagctcctttcatgggttcctggtggccttgcagtatggttttgccaatggagaggtgaaggctgagctgcggaaatactgggtccgcttcttgctagcccgccactcaggctgcagagcctgtgtcctggggaaggacttccggttcctaggaaaatgtcccaagaagctctcggaaggagatggcgctgagaagcttcggaagctgcagccctcacttaacagtgggcggctcctacatctagccatgcgaggtcttggggagctgggcgcccagccccaacaggaccatgcacgctggccccggggcagcagcctgtccgagtgcagtgagggggatgtcaccatggccaacaccatggaggagattctggaagagaagagaagccag

SEQ ID NO: 144526 - DNA, 1758 bp, Artificial Sequence
  derived and/or modified sequence
acgccacggatatttggcaggatgactccgaatgctccgagaaccacagcttcaagcaaaacgtggatcgttatgccttgctgtcaaccttgcagctgatgtacaccgtgggatactccttctctcttatctccctcttcctggctctcaccctcctcttgtttcttcgaaaactccactgcacgcgcaactacatccacatgaacttgtttgcttctttcatcctgagaaccctggctgtactggtgaaggacgtcgtcttctacaactcttactccaagaggcctgacaatgagaatgggtggatgtcctacctgtcagagatgtccacctcctgccgctcagtccaggttctcttgcattactttgtgggtgccaattacttatggctgctggttgaaggcctctacctccacacgctgctggagcccacagtgcttcctgagaggcggctgtggcccagatacctgctgttgggttgggccttccctgtgctatttgttgtaccctggggtttcgcccgtgcacacctggagaacacagggtgctggacaacaaatgggaataagaaaatctggtggatcatccgaggacccatgatgctctgtgtaacagcacttggactagaggaaacgggcttgaagagaaatgggagcattccctttggtcacaaggaagacatttaaccatgaacttgtaaaacactgacatataccccagagaaaggcattagatcttcatgtctatcagtttacaagaagataatctgtcctgaacaataaggagctaaacctgctgccctcccaatctgcacagctctaggattctaggactctgtgcattggttctagggctccccagagagtggaatttatgtgtcccaccagacatggaagggaaaagaaaggccatgcagaaagaagtgaaagaggcaggctaggagtcaggagcctgggctctatgactgacttgtgatgtgtccttcagccaggtgagttggcctctctgggcctctgtttcttcatctatgaaatcagtcttgaactagaccagtggttttcaaccagaggagattctgacccctggggacatttggctgtgtctggagacatttttaattgtcataaattggggatggggataggaggagaatgttgctactggcatctagtgggtggaggtcagggatgctgctcaacaccctacaacacacagaaccacccccagaataaataattatcctgccccaaatattaagagtgccaacattgaaaaaccctggactagacagtagctgcacattaaaacaacctggggaggattaaaaaaatacccagcccagacttacccagactgatggaatcaaatctcctgccatgtagagcttccttagcactggaatctcattcagccactctcttgtatcttcctttagcattcattgagcaccttcactgggcttggcttggtgctaggttatttcagagtttctatcctcagggaattcagaatttaatagttatcattctgagactcatcagactatgactgaaccaatatctgccttcatttttggtcatatgaccacatgttgcaattttccactgatctgaatagacataaccccaactctaaaagagaattccttaaaccacaacgtggaaggaacctggattcctgaatgactgtatggagcagaactccctccactgcactagactgtgacataaccaataaaataaaataagataaaataaa

SEQ ID NO: 144527 - DNA, 1662 bp, Artificial Sequence
  derived and/or modified sequence
atgaagctgggcagcagccgggccggccctggccggggcagcgctggcctgctgcccggggtgcatgagctgcccatgggcatcccagccccctggggcaccagccccctgtccttccacaggaagtgcagcctgtgggcccctggccggcccttcctgaccctggtgctgctggtgtccatcaagcaggtgacaggcagcctgctggaggagaccaccaggaagtgggcccagtacaagcaggcctgcctgcgggacctgctgaaggagcccagcggcatcttctgcaatggcacctttgaccagtatgtgtgctggccccacagcagccctggaaatgtgtctgtgccctgccccagctacctgccctggtggagcgaggagagcagcggccgggcctaccgccactgcctggcccagggcacctggcagaccattgaaaatgccacagacatctggcaggatgattctgagtgcagcgagaaccacagcttcaagcagaatgtggacagatatgccctgctgagcaccctgcagctgatgtacacagtgggctacagcttcagcctcatcagcctcttcctggccctgaccctgctgctcttcctgaggaagctgcactgcaccaggaactacatccacatgaacctgtttgccagcttcatcctgcggaccctggccgtgctggtgaaggatgtggtgttctacaacagctacagcaagaggccagacaatgaaaatggctggatgagctacctgtctgagatgagcaccagctgccgctctgtgcaggtgctgctgcactactttgtgggcgccaactacctgtggctgctggtggagggcctgtacctgcacaccctgctggagcccaccgtgctgcctgagcggcggctgtggccccgctacctgctgctgggctgggccttccctgtgctgtttgtggtgccctggggctttgcccgggcccacctggagaacacaggctgctggaccaccaacggcaacaagaagatctggtggatcatccggggccccatgatgctgtgtgtgacagtgaacttcttcatcttcctgaagatcctgaagctgctgatcagcaagctgaaggcccaccagatgtgcttccgggactacaagtaccgcctggccaagagcaccctggtgctgatccccctgctgggcgtgcatgagatcctcttctccttcatcacagatgaccaggtggagggctttgccaagctgatccgcctcttcatccagctgaccctgagcagcttccacggcttcctggtggccctgcagtatggctttgccaacggggaggtgaaggccgagctgaggaagtactgggtgcgcttcctgctggcccggcacagcggctgccgggcctgtgtgctgggcaaggacttccgcttcctgggcaagtgccccaagaagctgtctgaaggagatggagctgagaagctgaggaagctgcagcccagcctgaacagcggccgcctgctgcacctggccatgaggggcctgggggagctgggcgcccagccccagcaggaccacgcccgctggccccggggcagcagcctgtctgagtgcagtgaaggagatgtgaccatggccaacaccatggaggagatcctggaggagagcgagatctag

SEQ ID NO: 144528 - DNA, 1053 bp, Artificial Sequence
  derived and/or modified sequence
atgggcatcccagccccctggggcaccagccccctgtccttccacaggaagtgcagcctgtgggcccctggccggcccttcctgaccctggtgctgctggtgtccatcaagcaggtgacaggcagcctgctggaggagaccaccaggaagtgggcccagtacaagcaggcctgcctgcgggacctgctgaaggagcccagcggcatcttctgcaatggcacctttgaccagtatgtgtgctggccccacagcagccctggaaatgtgtctgtgccctgccccagctacctgccctggtggagcgaggagagcagcggccgggcctaccgccactgcctggcccagggcacctggcagaccattgaaaatgccacagacatctggcaggatgacagtgaatgttctgagaaccacagcttcaagcagaatgtggacagatatgccctgctgagcaccctgcagctgatgtacacagtgggctacagcttcagcctcatcagcctcttcctggccctgaccctgctgctcttcctgaggaagctgcactgcaccaggaactacatccacatgaacctgtttgccagcttcatcctgcggaccctggccgtgctggtgaaggatgtggtgttctacaacagctacagcaagaggccagacaatgaaaatggctggatgagctacctgtctgagatgagcaccagctgccgctctgtgcaggtgctgctgcactactttgtgggcgccaactacctgtggctgctggtggagggcctgtacctgcacaccctgctggagcccaccgtgctgcctgagcggcggctgtggccccgctacctgctgctgggctgggccttccctgtgctgtttgtggtgccctggggctttgcccgggcccacctggagaacacaggctgctggaccaccaatggaaacaagaagatctggtggatcatccggggccccatgatgctgtgtgtgacagccctgggcctggaggagaccggcctgaagagaaatggcagcatccccttcggccacaaggaggacatctag

SEQ ID NO: 144529 - DNA, 1665 bp, Artificial Sequence
  derived and/or modified sequence
atgaagctgggcagcagccgggccggccctggccggggcagcgctggcctgctgcccggggtgcatgagctgcccatgggcatcccagccccctggggcaccagccccctgtccttccacaggaagtgcagcctgtgggcccctggccggcccttcctgaccctggtgctgctggtgtccatcaagcaggtgacaggcagcctgctggaggagaccaccaggaagtgggcccagtacaagcaggcctgcctgcgggacctgctgaaggagcccagcggcatcttctgcaatggcacctttgaccagtatgtgtgctggccccacagcagccctggaaatgtgtctgtgccctgccccagctacctgccctggtggagcgaggagagcagcggccgggcctaccgccactgcctggcccagggcacctggcagaccattgaaaatgccacagacatctggcaggatgattctgagtgcagcgagaaccacagcttcaagcagaatgtggacagatatgccctgctgagcaccctgcagctgatgtacacagtgggctacagcttcagcctcatcagcctcttcctggccctgaccctgctgctcttcctgaggaagctgcactgcaccaggaactacatccacatgaacctgtttgccagcttcatcctgcggaccctggccgtgctggtgaaggatgtggtgttctacaacagctacagcaagaggccagacaatgaaaatggctggatgagctacctgtctgagatgagcaccagctgccgctctgtgcaggtgctgctgcactactttgtgggcgccaactacctgtggctgctggtggagggcctgtacctgcacaccctgctggagcccaccgtgctgcctgagcggcggctgtggccccgctacctgctgctgggctgggccttccctgtgctgtttgtggtgccctggggctttgcccgggcccacctggagaacacaggctgctggaccaccaacggcaacaagaagatctggtggatcatccggggccccatgatgctgtgtgtgacagtgaacttcttcatcttcctgaagatcctgaagctgctgatcagcaagctgaaggcccaccagatgtgcttccgggactacaagtaccgcctggccaagagcaccctggtgctgatccccctgctgggcgtgcatgagatcctcttctccttcatcacagatgaccaggtggagggctttgccaagctgatccgcctcttcatccagctgaccctgagcagcttccacggcttcctggtggccctgcagtatggctttgccaacggggaggtgaaggccgagctgaggaagtactgggtgcgcttcctgctggcccggcacagcggctgccgggcctgtgtgctgggcaaggacttccgcttcctgggcaagtgccccaagaagctgtctgaaggagatggagctgagaagctgaggaagctgcagcccagcctgaacagcggccgcctgctgcacctggccatgaggggcctgggggagctgggcgcccagccccagcaggaccacgcccgctggccccggggcagcagcctgtctgagtgcagtgaaggagatgtgaccatggccaacaccatggaggagatcctggaggagaagaggagccagtag

SEQ ID NO: 144530 - DNA, 687 bp, Artificial Sequence
  derived and/or modified sequence
tgagccacagacatctggcaggatgacagtgaatgttctgagaaccacagcttcaagcagaatgtggacagatatgccctgctgagcaccctgcagctgatgtacacagtgggctacagcttcagcctcatcagcctcttcctggccctgaccctgctgctcttcctgaggaagctgcactgcaccaggaactacatccacatgaacctgtttgccagcttcatcctgcggaccctggccgtgctggtgaaggatgtggtgttctacaacagctacagcaagaggccagacaatgaaaatggctggatgagctacctgtctgagatgagcaccagctgccgctctgtgcaggtgctgctgcactactttgtgggcgccaactacctgtggctgctggtggagggcctgtacctgcacaccctgctggagcccaccgtgctgcctgagcggcggctgtggccccgctacctgctgctgggctgggccttccctgtgctgtttgtggtgccctggggctttgcccgggcccacctggagaacacaggctgctggaccaccaatggaaacaagaagatctggtggatcatccggggccccatgatgctgtgtgtgacagccctgggcctggaggagaccggcctgaagagaaatggcagcatccccttcggccacaaggaggacatctag

SEQ ID NO: 144531 - DNA, 1662 bp, Artificial Sequence
  derived and/or modified sequence
atgaagctgggcagcagccgggccggccccggccggggcagcgccggactcctccccggtgtccacgagctccccatgggaattcctgccccatggggaaccagtcccctgtccttccacaggaagtgttctctgtgggccccaggacgccctttcctgaccctagtacttctagtgagcattaagcaagttactggtagtcttctggaggagaccacacggaagtgggcgcaatacaaacaggcttgcctgcgtgacctacttaaagagccaagcggaatcttttgcaacggcacctttgaccagtacgtgtgctggccacactcttccccgggcaatgtgagtgtcccatgtcccagctatctaccctggtggagcgaagagtcttcaggacgggcgtatcgccattgcctcgcccagggcacatggcagacaatcgagaacgcaactgatatatggcaagacgacagtgagtgcagcgagaatcacagtttcaagcagaacgttgataggtacgcactccttagcacactgcagttgatgtatacggtgggctacagcttctccctgatttctctgttcctggctttgactctgttgctgttcctgcgcaaattgcactgcacaaggaactacatacacatgaacctgttcgcttcctttattttgaggacactcgccgttctggtgaaagacgtggtcttctataacagctactccaagcgccccgacaatgaaaacggatggatgtcctatttatctgaaatgtccacctcgtgccggagtgtgcaggtcctgcttcattattttgtgggggccaattatctctggctgctggttgagggtctttacctccacacccttctggaacccacagtgctccctgagaggcgcctttggccacgttacttgcttctcgggtgggcctttcccgtgctcttcgtggtgccctggggctttgcacgtgcccacctggagaatacaggttgctggaccaccaatggcaacaagaagatctggtggatcatcagaggcccaatgatgctttgcgtaactgtcaacttctttatctttctcaagatcctcaaactcctgatatctaagctgaaggctcaccaaatgtgtttcagagattacaagtacaggctggctaagtcaacgctagtgcttatcccgttactcggtgtccatgagatactgttctcatttatcacagatgaccaggtggaaggcttcgctaagctgatcaggttatttattcagttgactctcagctctttccacggatttcttgtggccctgcagtacggatttgcgaatggagaggtcaaggcggagcttaggaaatactgggtaagattcctattggctcggcacagtggttgtcgggcctgcgtactgggaaaggactttagattcttaggtaagtgtccaaaaaagttgtctgaaggcgacggagccgaaaagttaaggaaactccagccaagcctgaattcgggacgactccttcatcttgcaatgcgcgggctcggggagctgggggcccagccccagcaggatcacgcacgctggccccggggctcgagtcttagtgaatgttcagagggagacgtcaccatggccaacaccatggaggagattctcgaagaatctgagatttag

SEQ ID NO: 144532 - DNA, 1053 bp, Artificial Sequence
  derived and/or modified sequence
atgggcatccccgccccctggggcaccagccccctgagcttccacaggaagtgcagcttgtgggcccctggacgcccgtttctgactctggttcttcttgtgagcatcaagcaggtgacaggcagcctgctcgaagagactaccaggaaatgggcgcagtacaaacaggcctgcctccgcgacctgctaaaagagcccagtggaattttctgtaatggcaccttcgatcagtatgtgtgctggccccatagtagtcctggaaatgtctccgtgccatgtcccagctatctgccctggtggtcagaggagagtagtgggagagcctatcgccattgcctggctcagggcacctggcagacaattgaaaatgcaacagatatttggcaggacgatagcgagtgtagtgagaaccatagctttaagcaaaacgtggatagatacgccttgctgtccaccctccagctgatgtacaccgtcggatactcattcagcctgatttcacttttcctggcattgacactgcttctctttctgagaaagctgcactgcacccgcaactacattcacatgaacctttttgccagtttcatcctcaggactttagcagtgcttgtaaaggatgtcgtgttttataattcatacagtaagcgcccggataatgaaaatggttggatgtcctacttaagtgagatgtcaacaagttgtcggtctgtccaagtgcttctgcactattttgtcggtgccaattacctgtggttgcttgtggaaggcctgtatttacatacccttttggagccaacggttcttcctgagaggcgattgtggcctaggtaccttctcctcggctgggccttcccagtgttgtttgtggtgccctggggcttcgctagggctcacctggaaaacaccggatgctggacaacaaacggaaacaaaaaaatctggtggatcatccgcggacccatgatgttatgcgtgacagcgctgggcctcgaagaaactggcctcaagaggaacgggtcaattccttttgggcataaagaggatatctag

SEQ ID NO: 144533 - DNA, 1665 bp, Artificial Sequence
  derived and/or modified sequence
atgaagctgggcagcagccgggccggccccggccggggcagcgccggattactaccgggagttcatgagttgcctatgggcattcccgccccttggggcactagtcctctgtcatttcatcgaaagtgttccctttgggcccccggccgaccattcctgacacttgtactgctagtttctattaagcaagtcaccgggtcccttctggaggagactacaaggaagtgggcccagtataagcaggcatgccttcgcgatttgctcaaggaacctagtggaatcttctgcaatggcacttttgatcagtatgtctgttggcctcactcatctcccgggaacgtatccgtgccgtgccccagttatctgccgtggtggtcagaggagagctcgggacgcgcatacaggcactgcttagctcagggcacatggcaaactattgagaacgccacggatatctggcaggatgatagcgagtgtagcgagaaccattccttcaaacagaatgtggaccggtatgccctgttgtcaacactacagctgatgtacaccgtcggatactctttttctttgatcagcctgttcctggccctcaccctgctcctgtttttgagaaaacttcattgtacgaggaactacatacacatgaacctcttcgcatcattcatcctgaggaccttagccgtactcgtaaaagacgttgttttttacaattcatattccaaaaggccggacaatgaaaacgggtggatgtcttatcttagcgagatgtctacctcatgtaggtccgtgcaagtgctgctgcactacttcgtgggggccaattatctgtggttgctggtcgaagggttgtatctgcatacattgttagagccaacagtgttgcccgagcgaagactctggccccggtacctgttgttggggtgggcatttccggtcctgttcgtggtgccctggggattcgctcgcgcccatctggaaaatactggttgctggactaccaatggaaataaaaagatctggtggatcattaggggcccaatgatgttgtgcgtgactgtcaacttcttcatttttctgaagattctcaaactcctgattagtaagctgaaggcgcaccagatgtgcttccgggattataaatatcgcttagctaagagtaccctggtcctcatacctctactgggcgtccatgagatccttttcagttttatcacagacgatcaggttgaaggattcgccaaacttattcgcctatttatccagctgactctgtcatccttccacggctttcttgtggcattgcagtacgggtttgctaatggcgaagtaaaggctgaattacgaaaatactgggtgagattcctgctggccagacattccgggtgtcgcgcctgcgtactcggcaaggacttcaggttcttggggaagtgccctaaaaaattgtccgagggggacggagccgagaagttacgaaagctgcaaccatcccttaattctggcaggcttctgcatctggctatgcgaggcctcggagaactgggcgcgcaaccccagcaagaccatgcccgctggccccgcggttcatcactatcagagtgttccgagggcgacgtcacaatggccaataccatggaggagatccttgaagagaaaagatcccaatag

SEQ ID NO: 144534 - DNA, 687 bp, Artificial Sequence
  derived and/or modified sequence
tgagccaccgacatctggcaggacgacagcgagtgcagcgagaaccactcctttaagcagaacgtggatcgctatgccttgctgagtacacttcagttaatgtacacggtcggctattccttttccctcatctctcttttcctcgccctgactctgctgctctttctccgaaaacttcactgtactaggaactacatacatatgaacctttttgctagcttcatcctccgtactctggcagtgctggttaaggacgtcgtgttctacaatagttactccaagcgaccagataacgaaaatggctggatgtcatatctatcagaaatgtcaacaagctgccggtccgtgcaagtgcttttgcattacttcgtgggagctaactacctatggctgctagtggaagggctttacctgcatacattgctggaacccaccgtgctgccagagagaagactctggccccggtacctgctactcggctgggctttccctgtgctgttcgtcgttccctgggggtttgcaagggcccacctcgagaatacggggtgctggactacaaatggtaacaagaaaatctggtggataataaggggacccatgatgttgtgtgtcacagcgctgggcctggaagaaacaggcctcaaaagaaacggttctatcccattcgggcacaaggaagacatatag

SEQ ID NO: 144535 - DNA, 1662 bp, Artificial Sequence
  derived and/or modified sequence
atgaaactcgggagttccagggctggccctggtcgcggaagtgccggattattgccgggagttcacgaactaccaatgggaattccagccccatggggtacctcacctctatcattccacaggaagtgcagcctttgggcacccggacgtccttttctcactcttgtgctgctcgtctccatcaagcaggttacaggttcactgctggaggaaacaaccagaaaatgggcacagtacaaacaagcgtgcctgagggacttgctgaaagaaccctctggcatcttctgcaatgggacttttgaccagtacgtgtgctggccacacagcagccctggcaatgtctcagttccctgcccttcctacctaccctggtggtcagaagaaagctccgggcgagcatatcgtcattgcttggcccaaggaacttggcagacaatcgagaacgccaccgacatttggcaggatgactcagagtgttctgaaaaccatagttttaagcagaatgttgaccgttatgccttgctctcgactttgcagctaatgtatactgttggatacagcttttccctaatatcgctgttcctcgctttgaccctgctgctgttcctgcgcaaactgcactgcactcggaattatatccatatgaatttgtttgctagtttcattctgagaaccctggctgtgttggtaaaggacgtggttttttataactcctattcaaagcggcctgacaatgaaaacggctggatgtcgtatttgtcggaaatgtcaacgtcctgcaggagcgtgcaggtgctgctgcattattttgtgggcgctaactacctctggctgctcgtagaagggctttatctccacacgttgttggaaccaaccgttcttccggagaggaggctctggccgcgttacttactgctgggatgggccttccctgtgcttttcgttgtgccatggggatttgcccgagcgcaccttgagaacaccggctgctggactaccaacgggaataaaaagatctggtggataatcagaggcccaatgatgctgtgtgtgaccgtcaacttcttcatattcttgaagattctgaagctcctgatctctaagctcaaggcgcaccagatgtgcttccgcgattacaagtatcgtctcgcaaagagtactcttgttttaatacccctactgggcgtccacgagatcctcttcagtttcattaccgacgaccaggtggagggctttgccaagctgatccgcctttttatccagctaaccctatcctccttccacggctttttagtggcactgcaatacgggtttgccaacggggaagttaaagctgagctgagaaagtactgggtgagattcttgctagcacggcactccggatgccgcgcatgtgtcctgggcaaggacttccgctttttaggtaagtgtccaaagaagttatccgaaggtgacggagctgagaagctgcgcaagctccagccaagtttgaactcaggccgattgctccacctggccatgcgagggctgggggaactcggagcccagccccagcaagaccacgcaagatggcctcggggtagcagtcttagcgaatgcagtgagggcgatgtgactatggcgaacacaatggaggaaatcctcgaggagtcagaaatctag

SEQ ID NO: 144536 - DNA, 1053 bp, Artificial Sequence
  derived and/or modified sequence
atgggcattcccgctccgtggggcacctctcctctatcctttcatagaaagtgtagtctatgggcgcctggtcgcccatttctgacgctcgtactactagtttcaataaagcaagtgacagggtctctgctggaggaaaccacccgcaagtgggcccagtataaacaggcttgcctgagggacttactcaaagagccaagtgggatcttctgcaacggcacctttgaccagtacgtctgttggccacactccagtccaggaaatgtgtcagtgccatgtccgtcatatctgccatggtggtctgaagaaagttcgggacgggcttaccggcattgcttagcccagggaacttggcagactatcgagaatgcgacggatatttggcaagacgactcagaatgcagtgagaatcacagctttaaacagaatgtggacagatacgcgctcctttctacactacagctgatgtatactgttggttactctttctctctgatttctctattcttagcactaacactactgctgttcttgcgcaagctgcactgcacaagaaattacattcacatgaatcttttcgcctcatttatccttcgaaccttagccgtcctggtgaaggacgtagttttctataacagttattctaagaggcccgataatgaaaacggctggatgtcttatctgagcgagatgtctacgagttgcagatcagtccaggtgctgctccattattttgtcggtgctaactacctttggcttctggtcgagggcctgtacctccatactctcctcgaacccaccgtgctgcccgagcggcgtctgtggccacggtatctcctcctgggatgggcgttccccgtgttgtttgtggtgccttggggatttgccagggcccaccttgagaatacagggtgttggacgaccaacggtaacaaaaagatttggtggatcatccgcggacctatgatgttgtgcgtgaccgctctcggtctggaggagacaggccttaagcggaatgggagcatcccatttgggcataaggaagacatctag

SEQ ID NO: 144537 - DNA, 1665 bp, Artificial Sequence
  derived and/or modified sequence
atgaaactcggctcatcaagagctggtccaggtcgcggaagtgccggtttgttacccggagtccacgaactacctatggggatcccagctccgtggggtacgtcccccctcagcttccaccggaaatgctcactgtgggcgcctggcagaccctttctcaccctggtgctacttgtgagcattaagcaggttactggttcactgctggaggagacgactcgtaagtgggctcaatataaacaagcctgcctgagagacctcttaaaagaaccatcaggcatcttttgtaacggaaccttcgaccagtacgtgtgctggccacactcaagccccggtaatgtgtctgtcccctgtccctcttacctgccctggtggtccgaagagtcttccgggcgagcttaccggcattgtctggctcagggaacttggcaaacaattgagaatgccacggacatatggcaggacgattcagaatgtagtgagaaccacagcttcaagcagaacgtggatcgctacgcgctcctgagtacgctccagttaatgtacaccgttggatactccttttcacttatctcccttttcctggcgctgactctgttactgttcctccggaaactgcactgtaccagaaattatatccacatgaatctgtttgcgagtttcattctccgtacactcgccgttctggtcaaagatgtggtcttctataacagctattctaaacgtcccgacaacgagaatggctggatgagttatctctctgaaatgagcacgtcatgccggtctgttcaggtgttgctgcattacttcgttggagcaaattatctgtggctgcttgtggagggactgtaccttcacacattgctggagcctacggttcttcccgaacgacgcttgtggccccgttacttgcttttgggatgggcctttcccgtcttgtttgtagtgccttgggggtttgcgagggcccacctcgagaataccgggtgctggacaaccaacggaaacaagaagatctggtggatcatacggggacctatgatgttgtgcgtaactgtgaatttttttatctttctcaagattcttaagctgcttatatccaagcttaaggcccaccagatgtgtttccgggactacaaatatcggctggcaaaatctacccttgtgcttatcccattgttgggcgtgcatgagatccttttcagcttcataactgacgatcaggtggagggcttcgccaaactcatcagactgtttatccaactcaccctttcatcttttcatggcttcctggtcgcactccagtatggattcgctaatggcgaagtcaaagctgagctccgtaaatactgggtgaggtttttgttggcccgacacagtgggtgccgagcgtgcgtgcttggaaaagacttcaggttcctaggaaagtgccccaaaaagctgtccgagggcgatggagcagaaaagctacggaagctccaaccgagcctaaatagcggacgcctgctgcatttggccatgagagggctgggcgagctgggagcacagccacaacaggaccacgcccgatggcctcgtggatcttcccttagtgaatgttctgaaggggacgtgaccatggctaacaccatggaggaaattctggaggaaaaacgtagtcaatag

SEQ ID NO: 144538 - DNA, 687 bp, Artificial Sequence
  derived and/or modified sequence
taagccaccgacatctggcaggacgactccgagtgtagtgagaatcacagttttaaacagaacgtcgaccgctatgccttactcagcaccctacaacttatgtataccgtgggctattctttttccctgatttccttgtttttggcactaacacttttgttgttccttcgcaaactccattgtaccaggaattatatccacatgaatctgttcgcctctttcatcctgcggactctggcagttttagtcaaagacgttgtgttctacaattcttattctaaacgcccagataacgaaaacgggtggatgagttatctgtctgaaatgagtacgagctgtcgctctgtgcaggtgctcctccactactttgtgggtgcaaactatctgtggctgttggtggaaggcctctatttgcacactctgcttgagcctaccgtgttgcctgagcgccgtttgtggccccgttatctgcttctgggctgggcgtttccggtactgtttgtcgtgccatggggatttgccagagcgcacctcgagaacacaggctgttggaccacaaacggtaacaaaaagatctggtggataattagaggccctatgatgttatgtgtcacagccctgggactggaggaaacaggattgaagaggaacggaagtattccatttgggcacaaggaagacatttag

SEQ ID NO: 144539 - DNA, 1662 bp, Artificial Sequence
  derived and/or modified sequence
atgaagctgggcagcagcagagccggccccggcagaggcagcgccggcctgctgcccggcgtgcacgagctgcccatgggcatccccgccccctggggcaccagccccctgagcttccacagaaagtgcagcctgtgggcccccggcagacccttcctgaccctggtgctgctggtgagcatcaagcaggtgaccggcagcctgctggaggagaccaccagaaagtgggcccagtacaagcaggcctgcctgagagacctgctgaaggagcccagcggcatcttctgcaacggcaccttcgaccagtacgtgtgctggccccacagcagccccggcaacgtgagcgtgccctgccccagctacctgccctggtggagcgaggagagcagcggcagagcctacagacactgcctggcccagggcacctggcagaccatcgagaacgccaccgacatctggcaggacgacagcgagtgcagcgagaaccacagcttcaagcagaacgtggacagatacgccctgctgagcaccctgcagctgatgtacaccgtgggctacagcttcagcctgatcagcctgttcctggccctgaccctgctgctgttcctgagaaagctgcactgcaccagaaactacatccacatgaacctgttcgccagcttcatcctgagaaccctggccgtgctggtgaaggacgtggtgttctacaacagctacagcaagagacccgacaacgagaacggctggatgagctacctgagcgagatgagcaccagctgcagaagcgtgcaggtgctgctgcactacttcgtgggcgccaactacctgtggctgctggtggagggcctgtacctgcacaccctgctggagcccaccgtgctgcccgagagaagactgtggcccagatacctgctgctgggctgggccttccccgtgctgttcgtggtgccctggggcttcgccagagcccacctggagaacaccggctgctggaccaccaacggcaacaagaagatctggtggatcatcagaggccccatgatgctgtgcgtgaccgtgaacttcttcatcttcctgaagatcctgaagctgctgatcagcaagctgaaggcccaccagatgtgcttcagagactacaagtacagactggccaagagcaccctggtgctgatccccctgctgggcgtgcacgagatcctgttcagcttcatcaccgacgaccaggtggagggcttcgccaagctgatcagactgttcatccagctgaccctgagcagcttccacggcttcctggtggccctgcagtacggcttcgccaacggcgaggtgaaggccgagctgagaaagtactgggtgagattcctgctggccagacacagcggctgcagagcctgcgtgctgggcaaggacttcagattcctgggcaagtgccccaagaagctgagcgagggcgacggcgccgagaagctgagaaagctgcagcccagcctgaacagcggcagactgctgcacctggccatgagaggcctgggcgagctgggcgcccagccccagcaggaccacgccagatggcccagaggcagcagcctgagcgagtgcagcgagggcgacgtgaccatggccaacaccatggaggagatcctggaggagagcgagatctag

SEQ ID NO: 144540 - DNA, 1053 bp, Artificial Sequence
  derived and/or modified sequence
atgggcatccccgccccctggggcaccagccccctgagcttccacagaaagtgcagcctgtgggcccccggcagacccttcctgaccctggtgctgctggtgagcatcaagcaggtgaccggcagcctgctggaggagaccaccagaaagtgggcccagtacaagcaggcctgcctgagagacctgctgaaggagcccagcggcatcttctgcaacggcaccttcgaccagtacgtgtgctggccccacagcagccccggcaacgtgagcgtgccctgccccagctacctgccctggtggagcgaggagagcagcggcagagcctacagacactgcctggcccagggcacctggcagaccatcgagaacgccaccgacatctggcaggacgacagcgagtgcagcgagaaccacagcttcaagcagaacgtggacagatacgccctgctgagcaccctgcagctgatgtacaccgtgggctacagcttcagcctgatcagcctgttcctggccctgaccctgctgctgttcctgagaaagctgcactgcaccagaaactacatccacatgaacctgttcgccagcttcatcctgagaaccctggccgtgctggtgaaggacgtggtgttctacaacagctacagcaagagacccgacaacgagaacggctggatgagctacctgagcgagatgagcaccagctgcagaagcgtgcaggtgctgctgcactacttcgtgggcgccaactacctgtggctgctggtggagggcctgtacctgcacaccctgctggagcccaccgtgctgcccgagagaagactgtggcccagatacctgctgctgggctgggccttccccgtgctgttcgtggtgccctggggcttcgccagagcccacctggagaacaccggctgctggaccaccaacggcaacaagaagatctggtggatcatcagaggccccatgatgctgtgcgtgaccgccctgggcctggaggagaccggcctgaagagaaacggcagcatccccttcggccacaaggaggacatctag

SEQ ID NO: 144541 - DNA, 1665 bp, Artificial Sequence
  derived and/or modified sequence
atgaagctgggcagcagcagagccggccccggcagaggcagcgccggcctgctgcccggcgtgcacgagctgcccatgggcatccccgccccctggggcaccagccccctgagcttccacagaaagtgcagcctgtgggcccccggcagacccttcctgaccctggtgctgctggtgagcatcaagcaggtgaccggcagcctgctggaggagaccaccagaaagtgggcccagtacaagcaggcctgcctgagagacctgctgaaggagcccagcggcatcttctgcaacggcaccttcgaccagtacgtgtgctggccccacagcagccccggcaacgtgagcgtgccctgccccagctacctgccctggtggagcgaggagagcagcggcagagcctacagacactgcctggcccagggcacctggcagaccatcgagaacgccaccgacatctggcaggacgacagcgagtgcagcgagaaccacagcttcaagcagaacgtggacagatacgccctgctgagcaccctgcagctgatgtacaccgtgggctacagcttcagcctgatcagcctgttcctggccctgaccctgctgctgttcctgagaaagctgcactgcaccagaaactacatccacatgaacctgttcgccagcttcatcctgagaaccctggccgtgctggtgaaggacgtggtgttctacaacagctacagcaagagacccgacaacgagaacggctggatgagctacctgagcgagatgagcaccagctgcagaagcgtgcaggtgctgctgcactacttcgtgggcgccaactacctgtggctgctggtggagggcctgtacctgcacaccctgctggagcccaccgtgctgcccgagagaagactgtggcccagatacctgctgctgggctgggccttccccgtgctgttcgtggtgccctggggcttcgccagagcccacctggagaacaccggctgctggaccaccaacggcaacaagaagatctggtggatcatcagaggccccatgatgctgtgcgtgaccgtgaacttcttcatcttcctgaagatcctgaagctgctgatcagcaagctgaaggcccaccagatgtgcttcagagactacaagtacagactggccaagagcaccctggtgctgatccccctgctgggcgtgcacgagatcctgttcagcttcatcaccgacgaccaggtggagggcttcgccaagctgatcagactgttcatccagctgaccctgagcagcttccacggcttcctggtggccctgcagtacggcttcgccaacggcgaggtgaaggccgagctgagaaagtactgggtgagattcctgctggccagacacagcggctgcagagcctgcgtgctgggcaaggacttcagattcctgggcaagtgccccaagaagctgagcgagggcgacggcgccgagaagctgagaaagctgcagcccagcctgaacagcggcagactgctgcacctggccatgagaggcctgggcgagctgggcgcccagccccagcaggaccacgccagatggcccagaggcagcagcctgagcgagtgcagcgagggcgacgtgaccatggccaacaccatggaggagatcctggaggagaagagaagccagtag

SEQ ID NO: 144542 - DNA, 687 bp, Artificial Sequence
  derived and/or modified sequence
tgagccaccgacatctggcaggacgacagcgagtgcagcgagaaccacagcttcaagcagaacgtggacagatacgccctgctgagcaccctgcagctgatgtacaccgtgggctacagcttcagcctgatcagcctgttcctggccctgaccctgctgctgttcctgagaaagctgcactgcaccagaaactacatccacatgaacctgttcgccagcttcatcctgagaaccctggccgtgctggtgaaggacgtggtgttctacaacagctacagcaagagacccgacaacgagaacggctggatgagctacctgagcgagatgagcaccagctgcagaagcgtgcaggtgctgctgcactacttcgtgggcgccaactacctgtggctgctggtggagggcctgtacctgcacaccctgctggagcccaccgtgctgcccgagagaagactgtggcccagatacctgctgctgggctgggccttccccgtgctgttcgtggtgccctggggcttcgccagagcccacctggagaacaccggctgctggaccaccaacggcaacaagaagatctggtggatcatcagaggccccatgatgctgtgcgtgaccgccctgggcctggaggagaccggcctgaagagaaacggcagcatccccttcggccacaaggaggacatctag

SEQ ID NO: 144543 - protein, 370 aa, Artificial Sequence
  derived and/or modified sequence
MASSTTRGPRVSDLFSGLPPAVTTPANQSAEASAGNGSVAGADAPAVTPFQSLQLVHQLKGLIVLLYSVVVVVGLVGNCLLVLVIARVRRLHNVTNFLIGNLALSDVLMCTACVPLTLAYAFEPRGWVFGGGLCHLVFFLQPVTVYVSVFTLTTIAVDRYVVLVHPLRRRISLRLSAYAVLAIWALSAVLALPAAVHTYHVELKPHDVRLCEEFWGSQERQRQLYAWGLLLVTYLLPLLVILLSYVRVSVKLRNRVVPGCVTQSQADWDRARRRRTFCLLVVIVVVFAVCWLPLHVFNLLRDLDPHAIDPYAFGLVQLLCHWLAMSSACYNPFIYAWLHDSFREELRKLLVAWPRKIAPHGQNMTVSVVI

SEQ ID NO: 144544 - DNA, 1113 bp, Artificial Sequence
  derived and/or modified sequence
atggccagcagcaccaccagaggccccagagtgagcgacctgttcagcggcctgccccccgccgtgaccacccccgccaaccagagcgccgaggccagcgccggcaacggcagcgtggccggcgccgacgcccccgccgtgacccccttccagagcctgcagctggtgcaccagctgaagggcctgatcgtgctgctgtacagcgtggtggtggtggtgggcctggtgggcaactgcctgctggtgctggtgatcgccagagtgagaagactgcacaacgtgaccaacttcctgatcggcaacctggccctgagcgacgtgctgatgtgcaccgcctgcgtgcccctgaccctggcctacgccttcgagcccagaggctgggtgttcggcggcggcctgtgccacctggtgttcttcctgcagcccgtgaccgtgtacgtgagcgtgttcaccctgaccaccatcgccgtggacagatacgtggtgctggtgcaccccctgagaagaagaatcagcctgagactgagcgcctacgccgtgctggccatctgggccctgagcgccgtgctggccctgcccgccgccgtgcacacctaccacgtggagctgaagccccacgacgtgagactgtgcgaggagttctggggcagccaggagagacagagacagctgtacgcctggggcctgctgctggtgacctacctgctgcccctgctggtgatcctgctgagctacgtgagagtgagcgtgaagctgagaaacagagtggtgcccggctgcgtgacccagagccaggccgactgggacagagccagaagaagaagaaccttctgcctgctggtggtgatcgtggtggtgttcgccgtgtgctggctgcccctgcacgtgttcaacctgctgagagacctggacccccacgccatcgacccctacgccttcggcctggtgcagctgctgtgccactggctggccatgagcagcgcctgctacaaccccttcatctacgcctggctgcacgacagcttcagagaggagctgagaaagctgctggtggcctggcccagaaagatcgccccccacggccagaacatgaccgtgagcgtggtgatctag

SEQ ID NO: 144545 - DNA, 1113 bp, Artificial Sequence
  derived and/or modified sequence
atggctagttccaccactagaggaccccgtgtgtcagatctcttctcagggttaccaccggcagttaccacccctgccaaccagtccgcagaggcgtcagcaggcaatggatcagtggctggagctgacgcccctgcagttactccttttcaaagcctccagctcgtacatcagcttaaaggcctcatcgtgctgttgtactcagtggtcgtggtcgtcggactggtgggtaattgtctcctcgtcctggtgatagctcgagtgagaagacttcacaacgtcaccaattttctaatcgggaatctggcactctcggacgtcctgatgtgtacagcctgcgtgcccctcacgcttgcatacgctttcgagccacggggctgggtctttggaggtggtctgtgtcatctggtttttttcctccagcccgtcacagtgtacgttagcgtgtttacactcactacgattgcagtggatagatatgtggttctggttcaccccctaaggcgtcgaatatctcttcgcctctctgcctacgctgttttagccatctgggccctcagtgcagtcctggctctgccagccgcagtgcacacatatcacgtcgaacttaagccccatgacgtgcgcctgtgcgaagaattttgggggtcacaggaacggcagaggcagctatacgcctggggacttcttttagtgacgtacttgctgcccctcctcgttattctgctcagttacgtccgagtttccgttaagcttcgcaaccgagtggtgccaggttgcgtcacacagagccaggctgattgggatcgcgccagacggcggcgaacattctgcctgttagttgtgatcgtcgttgtatttgctgtctgttggttacctcttcacgtattcaatctgctccgagacttagatccacacgcgattgatccctacgccttcggcctggtgcagctgctgtgccactggctggccatgagctcagcctgctacaacccatttatctacgcatggctgcacgactcgttccgggaagagctgcgcaagctgctggttgcgtggccgagaaagattgcaccgcacggtcagaacatgactgtctcagtggttatttag

SEQ ID NO: 144546 - DNA, 1113 bp, Artificial Sequence
  derived and/or modified sequence
atggcctcgtcaaccaccagagggccaagagtgtccgatctgttttcagggctgccacccgcggtcacgacccctgcgaatcagtctgccgaggcttcggctggtaacggatcagttgctggggcagatgcccctgctgtgacccctttccagagccttcagttagtgcaccaactgaaaggtctgatcgtcctgctctactccgtggtcgtggtggtgggcctggtcggcaattgtcttcttgtccttgtgattgcccgggttagaagactccataatgtcaccaatttcctcattggtaatctggctctgagcgacgttctgatgtgcacggcctgcgtgcccctgactctggcgtacgccttcgaaccgcggggctgggtcttcggagggggtctctgtcacttggtctttttcctccagccagtgactgtctacgtgtcagtgttcactctgaccactatcgcggtcgatcggtatgtagtcctggtgcatcctttaaggcgacgcatcagtttgcggttatctgcctatgctgtgttggccatctgggccctctcagccgtgctagcgcttcccgcagccgtgcatacataccacgtcgagctgaaacctcacgacgtgcgcttgtgcgaggagttctggggatcccaggagagacaaaggcaactgtatgcgtggggcttactgttggttacatacttgctcccactactggtcatactgctgagctacgtccgggtatcagtgaaactgcgtaacagagttgtccctggctgtgtgacacaaagccaggcagattgggacagagcccgccggcgccggaccttttgcctcttagttgtgatagtcgtggtctttgccgtgtgttggcttccactgcacgtgttcaatctacttagagatctcgatcctcatgctattgacccatacgcctttggcctggtgcagcttctttgccattggttggcaatgtccagtgcctgctacaacccctttatttacgcttggctgcatgacagctttcgcgaagaattgagaaaactgcttgtggcctggccccgtaagattgcaccccatggacagaacatgacagtttccgtggtcatctag

SEQ ID NO: 144547 - DNA, 1113 bp, Artificial Sequence
  derived and/or modified sequence
atggccagcagcaccacccggggcccccgggtgtctgacctcttcagcggcctgcccccagctgtgaccaccccagccaaccagagcgctgaggccagcgctggaaatggatctgtggccggggctgatgccccagctgtgacccccttccagagcctgcagctggtgcaccagctgaagggcctgattgtgctgctgtacagcgtggtggtggtggtgggcctggtgggcaactgcctgctggtgctggtgattgcccgggtgcggcggctgcacaacgtgaccaacttcctgattggcaacctggccctgagtgatgtgctgatgtgcacagcctgtgtgcccctgaccctggcctatgcctttgagccccggggctgggtgtttggaggcggcctgtgccacctggtgttcttcctgcagcctgtgacagtgtatgtgtctgtgttcaccctgaccaccatcgctgtggaccgctacgtggtgctggtgcaccccctgcggcggcgcatcagcctgcggctgagcgcctatgctgtgctggccatctgggccctgtctgctgtgctggccctgcctgctgctgtgcacacctaccacgtggagctgaagccccatgatgtgcggctgtgtgaggagttctggggcagccaggagcggcagaggcagctgtatgcctggggcctgctgctggtgacctacctgctgcccctgctggtgatcctgctgtcctatgtgcgggtgtctgtgaagctgaggaacagagtggtgcccggctgtgtgacccagagccaggccgactgggaccgggccaggagaagaaggaccttctgcctgctggtggtgattgtggtggtgtttgctgtgtgctggctgcccctgcacgtgttcaacctgctgcgggacctggacccccacgccatcgacccctatgccttcggcctggtgcagctgctgtgccactggctggccatgagcagcgcctgctacaaccccttcatctatgcctggctgcatgacagcttccgggaggagctgaggaagctgctggtggcctggcccaggaagatcgccccccacggccagaacatgacagtgtctgtggtgatctag

SEQ ID NO: 144548 - DNA, 1113 bp, Artificial Sequence
  derived and/or modified sequence
atggccagcagcaccacccggggcccccgggtgagcgacctgttcagcggtttgcctccagccgtgacaacccctgcaaatcagtcggccgaggcctccgccgggaatggatctgtcgccggcgcagatgcacctgcagtgaccccattccagtccctgcaattggtgcaccagctgaaggggttgatcgtgctgctttactctgtcgtcgtggtagtgggcctggtcggaaactgcttgctagtcctggttattgcaagggtgagacggctgcataacgtcactaattttttgatcgggaatctagccctgtcagacgttttaatgtgcactgcttgtgtaccattaacactggcctacgccttcgagccaagggggtgggtgtttggtggcgggttgtgccatctggttttcttcctccagccagtgaccgtgtacgtctccgttttcactctcacaacaattgccgtggacagatatgtcgtgctcgttcaccctctacgccgccgtatatctctgcggctgagcgcatatgcagtgctcgccatatgggccctgtccgcggtgctggccctcccagccgctgtccatacatatcacgtggagctgaaaccgcacgatgtacgcctatgcgaggagttttgggggagccaggaacgccagagacagctgtatgcctggggtctcctcctggtcacttatctcctcccactgctggtaatcctgctgagctacgtgagagtctcagtgaaactgagaaatagggtggtccccgggtgcgtgacacagagccaggctgactgggatagagcgagacgcagaagaaccttctgcctcctggtggtgattgttgtggtcttcgccgtatgttggctgcctctgcacgtatttaacctgctgagggacctggatccgcatgctatagatccgtacgccttcggcctggtgcagttgctgtgtcactggttagcaatgagttctgcatgctacaatccgttcatttacgcttggctacatgattcctttcgggaagaacttcgtaagttattagtggcatggccccgaaagattgcccctcacggccagaacatgactgtaagcgtggtaatctag

SEQ ID NO: 144549 - DNA, 1113 bp, Artificial Sequence
  derived and/or modified sequence
atggccagcagcaccacccggggcccccgggtgagcgacctgttcagcggactcccaccagccgtaacgacccccgccaaccagtccgcagaggcttcggccggcaatggatctgtcgccggggccgatgcaccagcggtgacaccatttcagtcgctacagctagtgcatcagctgaagggcctcatcgttctgctgtattctgtcgttgtcgtagtaggcctggtgggaaattgcctgttggtgctcgtgattgcaagagtgagaagacttcataatgttactaattttctgatcggcaatcttgccctgagtgacgtgctgatgtgtaccgcttgcgtacccctgacactggcatacgcatttgagccaagaggctgggtgttcggtggaggcctgtgtcatctcgtcttcttcctccagcctgtgacggtttacgtctccgtattcactctgacaactattgcagtggatagatatgtcgtcctggtccaccctctgagaagaagaatctccctgcgactttcagcttacgccgtgcttgcaatctgggcattatcagccgtgcttgcgctcccagcagccgtacatacttaccatgtggagcttaaacctcatgatgtaagactttgcgaagagttctgggggagccaggagaggcaaagacaactctatgcgtggggcctgctcctcgtcacatatctcttaccccttttagtgattctgctgtcgtacgtccgggtgagcgttaagttgcggaacagggtggtgcctggctgtgtgacgcaatcccaggctgactgggaccgggctagaagacggaggaccttctgcttgctggtggtcatcgtggtcgtgtttgctgtttgctggttaccacttcacgtgtttaacctgctgagagacttagatccccatgctatcgatccttacgcgtttggcctggtgcagttactgtgccactggttagcgatgtctagcgcctgctacaatcccttcatctatgcctggctgcacgactccttccgggaggagttacggaaactgctggtggcatggcctcggaagatcgcgccccatggtcaaaatatgacggtctcggtggtgatctag

SEQ ID NO: 144550 - DNA, 1796 bp, Artificial Sequence
  derived and/or modified sequence
atggcctcatcgaccactcggggccccagggtttctgacttattttctgggctgccgccggcggtcacaactcccgccaaccagagcgcagaggcctcggcgggcaacgggtcggtggctggcgcggacgctccagccgtcacgcccttccagagcctgcagctggtgcatcagctgaaggggctgatcgtgctgctctacagcgtcgtggtggtcgtggggctggtgggcaactgcctgctggtgctggtgatcgcgcgggtgcgccggctgcacaacgtgacgaacttcctcatcggcaacctggccttgtccgacgtgctcatgtgcaccgcctgcgtgccgctcacgctggcctatgccttcgagccacgcggctgggtgttcggcggcggcctgtgccacctggtcttcttcctgcagccggtcaccgtctatgtgtcggtgttcacgctcaccaccatcgcagtggaccgctacgtcgtgctggtgcacccgctgaggcggcgcatctcgctgcgcctcagcgcctacgctgtgctggccatctgggcgctgtccgcggtgctggcgctgcccgccgccgtgcacacctatcacgtggagctcaagccgcacgacgtgcgcctctgcgaggagttctggggctcccaggagcgccagcgccagctctacgcctgggggctgctgctggtcacctacctgctccctctgctggtcatcctcctgtcttacgtccgggtgtcagtgaagctccgcaaccgcgtggtgccgggctgcgtgacccagagccaggccgactgggaccgcgctcggcgccggcgcaccttctgcttgctggtggtgatcgtggtggtgttcgccgtctgctggctgccgctgcacgtcttcaacctgctgcgggacctcgacccccacgccatcgacccttacgcctttgggctggtgcagctgctctgccactggctcgccatgagttcggcctgctacaaccccttcatctacgcctggctgcacgacagcttccgcgaggagctgcgcaaactgttggtcgcttggccccgcaagatagccccccatggccagaatatgaccgtcagcgtggtcatctgatgccacttagccaggccttggtcaaggagctccacttcaactggcctcctagggcaccactcgaggtcaatctggtgcttattctcagcaccagagctagctaagccaacatagggcaacatttccagcccagccctcttgtccggctgtctgtcttgtccttgtgtgtttgtaaaatgttaagcgggctttggtgagagtcttgctctttgcttgggggaggccaaagagagggaagaggatttcttatttcttctttatgcccttgaaggacaaacaaaactttttctccacgttcagaaaagtatttcagaaccacgattgccttcctggcgtcccctcctcctgctcgttggtgaaatgaacaatatgaatgggatttaaaaggaatgcattgggcttggtaaagattttcagtttgcctttagaaaaaggacccagctgagagtaccatgatattgcttagtccatttgaacccttgcattcctagaatttcaggtaaatatgtattaaaactctacatctaggatttcagcatttcctgagtaagacctttatatgccaaaagggtttcgttttaaaaccacttgagtttatagtacaaaaacacctacaagctccctttagaaaggtcttgctattgtttctcccctttcctccccaactactatttaaaaatgat

SEQ ID NO: 144551 - DNA, 1113 bp, Artificial Sequence
  derived and/or modified sequence
atggcgtcttctactacccgaggtccgagggtatctgatttattctcaggcctgccacccgcagttaccactcctgcaaaccagtccgctgaggctagcgcgggtaacggctcagtcgcaggagcggacgcaccagcagtgacaccatttcaatccctccagttggtccatcagctgaagggacttattgtgctcctatactccgtggtcgtcgtcgtggggctggttggcaactgtttgttggtgctggtcattgcccgtgtccgacgactgcacaacgtcacgaatttcttaattggaaaccttgccctttccgacgtgctgatgtgtactgcttgcgtgcctctcaccttggcgtatgcctttgagcccagggggtgggtcttcggcggtggtctgtgtcacttggtgtttttcctgcaaccagtgaccgtgtacgtcagcgtttttactttaaccacgatcgccgtggacaggtacgtcgtcctcgtgcacccattgcgaaggagaattagcttgaggctgagcgcctatgctgttcttgccatttgggcactttccgccgtgctcgccctgcccgcagccgtgcatacctaccatgtcgagctgaaaccacacgatgttcgcctttgtgaagaattctggggttcccaggaacggcagcggcaactctatgcttggggcctcctccttgtgacgtatctgcttccactactcgtgatactgctttcctatgtccgcgtgtctgtgaaacttagaaaccgtgtcgtgcccggatgcgtgacccagtctcaggcggactgggaccgggcacggcgtcgccgtacattctgtttgttagtggtgattgtcgttgtcttcgctgtttgttggctgccactgcatgtctttaaccttctacgggacctggacccccacgctattgacccctacgcattcggcctggtgcagttgctgtgtcactggctagcaatgagcagcgcctgttataacccatttatttatgcttggcttcatgatagctttagagaagagctgagaaagctgttagttgcttggcctcggaagatcgcgcctcacgggcagaatatgacggtgtccgtggtcatctag

SEQ ID NO: 144552 - DNA, 1113 bp, Artificial Sequence
  derived and/or modified sequence
atggcttccagcacaactagaggaccaagggtcagcgatcttttttcaggccttccacctgccgtgacaacacccgctaatcagagcgccgaggcatcagccggaaatggctcagttgctggagccgacgctcccgctgttactccgttccagtcattacagttggtgcaccagctgaagggtctgattgttctcctctacagtgtggttgttgtagtgggcttggtggggaactgccttctcgtgttggtgatcgcccgtgtgagacgactgcataacgttacgaacttcctgataggcaaccttgccttgagtgacgtgcttatgtgcacagcctgcgtgcctctgacattggcatacgccttcgaacctcgcggttgggtcttcggtggcggactgtgtcacttggttttttttcttcagccagtgaccgtctacgtctccgtgtttacccttacaaccattgcggttgacagatacgtggtgctggtacacccgttgaggcgcaggattagcctacgcctgagcgcatatgccgtcctggctatctgggcgctgagtgcagtgcttgcgcttccagccgcagtgcacacttaccacgtggagctgaaaccacacgatgtgcgcctatgtgaagagttttgggggtcccaggaaaggcaaagacagctgtatgcatggggccttctgctcgtgacataccttctacccctgctcgtgatcttactttcctatgtgcgtgttagtgtgaagttgcgcaatcgagttgtgccgggatgtgtcacacagtctcaggccgactgggatagagctaggagacgacgaacgttttgcctgttggtggtgatcgttgtggtattcgccgtatgttggctccccttacacgtgttcaacttactgcgcgacctcgacccacatgccatcgacccatacgcctttggtctggtccaactgttgtgtcactggcttgcaatgtctagcgcttgttacaatccttttatctatgcctggttacatgattcttttcgggaagagttacgaaagttgcttgtggcatggcctcgcaagatcgctccacatggccagaatatgaccgttagcgtggtgatatag

SEQ ID NO: 144553 - protein, 220 aa, Artificial Sequence
  derived and/or modified sequence
MSDSEEESQDRQLKIVVLGDGASGKTSLTTCFAQETFGKQYKQTIGLDFFLRRITLPGNLNVTLQIWDIGGQTIGGKMLDKYIYGAQGVLLVYDITNYQSFENLEDWYTVVKKVSEESETQPLVALVGNKIDLEHMRTIKPEKHLRFCQENGFSSHFVSAKTGDSVFLCFQKVAAEILGIKLNKAEIEQSQRIVRAEIVKYPEEENQHTTSTQSRICSVQ

SEQ ID NO: 144554 - DNA, 663 bp, Artificial Sequence
  derived and/or modified sequence
atgagcgactccgaagaggaatcacaagacaggcagctgaagattgttgtgctgggcgatggagcttccggtaaaaccagcctgaccacttgttttgcccaagagacctttggaaaacagtacaagcagactatcggcctcgacttcttcctcaggagaatcacacttccgggaaatctgaacgtgactttgcagatttgggacataggaggccagacgattgggggcaagatgctagacaagtacatctacggtgctcagggggtgctgctggtctatgacatcaccaattaccaatcattcgaaaacttggaggactggtacaccgtggtgaagaaggtgtctgaagaaagtgaaacgcagcctctcgtagcacttgtgggtaacaaaatcgatctggaacatatgcgcacaatcaagccagaaaaacacctacggttctgccaagaaaatgggttcagcagtcactttgttagtgccaaaaccggggattctgtcttcctgtgctttcagaaggtggcggctgaaatcttggggatcaagctcaacaaagctgaaattgaacaatctcagcgcattgtgcgtgcagagatcgtcaaatatcccgaggaggagaaccaacacaccacttccactcagagtaggatttgttcagtccagtag

SEQ ID NO: 144555 - DNA, 663 bp, Artificial Sequence
  derived and/or modified sequence
atgtctgacagcgaggaggagagccaggaccggcagctgaagatcgtggtgctgggagatggagccagcggcaagaccagcctgaccacctgctttgcccaggagaccttcggcaagcagtacaagcagaccatcggcctggacttcttcctgcggcgcatcaccctgcccggcaacctgaatgtgaccctgcagatctgggacattggaggccagaccatcggcggcaagatgctggacaagtacatctacggggcccagggcgtgctgctggtgtatgacatcaccaactaccagagctttgagaacctggaggactggtacacagtggtgaagaaggtgtctgaggagagcgagacccagcccctggtggccctggtgggcaacaagattgacctggagcacatgaggaccatcaagccagagaagcacctgcgcttctgccaggagaatggcttcagcagccactttgtgtctgccaagacaggagacagcgtcttcctgtgcttccagaaggtggccgctgagatcctgggcatcaagctgaacaaggccgagattgagcagagccagagaattgtgcgggcagagatcgtgaagtacccagaggaggagaaccagcacaccaccagcacccagagccgcatctgcagcgtgcagtag

SEQ ID NO: 144556 - DNA, 663 bp, Artificial Sequence
  derived and/or modified sequence
atgagcgacagcgaggaggagagccaggaccggcagctgaagatcgttgttctgggcgacggtgcctcaggcaaaacgtccttaacaacatgcttcgcacaggaaacgttcggcaagcagtacaaacaaacaatcgggctggatttctttttacgccggattacattaccagggaacctgaacgtgacactccagatctgggacatcggtggccagaccatcgggggcaaaatgctggacaaatacatatatggagcgcagggggtccttttggtgtatgacatcaccaactaccagtctttcgaaaatcttgaggactggtacacagtggttaagaaagtgtccgaagaaagtgagactcagccactcgtagccctggtaggtaacaaaatagatctggagcacatgaggacaattaaacctgagaaacatttgagattctgtcaagagaatggattttccagccacttcgtatctgccaaaacaggagatagtgtttttctttgttttcagaaggtggctgccgaaatcctcggaataaagctcaacaaggcagagatcgaacagtcccagcgaatcgtacgagccgagatcgtgaaatatcccgaggaggagaaccaacataccacctcaacccagtccaggatatgtagcgtccagtag

SEQ ID NO: 144557 - DNA, 663 bp, Artificial Sequence
  derived and/or modified sequence
atgagcgacagcgaggaggagtctcaggatcgccaactgaagatcgtggtattgggggacggagcctcagggaagacctctctcactacatgtttcgcacaggaaacatttggaaagcagtacaaacagacaatcggactagattttttccttaggcgcataacacttcctggcaatctgaacgttaccctccaaatctgggacatcggcggacagacaatcggcggaaaaatgctggacaaatacatctacggggctcagggggttctgctggtatacgatattactaattaccagtcctttgaaaacctggaggactggtacacagtggttaagaaggtgagcgaggagtccgagacccagcctctggtggcgctggtgggcaacaaaattgacttagagcacatgagaacaatcaaacccgagaagcacctccgcttctgtcaagaaaacgggttctcctctcatttcgttagcgctaagactggggatagcgtcttcctgtgttttcaaaaagtggcagctgagattctgggaattaaactgaacaaggcagaaattgagcagtcacagagaattgtgcgcgctgaaatcgtgaaataccctgaagaggagaatcaacacaccactagcactcagagcagaatatgtagcgtgcaatag

SEQ ID NO: 144558 - DNA, 1810 bp, Artificial Sequence
  derived and/or modified sequence
gtgcgcgtagggggcggggccgcgcgcagagggcggggaggtgggcaagatggcgcttgccgagtgattctcctcgaatacctcctgccggcgcggagacaccggggcgggggtcctgccgcaactacctcccttcctcctctcccccgcccccggagccttcatccttcccttccccccccacctcgaggggcgggcctggttcccgggacaccatgtcggactctgaggaggagagccaggaccggcaactgaaaatcgtcgtgctgggggacggcgcctccgggaagacctccttaactacgtgttttgctcaagaaacttttgggaaacagtacaaacaaactataggactggatttctttttgagaaggataacattgccaggaaacttgaatgttacccttcaaatttgggatataggagggcagacaataggaggcaaaatgttggataaatatatctatggagcacagggagtcctcttggtatatgatattacaaattatcaaagctttgagaatttagaagattggtatactgtggtgaagaaagtgagcgaggagtcagaaactcagccactggttgccttggtaggcaataaaattgatttggagcatatgcgaacaataaaacctgaaaaacacttacggttttgccaggaaaatggttttagtagccactttgtctcagccaagacaggagactctgtcttcctgtgctttcagaaagttgctgctgaaatccttgggatcaaattaaacaaagcagaaatagaacagtcacagcgtattgtcagggcagaaatagtgaagtacccggaagaagaaaatcaacataccacctctactcagagtagaatctgttcagtacagtagtgcagagggtggtgaaggcagatattgtaaactacaaccaggaacctatgtcaaggactgttaaccctcctagaagctctatgtgtgcagttcagtgagcgcatttttcttttgtgttgatagttctggctgcccttcacctctgggtgggcccgaggacttctaggaacttgttttatcagtgaccatctctgtagttcagttaacactttactcccaacttgcttcatcattgctattgcctcacagtggcaggcagctccttggatttgaaagaattcaactttgggaccacacactttgaattcaaaatggaaaacccattccctggaattagactgcttcattgcaaaagaatgatgttgtttctttgtatgtccttgcttcttttttcattgatgtaaatttttttaacttaatatgaaaactctccaagtcttgatcatcagccaggattttgccacagcaatttcattctcttatcggaacttgtatgtgtcaaagtatacttcagagtgcaaacattaagcaagtaatatattttacctacagatacttatgaagacattctttcgctatcgtgagtaaaagtatataaagctgtttctaactgaaaatgcttgaaataagcctgtaatagaaatattttttcattttttaaaaaagggcctaaattgtttatattgtagtttgtaactcacaaagtaatatttgatattgtatttttattactgtatcgttgtcgttatgtattgtgtaatactcaggtttgaaggctttctgaattctgataaatgttcagctgatgctccacgtggaatttctcttgcaaactgcataagagtactcccgagaatgagttatgacattgtggatcagactgtacctgatgttcagatgtttttctttcacaaataaacttatttaaatta

SEQ ID NO: 144559 - DNA, 663 bp, Artificial Sequence
  derived and/or modified sequence
atgagcgacagcgaggaggagagccaggacagacagctgaagatcgtggtgctgggcgacggcgccagcggcaagaccagcctgaccacctgcttcgcccaggagaccttcggcaagcagtacaagcagaccatcggcctggacttcttcctgagaagaatcaccctgcccggcaacctgaacgtgaccctgcagatctgggacatcggcggccagaccatcggcggcaagatgctggacaagtacatctacggcgcccagggcgtgctgctggtgtacgacatcaccaactaccagagcttcgagaacctggaggactggtacaccgtggtgaagaaggtgagcgaggagagcgagacccagcccctggtggccctggtgggcaacaagatcgacctggagcacatgagaaccatcaagcccgagaagcacctgagattctgccaggagaacggcttcagcagccacttcgtgagcgccaagaccggcgacagcgtgttcctgtgcttccagaaggtggccgccgagatcctgggcatcaagctgaacaaggccgagatcgagcagagccagagaatcgtgagagccgagatcgtgaagtaccccgaggaggagaaccagcacaccaccagcacccagagcagaatctgcagcgtgcagtag

SEQ ID NO: 144560 - protein, 358 aa, Artificial Sequence
  derived and/or modified sequence
MSADAAAGAPLPRLCCLEKGPNGYGFHLHGEKGKLGQYIRLVEPGSPAEKAGLLAGDRLVEVNGENVEKETHQQVVSRIRAALNAVRLLVVDPETDEQLQKLGVQVREELLRAQEAPGQAEPPAAAEVQGAGNENEPREADKSHPEQRELRPRLCTMKKGPSGYGFNLHSDKSKPGQFIRSVDPDSPAEASGLRAQDRIVEVNGVCMEGKQHGDVVSAIRAGGDETKLLVVDRETDEFFKKCRVIPSQEHLNGPLPVPFTNGEIQKENSREALAEAALESPRPALVRSASSDTSEELNSQDSPPKQDSTAPSSTSSSDPILDFNISLAMAKERAHQKRSSKRAPQMDWSKKNELFSNL

SEQ ID NO: 144561 - protein, 273 aa, Artificial Sequence
  derived and/or modified sequence
MSADAAAGAPLPRLCCLEKETHQQVVSRIRAALNAVRLLVVDPETDEQLQKLGVQVREELLRAQEAPGQAEPPAAAEVQGAGNENEPREADKSHPEQRELRPRLCTMKKGPSGYGFNLHSDKSKPGQFIRSVDPDSPAEASGLRAQDRIVEVNGVCMEGKQHGDVVSAIRAGGDGSGGGNQRGAEFPRQPPKTGLHSALVYLLLRPHPRLQHLPGHGQREGPPETQQQTGPADGLEQEKRTLQQPLSALLPPSDWQGRASIPPHLFPSPQLLP

SEQ ID NO: 144562 - DNA, 1077 bp, Artificial Sequence
  derived and/or modified sequence
atgagcgccgacgccgccgccggcgcccccctgcccagactgtgctgcctggagaagggccccaacggctacggcttccacctgcacggcgagaagggcaagctgggccagtacatcagactggtggagcccggcagccccgccgagaaggccggcctgctggccggcgacagactggtggaggtgaacggcgagaacgtggagaaggagacccaccagcaggtggtgagcagaatcagagccgccctgaacgccgtgagactgctggtggtggaccccgagaccgacgagcagctgcagaagctgggcgtgcaggtgagagaggagctgctgagagcccaggaggcccccggccaggccgagccccccgccgccgccgaggtgcagggcgccggcaacgagaacgagcccagagaggccgacaagagccaccccgagcagagagagctgagacccagactgtgcaccatgaagaagggccccagcggctacggcttcaacctgcacagcgacaagagcaagcccggccagttcatcagaagcgtggaccccgacagccccgccgaggccagcggcctgagagcccaggacagaatcgtggaggtgaacggcgtgtgcatggagggcaagcagcacggcgacgtggtgagcgccatcagagccggcggcgacgagaccaagctgctggtggtggacagagagaccgacgagttcttcaagaagtgcagagtgatccccagccaggagcacctgaacggccccctgcccgtgcccttcaccaacggcgagatccagaaggagaacagcagagaggccctggccgaggccgccctggagagccccagacccgccctggtgagaagcgccagcagcgacaccagcgaggagctgaacagccaggacagcccccccaagcaggacagcaccgcccccagcagcaccagcagcagcgaccccatcctggacttcaacatcagcctggccatggccaaggagagagcccaccagaagagaagcagcaagagagccccccagatggactggagcaagaagaacgagctgttcagcaacctgtag

SEQ ID NO: 144563 - DNA, 822 bp, Artificial Sequence
  derived and/or modified sequence
atgagcgccgacgccgccgccggcgcccccctgcccagactgtgctgcctggagaaggagacccaccagcaggtggtgagcagaatcagagccgccctgaacgccgtgagactgctggtggtggaccccgagaccgacgagcagctgcagaagctgggcgtgcaggtgagagaggagctgctgagagcccaggaggcccccggccaggccgagccccccgccgccgccgaggtgcagggcgccggcaacgagaacgagcccagagaggccgacaagagccaccccgagcagagagagctgagacccagactgtgcaccatgaagaagggccccagcggctacggcttcaacctgcacagcgacaagagcaagcccggccagttcatcagaagcgtggaccccgacagccccgccgaggccagcggcctgagagcccaggacagaatcgtggaggtgaacggcgtgtgcatggagggcaagcagcacggcgacgtggtgagcgccatcagagccggcggcgacggcagcggcggcggcaaccagagaggcgccgagttccccagacagccccccaagaccggcctgcacagcgccctggtgtacctgctgctgagaccccaccccagactgcagcacctgcccggccacggccagagagagggcccccccgagacccagcagcagaccggccccgccgacggcctggagcaggagaagagaaccctgcagcagcccctgagcgccctgctgccccccagcgactggcagggcagagccagcatccccccccacctgttccccagcccccagctgctgccctag

SEQ ID NO: 144564 - DNA, 1077 bp, Artificial Sequence
  derived and/or modified sequence
atgtccgctgatgctgctgccggtgctccccttccaagattgtgttgtttggagaagggacctaatggctacggcttccacttgcacggggagaagggcaaactggggcagtacatcaggcttgttgagccaggatccccggcggagaaagcgggactcttggccggagatcgattggtggaggtgaatggagaaaatgtggagaaggagacacatcagcaggtggtgtctcggatcagagcggccctgaatgcggtgagactcctggtggtagatccagagactgatgagcagctccagaagctgggcgtgcaggtccgagaagagctcttgcgggcccaggaagctccgggccaggccgagccccccgccgctgctgaagtccaaggcgccggaaatgaaaatgaaccacgggaggccgataagtcgcaccccgagcagcgcgaactgagacccaggttgtgtacaatgaagaagggcccgtcaggctatgggttcaacctacacagtgacaagtccaagcctggtcaattcataagaagcgtggacccggattctccagccgaagctagcggcttaagggcgcaagatcgcattgtggaggtaaatggagtgtgcatggaaggaaaacagcacggagatgtggtcagtgctattcgggcagggggagacgagactaagctcctggtcgtcgaccgagaaaccgacgagttcttcaaaaaatgcagagtgattcccagccaggagcacctgaatgggcccttgcccgttcccttcactaacggagaaattcagaaagagaactctcgcgaggctttggcggaagccgcactggaatccccaaggccagctttggtaaggagtgcgtcctccgatacaagcgaagagctcaattctcaagatagccccccgaaacaggacagtacagcacccagctctacctctagcagcgaccccatcctcgacttcaacattagcctggccatggccaaagagcgggcacatcaaaaacgatcttccaagcgcgctccccagatggattggtctaagaagaacgagctgttttctaatctctag

SEQ ID NO: 144565 - DNA, 822 bp, Artificial Sequence
  derived and/or modified sequence
atgagcgctgacgcggcagccggtgctccactccccagattgtgttgtctggagaaagagacccatcaacaggtcgtcagtaggatccgcgcagccttgaatgccgtccgccttctggtggttgatcccgagactgatgagcagcttcagaagctcggagtacaggtcagggaggagctgctccgtgcccaggaggcccccggccaggccgagcccccagcggcagctgaagtccaaggggccggaaatgagaacgaacctcgcgaagctgataagagccaccccgaacagagggaactgaggccacggctgtgtactatgaagaagggcccctccggttacggatttaatttgcactctgataaatcgaagccaggacagtttatcagaagtgtggatccagacagtccagccgaggccagcgggctgcgagcgcaggataggatcgtggaggtcaacggggtgtgtatggaagggaagcagcacggggacgtcgtcagcgccatcagagcaggcggagatgggagcggaggtggtaaccagcgcggggccgagtttccacgccaaccgccgaagaccgggctgcactcagccctggtgtacctgttgttgaggcctcatcctagactgcagcacctccccggacacggacagcgtgaggggcctcccgaaacacaacagcaaacagggcctgcagatggactggaacaggagaaaagaacactgcagcagcctctctctgcactgctgccaccttccgactggcagggccgagcttcaatccctcctcatctattcccatctcctcagctccttccttag

SEQ ID NO: 144566 - DNA, 1077 bp, Artificial Sequence
  derived and/or modified sequence
atgtctgcagatgctgctgctggggcccccctgccccggctgtgctgcctggagaagggccccaacggctacggcttccacctgcatggagagaagggcaagctgggccagtacatccggctggtggagcccggcagccctgctgagaaggccggcctgctggccggggaccggctggtggaggtgaatggagaaaatgtggagaaggagacccaccagcaggtggtgagccgcatccgggccgccctgaatgctgtgcggctgctggtggtggaccctgagacagatgagcagctgcagaagctgggcgtgcaggtgcgggaggagctgctgcgggcccaggaggcccctggccaggccgagcccccagctgctgctgaggtgcagggcgctggaaatgaaaatgagccccgggaggccgacaagagccaccctgagcagcgggagctgcggccccggctgtgcaccatgaagaagggccccagcggctacggcttcaacctgcacagcgacaagagcaagccaggccagttcatccgctctgtggaccctgacagccctgctgaggccagcggcctgcgggcccaggacagaattgtggaggtgaatggagtgtgcatggagggcaagcagcacggagatgtggtgtctgccatccgggctggaggagatgagaccaagctgctggtggtggaccgggagacagatgagttcttcaagaagtgcagggtcatccccagccaggagcacctgaatggccccctgcctgtgcccttcaccaatggagagatccagaaggagaacagccgggaggccctggccgaggccgccctggagagccccaggcctgccctggtgcgcagcgccagcagtgacaccagcgaggagctgaacagccaggacagcccccccaagcaggacagcacagcccccagcagcaccagcagcagtgaccccatcctggacttcaacatcagcctggccatggccaaggagcgggcccaccagaagaggagcagcaagagggccccccagatggactggagcaagaagaatgagctgttcagcaacctgtag

SEQ ID NO: 144567 - DNA, 822 bp, Artificial Sequence
  derived and/or modified sequence
atgtctgcagatgctgctgctggggcccccctgccccggctgtgctgcctggagaaggagacccaccagcaggtggtgagccgcatccgggccgccctgaatgctgtgcggctgctggtggtggaccctgagacagatgagcagctgcagaagctgggcgtgcaggtgcgggaggagctgctgcgggcccaggaggcccctggccaggccgagcccccagctgctgctgaggtgcagggcgctggaaatgaaaatgagccccgggaggccgacaagagccaccctgagcagcgggagctgcggccccggctgtgcaccatgaagaagggccccagcggctacggcttcaacctgcacagcgacaagagcaagccaggccagttcatccgctctgtggaccctgacagccctgctgaggccagcggcctgcgggcccaggacagaattgtggaggtgaatggagtgtgcatggagggcaagcagcacggagatgtggtgtctgccatccgggctggaggagatggcagcggcggcggcaaccagagaggagctgagttcccccggcagccccccaagacaggcctgcacagcgccctggtgtacctgctgctgcggccccacccccggctgcagcacctgcccggccacggccagcgggagggccccccagagacccagcagcagacaggccctgcagatggcctggagcaggagaagaggaccctgcagcagcccctgagcgccctgctgcccccaagtgactggcagggccgggccagcatccccccccacctgttccccagcccccagctgctgccctag

SEQ ID NO: 144568 - DNA, 1077 bp, Artificial Sequence
  derived and/or modified sequence
atgagcgccgacgccgccgccggcgcccccctgccccggctgtgctgccttgagaaaggtccaaacggatacggttttcacctgcatggcgagaagggcaagctggggcagtacatacgattggtggagcccgggtccccagctgagaaggctggcctgttggcaggcgaccgactcgtagaagtcaatggggagaacgtggaaaaggagacgcaccagcaggttgtatcaagaatccgagcagcactgaacgctgtaaggctcctcgtggtggaccctgagacagatgagcagctgcagaaacttggtgtgcaagtcagagaagaactcctgagggctcaggaagcaccaggccaggcagagcccccggctgcagccgaggtccaaggggcaggaaatgaaaacgagcctcgcgaggccgacaaatcccacccggaacagcgcgaactgaggccaaggctatgtacgatgaaaaaaggccccagtggctatggcttcaatcttcactctgacaaatctaagcccggccagttcatccgcagtgtggaccctgactctccagcggaagcaagtggcctgcgtgcccaggatcgcattgtcgaagtcaacggagtctgcatggaggggaagcagcatggagacgttgtgagcgcaattagagcggggggcgatgaaactaaattattggtagtggacagagagaccgatgaattttttaaaaaatgccgtgtcataccatcccaagaacacctgaacgggccgctgcctgtgcccttcaccaatggggagatccagaaggaaaactcacgggaggctctggcagaagctgcactagagagcccgcgcccagctttggtcagaagcgcctcgtccgatacctctgaggaacttaattctcaggactctccacctaagcaggactcaactgcacccagtagcacaagtagctcagaccccatcctggatttcaacatctcacttgccatggcaaaggagcgggcacaccagaagcgtagctccaaaagagccccgcagatggactggtcgaagaaaaacgagctgtttagcaatctgtag

SEQ ID NO: 144569 - DNA, 822 bp, Artificial Sequence
  derived and/or modified sequence
atgagcgccgacgccgccgccggcgcccccctgccccggctgtgctgtctggagaaggaaacgcaccagcaggtggtatccaggattagagcagcccttaacgcggttcggttgctcgtagttgatcctgagactgacgaacagctgcagaaactgggggtccaagtgcgcgaggagttactgcgcgcccaggaagccccaggacaggccgaaccacccgctgccgccgaagtgcagggggcaggaaacgagaacgagcccagagaagctgacaaaagtcatccagaacagcgagagttgaggcctcgactttgcaccatgaagaagggaccatccggatacgggtttaacctgcacagcgataagtccaaaccgggacaattcattcggtccgtggacccagattcgccggctgaagcatctggccttcgggcacaggataggattgttgaggtgaacggcgtgtgtatggaaggtaagcagcacggcgacgtcgtttccgccatcagagctggcggtgatggttccgggggggggaatcagagaggcgccgagttcccccgacagccccccaagaccggattacatagcgctttggtgtatttgttgctgcggccacacccaagactccagcatttgcctggacacgggcagcgggagggtcctccagagacccaacagcaaaccggacctgccgatggcctggaacaggagaaacggaccctgcagcaacccttgtccgcgctgctgcccccgtctgactggcaaggcagggcgtccatacctccacacctctttcctagccctcaactgctgccctag

SEQ ID NO: 144570 - DNA, 1077 bp, Artificial Sequence
  derived and/or modified sequence
atgtcagccgacgccgctgctggcgcacccctgccgaggctttgctgcctcgaaaaagggccaaatggctatggcttccaccttcacggcgagaagggtaaactgggacagtacattcgtctggtcgaacccggtagccccgctgaaaaggctggccttctggcaggggacaggttggtggaggtcaatggcgagaacgtggagaaggaaacccatcagcaagtggtgagccgaatacgcgctgcactgaatgccgtgcggctgctcgtggtggatcctgagacagatgaacaactgcaaaagctgggagtccaggtcagggaggagttgctgcgagcgcaggaagcccctggccaggctgagccccctgccgcagccgaggtgcagggtgcaggcaatgaaaacgagccacgggaagctgacaaatcccatcccgaacagagagagctaagacctagactgtgtacaatgaagaaaggccctagcggatatggattcaatctgcacagcgacaagagcaaaccaggccagttcattagatcagtagaccctgactcccctgcagaggcctccgggctccgtgctcaggataggatcgtggaggtaaacggggtctgcatggagggcaagcagcacggagatgtggtctccgcgattcgagctggaggggacgagaccaaactgctcgttgttgaccgggaaaccgatgagttctttaagaaatgccgtgttatccctagccaggaacacctcaatggaccattaccggttcctttcactaatggtgagatccagaaggaaaatagtcgggaagccctggcagaggccgcactagaatctcccagacctgctctcgttagaagtgctagcagcgacacttccgaagagctaaattcccaggactcccctcccaagcaggactccaccgcccctagttccacgtcaagttcagatcctatactggattttaacatttccctcgctatggcaaaggagcgggcacatcagaaaaggtctagtaaacgcgcacctcaaatggactggagcaagaaaaatgaactgttttctaatttgtag

SEQ ID NO: 144571 - DNA, 822 bp, Artificial Sequence
  derived and/or modified sequence
atgtcggctgacgcggctgcaggcgctcccttgcctcgcttgtgctgcctggagaaggaaacccaccagcaggtggtaagcagaattagggctgcgctgaacgctgtgcgcctcctagtcgtagaccccgaaaccgacgaacaactacagaagttgggagttcaggttcgggaagaactgctaagagcccaggaggcgcctggtcaggccgaacctcctgcggcagccgaggtgcaaggtgcaggcaatgagaacgaacccagggaggccgataagagtcatcccgagcagagggaactgaggccacggttgtgtaccatgaagaaggggccaagcgggtacggtttcaacctgcactctgacaaatccaaacctggacagtttattcgttccgttgaccccgactcccctgctgaagctagcggacttagggcccaggataggattgtcgaggtcaacggggtgtgcatggaaggcaagcaacacggggacgtcgtatcagccattcgggcaggaggcgatggaagtggagggggaaaccagcgaggtgccgaattcccaagacagccaccgaagacaggacttcacagtgcactggtctacctcctattgagaccccaccccaggctccagcacctgcccggacacgggcagcgcgaaggacccccagaaacacaacagcagaccgggccagccgacgggctcgaacaggagaagcgtacactgcaacaaccactttccgccctgttgccaccgagtgactggcaggggagggcctctatcccgccacacctgtttccatccccccagttactcccttag

SEQ ID NO: 144572 - DNA, 2003 bp, Artificial Sequence
  derived and/or modified sequence
gctcagacgccgcgcggggcggggattggtctgtggtcctctctcggctcctcgcggctcgcggcggccgacggttcctgggacacctgcttgcttggcccgtccggcggctcagggcttctctgctgcgctcccggttcgctggacgggaagaagggctgggccgtcccgtcccgtccccatcggaaccccaagtcgcgccgctgacccgtcgcagggcgagatgagcgcggacgcagcggccggggcgcccctgccccggctctgctgcctggagaagggtccgaacggctacggcttccacctgcacggggagaagggcaagttgggccagtacatccggctggtggagcccggctcgccggccgagaaggcggggctgctggcgggggaccggctggtggaggtgaacggcgaaaacgtggagaaggagacccaccagcaggtggtgagccgcatccgcgccgcactcaacgccgtgcgcctgctggtggtcgaccccgagacggacgagcagctgcagaagctcggcgtccaggtccgagaggagctgctgcgcgcccaggaagcgccggggcaggccgagccgccggccgccgccgaggtgcagggggctggcaacgaaaatgagcctcgcgaggccgacaagagccacccggagcagcgcgagcttcggcctcggctctgtaccatgaagaagggccccagtggctatggcttcaacctgcacagcgacaagtccaagccaggccagttcatccggtcagtggacccagactccccggctgaggcttcagggctccgggcccaggatcgcattgtggaggtgaacggggtctgcatggaggggaagcagcatggggacgtggtgtccgccatcagggctggcggggacgagaccaagctgctggtggtggacagggaaactgacgagttcttcaagaaatgcagagtgatcccatctcaggagcacctgaatggtcccctgcctgtgcccttcaccaatggggagatacagaaggagaacagtcgtgaagccctggcagaggcagccttggagagccccaggccagccctggtgagatccgcctccagtgacaccagcgaggagctgaattcccaagacagccccccaaaacaggactccacagcgccctcgtctacctcctcctccgaccccatcctagacttcaacatctccctggccatggccaaagagagggcccaccagaaacgcagcagcaaacgggccccgcagatggactggagcaagaaaaacgaactcttcagcaacctctgagcgccctgctgccacccagtgactggcagggccgagccagcattccaccccacctttttccttctccccaattactcccctgaatcaatgtacaaatcagcacccacatcccctttcttgacaaatgatttttctagagaactatgttcttccctgactttagggaaggtgaatgtgttcccgtcctcccgcagtcagaaaggagactctgcctccctcctcctcactgagtgcctcatcctaccgggtgtccctttgccaccctgcctgggacatcgctggaacctgcaccatgccaggatcatgggaccaggcgagagggcaccctcccttcctcccccatgtgataaatgggtccagggctgatcaaagaactctgactgcagaactgccgctctcagtggacagggcatctgttaccctgagacctgtggcagacacgtcttgttttcatttgatttttgttaagagtgcagtattgcagagtctagaggaatttttgtttccttgattaacatgattttcctggttgttacatccagggcatggcagtggcctcagccttaaacttttgttcctactcccaccctcagcgaactgggcagcacggggagggtttggctacccctgcccatccctgagccaggtaccaccattgtaaggaaacactttcagaaattcagctggttcctccaaacccttc

SEQ ID NO: 144573 - DNA, 1433 bp, Artificial Sequence
  derived and/or modified sequence
atgagcgcggacgcagcggccggggcgcccctgccccggctctgctgcctggagaaggagacccaccagcaggtggtgagccgcatccgcgccgcactcaacgccgtgcgcctgctggtggtcgaccccgagacggacgagcagctgcagaagctcggcgtccaggtccgagaggagctgctgcgcgcccaggaagcgccggggcaggccgagccgccggccgccgccgaggtgcagggggctggcaacgaaaatgagcctcgcgaggccgacaagagccacccggagcagcgcgagcttcggcctcggctctgtaccatgaagaagggccccagtggctatggcttcaacctgcacagcgacaagtccaagccaggccagttcatccggtcagtggacccagactccccggctgaggcttcagggctccgggcccaggatcgcattgtggaggtgaacggggtctgcatggaggggaagcagcatggggacgtggtgtccgccatcagggctggcggggacggctcaggaggtgggaaccagcgaggagctgaattcccaagacagccccccaaaacaggactccacagcgccctcgtctacctcctcctccgaccccatcctagacttcaacatctccctggccatggccaaagagagggcccaccagaaacgcagcagcaaacgggccccgcagatggactggagcaagaaaaacgaactcttcagcaacctctgagcgccctgctgccacccagtgactggcagggccgagccagcattccaccccacctttttccttctccccaattactcccctgaatcaatgtacaaatcagcacccacatcccctttcttgacaaatgatttttctagagaactatgttcttccctgactttagggaaggtgaatgtgttcccgtcctcccgcagtcagaaaggagactctgcctccctcctcctcactgagtgcctcatcctaccgggtgtccctttgccaccctgcctgggacatcgctggaacctgcaccatgccaggatcatgggaccaggcgagagggcaccctcccttcctcccccatgtgataaatgggtccagggctgatcaaagaactctgactgcagaactgccgctctcagtggacagggcatctgttaccctgagacctgtggcagacacgtcttgttttcatttgatttttgttaagagtgcagtattgcagagtctagaggaatttttgtttccttgattaacatgattttcctggttgttacatccagggcatggcagtggcctcagccttaaacttttgttcctactcccaccctcagcgaactgggcagcacggggagggtttggctacccctgcccatccctgagccaggtaccaccattgtaaggaaacactttcagaaattcagctggttcctcc

SEQ ID NO: 144574 - protein, 150 aa, Artificial Sequence
  derived and/or modified sequence
MLGAALRRCAVAATTRADPRGLLHSARTPGPAVAIQSVRCYSHGSQETDEEFDARWVTYFNKPDIDAWELRKGINTLVTYDMVPEPKIIDAALRACRRLNDFASTVRILEVVKDKAGPHKEIYPYVIQELRPTLNELGISTPEELGLDKV

SEQ ID NO: 144575 - DNA, 453 bp, Artificial Sequence
  derived and/or modified sequence
atgctgggcgccgccctgagaagatgcgccgtggccgccaccaccagagccgaccccagaggcctgctgcacagcgccagaacccccggccccgccgtggccatccagagcgtgagatgctacagccacggcagccaggagaccgacgaggagttcgacgccagatgggtgacctacttcaacaagcccgacatcgacgcctgggagctgagaaagggcatcaacaccctggtgacctacgacatggtgcccgagcccaagatcatcgacgccgccctgagagcctgcagaagactgaacgacttcgccagcaccgtgagaatcctggaggtggtgaaggacaaggccggcccccacaaggagatctacccctacgtgatccaggagctgagacccaccctgaacgagctgggcatcagcacccccgaggagctgggcctggacaaggtgtag

SEQ ID NO: 144576 - DNA, 1268 bp, Artificial Sequence
  derived and/or modified sequence
cggtggctcctcccgcccacgcgccagagtcgcagtgggcgggcctacgtgctccgcccgctgtgagcctgtccggcccccgcccgctccggagcaacccgcgagcttacaccggcttctctctgtcctcagcccgcgcgccgccatcgccgtcatgctgggcgccgctctccgccgctgcgctgtggccgcaaccacccgggccgaccctcgaggcctcctgcactccgcccggacccccggccccgccgtggctatccagtcagttcgctgctattcccatgggtcacaggagacagatgaggagtttgatgctcgctgggtaacatacttcaacaagccagatatagatgcctgggaattgcgtaaagggataaacacacttgttacctatgatatggttccagagcccaaaatcattgatgctgctttgcgggcatgcagacggttaaatgattttgctagtacagttcgtatcctagaggttgttaaggacaaagcaggacctcataaggaaatctacccctatgtcatccaggaacttagaccaactttaaatgaactgggaatctccactccggaggaactgggccttgacaaagtgtaaaccgcatggatgggcttccccaaggatttattgacattgctacttgagtgtgaacagttacctggaaatactgatgataacatattaccttatttgaacaagttttcctttattgagtaccaagccatgtaatggtaacttggactttaataaaagggaaatgagtttgaactgaaattaggtatttgtttcatgtgtttgcattaataagcagaaaattaagtgctgtattggtttcatggttttgctgccctcttacatgctgagagaactgtgttaattctctggaaaccatctgacatgaaaatcagcttcattaatatgtttgggtgccctagcttgtaaattagctgaaggctagaagtcatttatatagaattttcttgttgacaccctaggcttaggggactggttgtctgtggggatagatcaaattgtgtacctttccaaaacaggttttaatgatgtttaaaagtggtcactgagatagtcttgaggatgtgctatgcagtagccaagccctcttacggtgtgttcctctcttagtgcccctttcctttcctacctgttcttcccttgcagtggtgtattagccttggacattaaaacatttgctttgtaaatttggaggcattctgattaaacagctgagtaaaacaaa

SEQ ID NO: 144577 - DNA, 453 bp, Artificial Sequence
  derived and/or modified sequence
atgctcggcgcggctctgcggcggtgcgctgttgcagcaactacaagggcagaccccaggggcctcctccacagcgccaggacacctgggcctgctgtcgccatacagtccgttcggtgctattcccacgggtcgcaggagacagacgaggagtttgatgctcggtgggtcacatatttcaataagcccgatatcgacgcctgggagttacgaaaaggaatcaacacgctggttacctatgacatggtccctgagcctaagataatcgatgcagctttgcgcgcatgccgcagactcaatgactttgccagcactgtgcgcattctagaggtagtgaaggacaaggctgggccacacaaggagatttacccatacgtaattcaggaactgcgccccacactgaacgagctgggaatctcaacaccagaggaactaggcctggacaaagtctag

SEQ ID NO: 144578 - DNA, 453 bp, Artificial Sequence
  derived and/or modified sequence
atgctgggcgccgccctgcggcgctgtgctgtggccgccaccaccagggctgacccccggggcctgctgcacagcgcccggaccccaggccctgctgtggccatccagagcgtgcgctgctacagccacggcagccaggagacagatgaggagtttgatgcccgctgggtgacctacttcaacaagccagacattgatgcctgggagctgaggaagggcatcaacaccctggtgacctatgacatggtgcctgagcccaagatcattgatgctgccctgcgggcctgccggcggctgaatgactttgccagcacagtgcgcatcctggaggtggtgaaggacaaggccggcccccacaaggagatctacccctacgtgatccaggagctgcggcccaccctgaatgagctgggcatcagcaccccagaggagctgggcctggacaaggtgtag

SEQ ID NO: 144579 - DNA, 453 bp, Artificial Sequence
  derived and/or modified sequence
atgctgggcgccgccctgcggcggtgcgccgtggccgccaccacccgcgctgatcctagaggcctgttacactccgcaaggacgccggggcccgcagttgctatacagtcagtacggtgctacagccacggatcccaggagacagacgaggagttcgacgcgagatgggtgacctacttcaataagcccgatattgacgcctgggagctccgcaaaggaataaatacactagtcacctatgacatggtgccagaacctaaaatcattgacgctgctcttcgggcttgtagacggctgaatgactttgcaagtacagtcagaatcctggaagttgttaaggacaaggcgggcccacacaaagaaatctatccttatgtgatccaggagcttaggccaactctgaatgagctggggatcagcaccccagaagaattaggtttggataaggtctag

SEQ ID NO: 144580 - DNA, 453 bp, Artificial Sequence
  derived and/or modified sequence
atgctaggagcagcccttcgccgatgtgccgtcgccgctaccactagggctgatccgaggggcctgttgcattcagcgcgaactcccggtccagccgtcgcaattcagtcagtgcgttgttactcccatgggagccaagagacagacgaggagtttgacgctcggtgggtgacctatttcaacaagccggatatagatgcttgggagctgaggaagggcatcaacacgctggtgacttacgacatggtgcccgagccaaagataatcgacgccgcattgcgagcttgccggagactcaacgattttgcttcaacggtgcgcatcctggaggtcgtgaaggataaggctgggccacacaaggaaatttacccctacgttatccaggagttacgcccaacattgaacgagctcggtattagtacgcccgaagaactgggactggataaggtttag

SEQ ID NO: 144581 - protein, 551 aa, Artificial Sequence
  derived and/or modified sequence
MAQFVQVLAEIGDFGRFQIQLLILLCVLNFLSPFYFFAHVFMVLDEPHHCAVAWVKNHTFNLSAAEQLVLSVPLDTAGHPEPCLMFRPPPANASLQDILSHRFNETQPCDMGWEYPENRLPSLKNEFNLVCDRKHLKDTTQSVFMAGLLVGTLMFGPLCDRIGRKATILAQLLLFTLIGLATAFVPSFELYMALRFAVATAVAGLSFSNVTLLTEWVGPSWRTQAVVLAQCNFSLGQMVLAGLAYGFRNWRLLQITGTAPGLLLFFYFWALPESARWLLTRGRMDEAIQLIQKAASVNRRKLSPELMNQLVPEKTGPSGNALDLFRHPQLRKVTLIIFCVWFVDSLGYYGLSLQVGDFGLDVYLTQLIFGAVEVPARCSSIFMMQRFGRKWSQLGTLVLGGLMCIIIIFIPADLPVVVTMLAVVGKMATAAAFTISYVYSAELFPTILRQTGMGLVGIFSRIGGILTPLVILLGEYHAALPMLIYGSLPIVAGLLCTLLPETHGQGLKDTLQDLELGPHPRSPKSVPSEKETEAKGRTSSPGVAFVSSTYF

SEQ ID NO: 144582 - protein, 205 aa, Artificial Sequence
  derived and/or modified sequence
MVLDEPHHCAVAWVKNHTFNLSAAEQLVLSVPLDTAGHPEPCLMFRPPPANASLQDILSHRFNETQPCDMGWEYPENRLPSLKNEFNLVCDRKHLKDTTQSVFMAGLLVGTLMFGPLCDRDRMGGALMEDAGRGPGPVQLLPRADGACGTRLRFPQLEAPSDHRHCAWLTALLLLLGSARICTLAPDPWEDGRGDTTDPEGGLGQ

SEQ ID NO: 144583 - DNA, 1656 bp, Artificial Sequence
  derived and/or modified sequence
atggcccagttcgtgcaggtgctggccgagatcggcgacttcggcagattccagatccagctgctgatcctgctgtgcgtgctgaacttcctgagccccttctacttcttcgcccacgtgttcatggtgctggacgagccccaccactgcgccgtggcctgggtgaagaaccacaccttcaacctgagcgccgccgagcagctggtgctgagcgtgcccctggacaccgccggccaccccgagccctgcctgatgttcagacccccccccgccaacgccagcctgcaggacatcctgagccacagattcaacgagacccagccctgcgacatgggctgggagtaccccgagaacagactgcccagcctgaagaacgagttcaacctggtgtgcgacagaaagcacctgaaggacaccacccagagcgtgttcatggccggcctgctggtgggcaccctgatgttcggccccctgtgcgacagaatcggcagaaaggccaccatcctggcccagctgctgctgttcaccctgatcggcctggccaccgccttcgtgcccagcttcgagctgtacatggccctgagattcgccgtggccaccgccgtggccggcctgagcttcagcaacgtgaccctgctgaccgagtgggtgggccccagctggagaacccaggccgtggtgctggcccagtgcaacttcagcctgggccagatggtgctggccggcctggcctacggcttcagaaactggagactgctgcagatcaccggcaccgcccccggcctgctgctgttcttctacttctgggccctgcccgagagcgccagatggctgctgaccagaggcagaatggacgaggccatccagctgatccagaaggccgccagcgtgaacagaagaaagctgagccccgagctgatgaaccagctggtgcccgagaagaccggccccagcggcaacgccctggacctgttcagacacccccagctgagaaaggtgaccctgatcatcttctgcgtgtggttcgtggacagcctgggctactacggcctgagcctgcaggtgggcgacttcggcctggacgtgtacctgacccagctgatcttcggcgccgtggaggtgcccgccagatgcagcagcatcttcatgatgcagagattcggcagaaagtggagccagctgggcaccctggtgctgggcggcctgatgtgcatcatcatcatcttcatccccgccgacctgcccgtggtggtgaccatgctggccgtggtgggcaagatggccaccgccgccgccttcaccatcagctacgtgtacagcgccgagctgttccccaccatcctgagacagaccggcatgggcctggtgggcatcttcagcagaatcggcggcatcctgacccccctggtgatcctgctgggcgagtaccacgccgccctgcccatgctgatctacggcagcctgcccatcgtggccggcctgctgtgcaccctgctgcccgagacccacggccagggcctgaaggacaccctgcaggacctggagctgggcccccaccccagaagccccaagagcgtgcccagcgagaaggagaccgaggccaagggcagaaccagcagccccggcgtggccttcgtgagcagcacctacttctag

SEQ ID NO: 144584 - DNA, 618 bp, Artificial Sequence
  derived and/or modified sequence
atggtgctggacgagccccaccactgcgccgtggcctgggtgaagaaccacaccttcaacctgagcgccgccgagcagctggtgctgagcgtgcccctggacaccgccggccaccccgagccctgcctgatgttcagacccccccccgccaacgccagcctgcaggacatcctgagccacagattcaacgagacccagccctgcgacatgggctgggagtaccccgagaacagactgcccagcctgaagaacgagttcaacctggtgtgcgacagaaagcacctgaaggacaccacccagagcgtgttcatggccggcctgctggtgggcaccctgatgttcggccccctgtgcgacagagacagaatgggcggcgccctgatggaggacgccggcagaggccccggccccgtgcagctgctgcccagagccgacggcgcctgcggcaccagactgagattcccccagctggaggcccccagcgaccacagacactgcgcctggctgaccgccctgctgctgctgctgggcagcgccagaatctgcaccctggcccccgacccctgggaggacggcagaggcgacaccaccgaccccgagggcggcctgggccagtag

SEQ ID NO: 144585 - DNA, 1656 bp, Artificial Sequence
  derived and/or modified sequence
atggcccagtttgtgcaggtcctcgccgaaatcggggattttggccgtttccagatccagttgctcattcttctttgcgtcctcaactttcttagccccttctacttttttgctcacgtcttcatggtacttgacgagccacaccattgcgcagtggcttgggtaaaaaatcacaccttcaacctttcagctgccgagcagttggtgctgagcgtgccattggatacagctggacatcctgaaccctgcctgatgtttcgccccccgcccgcgaacgcctctctccaggacattctcagccatcgctttaatgagactcaaccttgtgatatgggatgggaataccctgaaaaccggttaccatcactcaagaacgaatttaatctcgtatgtgatcgtaagcatctgaaggatactactcagtctgtctttatggcaggtctgttggtagggacacttatgtttggacccctttgcgatcgtataggcagaaaggcaaccatactggcacagttactgctgtttactctgattggcctagccacggcatttgtgccctcctttgaactgtacatggcactgcgattcgcagtcgcgactgcagttgccggcctctcgttttccaatgtcactttactcacagaatgggtgggcccaagctggcgcactcaggcggtggtattagcgcagtgcaatttttctctgggccagatggtcctggccggtctggcttatggcttccgcaactggcgactgctgcagattactggtactgcacctggtcttctccttttcttttacttctgggccttgcccgaaagtgctcgttggctcctgactagggggcggatggatgaagccatccagctgattcaaaaagcggcgtccgtgaaccggaggaagctcagcccagagctgatgaatcagcttgtgccggagaagacaggaccctctggcaatgccctggaccttttcagacacccccaactgcgcaaggtgacattaatcattttctgcgtgtggttcgtggactcacttgggtattacggcctgtcccttcaggtgggggatttcgggctggacgtgtacctgacgcagctgatctttggggctgtggaggtgccggcgcgttgttcctctatcttcatgatgcagcgatttggacgcaagtggagtcagttgggcaccttggtgcttggcggcttgatgtgtatcatcattatatttattcccgctgatcttcccgttgtggtgaccatgctggcagtggttgggaagatggcaacagcggcagcctttacgatctcctacgtctacagtgccgaattgttccctaccatcctccggcaaacgggtatgggcctggtgggcatattctcccggattggaggtatcttaacccccctggtaatacttcttggtgaataccatgccgccctgccgatgctgatctacggctctctgcccatagtggccggactgctctgcaccctgctgccagagactcatggacagggtttgaaggatacccttcaagatctagagttgggcccacacccccgatcacccaaaagcgttccttctgaaaaggaaaccgaggcaaagggccggacctcttccccaggggttgcctttgtgtctagcacgtatttttag

SEQ ID NO: 144586 - DNA, 618 bp, Artificial Sequence
  derived and/or modified sequence
atggtgctggatgagcctcatcactgtgctgtggcatgggtcaaaaaccacacttttaatctgtcagcagctgagcagctcgtgttgagcgtgccccttgacacagcgggtcaccctgagccttgtctgatgttcaggccaccacccgctaatgcttcgttgcaagacatactatcccatcgctttaacgaaacgcaaccctgtgacatgggttgggaataccccgaaaatagactcccgagcctgaaaaacgagttcaacctcgtgtgtgacaggaagcacctcaaggacactacccagtctgtttttatggccggcctgcttgtagggactctgatgttcgggcccctctgtgatcgtgaccgcatgggaggcgctctcatggaagacgctggccgaggcccaggtcctgtccagctgttgccccgggcggacggcgcatgcggaacgcggctccggttcccacaactggaagccccttcagaccatcgccattgcgcatggctcacagccctgctcctgctgcttggttcagctagaatctgcacgctcgctcccgacccatgggaggacggaaggggcgacactactgacccagaaggtggtctggggcagtag

SEQ ID NO: 144587 - DNA, 1656 bp, Artificial Sequence
  derived and/or modified sequence
atggcccagtttgtgcaggtgctggccgagattggagactttggccgcttccagatccagctgctgatcctgctgtgtgtgctgaacttcctgagccccttctacttctttgcccacgtgttcatggtgctggatgagccccaccactgtgctgtggcctgggtgaagaaccacaccttcaacctgtctgctgctgagcagctggtgctgtctgtgcccctggacacagctggccaccctgagccctgcctgatgttccggcccccaccagccaatgccagcctgcaggacatcctgagccaccgcttcaatgagacccagccctgtgacatgggctgggagtacccagaaaatcggctgcccagcctgaagaatgagttcaacctggtgtgtgacaggaagcacctgaaggacaccacccagagcgtcttcatggccggcctgctggtgggcaccctgatgtttggccccctgtgtgaccgcatcggcaggaaggccaccatcctggcccagctgctgctcttcaccctcatcggcctggccacagcctttgtgcccagctttgagctgtacatggccctgcgctttgctgtggccacagctgtggccggcctgtccttcagcaatgtgaccctgctgacagagtgggtgggccccagctggaggacccaggccgtggtgctggcccagtgcaacttcagcctgggccagatggtgctggccggcctggcctacggcttcaggaactggaggctgctgcagatcaccggcacagcccctggcctgctgctcttcttctacttctgggccctgcctgagagcgcccgctggctgctgacccggggccgcatggatgaggccatccagctgatccagaaggccgcctctgtgaacagaaggaagctgagccctgagctgatgaaccagctggtgcctgagaagacaggccccagcggaaatgccctggacctcttccgccacccccagctgaggaaggtgaccctcatcatcttctgtgtgtggtttgtggacagcctgggctactacggcctgagcctgcaggtgggggactttggcctggatgtgtacctgacccagctgatctttggagctgtggaggtgcctgcccgctgcagcagcatcttcatgatgcagagatttggaaggaagtggagccagctgggcaccctggtgctgggcggcctgatgtgcatcatcatcatcttcatcccagctgacctgcctgtggtggtgaccatgctggccgtggtgggcaagatggccacagctgctgccttcaccatctcctatgtgtacagcgctgagctgttccccaccatcctgcggcagacaggcatgggcctggtgggcatcttcagccgcatcggcggcatcctgacccccctggtgatcctgctgggggagtaccacgccgccctgcccatgctgatctacggcagcctgcccatcgtggccggcctgctgtgcaccctgctgcctgagacccacggccagggcctgaaggacaccctgcaggacctggagctgggcccccaccccaggagccccaagtctgtgcccagcgagaaggagacagaggccaagggccgcaccagcagccctggggtggcctttgtgagcagcacctacttctag

SEQ ID NO: 144588 - DNA, 618 bp, Artificial Sequence
  derived and/or modified sequence
atggtgctggatgagccccaccactgtgctgtggcctgggtgaagaaccacaccttcaacctgtctgctgctgagcagctggtgctgtctgtgcccctggacacagctggccaccctgagccctgcctgatgttccggcccccaccagccaatgccagcctgcaggacatcctgagccaccgcttcaatgagacccagccctgtgacatgggctgggagtacccagagaaccggctgcccagcctgaagaatgagttcaacctggtgtgtgacaggaagcacctgaaggacaccacccagagcgtcttcatggccggcctgctggtgggcaccctgatgtttggccccctgtgtgaccgggacaggatgggcggggccctgatggaggatgctggccggggccctggccctgtgcagctgctgcccagggcagatggagcctgtggcacccggctgcgcttcccccagctggaggcccccagcgaccaccgccactgtgcctggctgacagccctgctgctgctgctgggcagcgcccgcatctgcaccctggccccagacccctgggaggatggccgcggggacaccacagatcctgagggcggcctgggccagtag

SEQ ID NO: 144589 - DNA, 1656 bp, Artificial Sequence
  derived and/or modified sequence
atggcccagttcgtgcaggtgctggccgagatcggcgacttcggcaggtttcagatacagctcttaatcctcctttgtgtccttaatttcttatctcctttctactttttcgcgcatgtatttatggtgctggacgaaccacaccactgtgccgtggcatgggtcaaaaaccataccttcaatctctcggctgcagaacagctggttctaagcgtgcccctggatactgcaggtcacccagagccgtgcctgatgtttagaccgcctccggctaatgcctccttacaggatattctgagtcaccgcttcaatgagacgcaaccttgtgatatgggttgggagtatccagaaaacaggttgcctagtttgaagaacgagtttaatctggtatgtgacaggaagcatctcaaggataccactcagagcgtgtttatggctgggctcctcgtgggcaccctgatgtttggccctctgtgtgatcgcattggccgtaaggcgactattttagcccaactcctgttgtttacgttaattgggttagccaccgctttcgttcccagctttgaattatacatggccctacggtttgccgtcgctaccgcggttgcaggactgtctttttctaatgtgaccctgttgaccgagtgggtcgggccttcttggcgcacacaggccgttgtgctagcccaatgtaacttttcacttggccagatggtgttggcgggcctggcctatggattcaggaactggcggctcctgcaaattaccggcaccgcgcccgggttgctgctgttcttttatttctgggcactgcccgagtccgcccgctggctgctgaccaggggcagaatggacgaagcaattcaactgatacagaaagctgctagcgttaacagaagaaagctttcaccagagttgatgaatcagctggtccccgagaagactggtcctagcggtaacgcactggacctgtttagacacccacagttgcgcaaagttaccttgatcattttttgcgtgtggtttgtggattcactcggatattatggtctgagtctacaggtgggcgattttggattggacgtttaccttacacaactcatttttggagcagtggaggttccggccagatgcagctccatattcatgatgcaacggtttgggcgcaaatggagtcaactgggtactctggtcctcggcgggctcatgtgcatcatcattatatttattccagcagaccttcctgttgtagtaactatgttagccgtggtaggaaaaatggccacggccgcagccttcacgatcagctacgtgtattcggcggaactgtttccgacaattctgaggcagaccgggatgggattggtgggaatattctccagaatcggtggcatactgaccccactggtgattctgctgggagagtaccacgcagccctgccgatgctgatctatggctccttacccattgtggccggcttgctgtgtacgctccttccggagacccacggccagggcttgaaggatacactgcaggatctcgaactgggcccgcatccccgttcccccaaatccgtgccttctgagaaagagacagaggctaaaggccgaacctcaagccccggggtggcctttgtttcctcaacctacttctag

SEQ ID NO: 144590 - DNA, 618 bp, Artificial Sequence
  derived and/or modified sequence
atggtgctggacgagccccaccactgcgccgtggcctgggtgaagaaccacacattcaatctgtctgccgccgaacagctcgtgctttctgttccgctggacaccgctggtcatcccgaaccttgccttatgttccgccctccccctgctaacgcttcgctccaggatatattatcccaccgctttaacgaaacgcaaccttgtgacatgggttgggagtacccagaaaatcgtctgcctagcctcaaaaacgagtttaatcttgtctgtgatcggaagcacctgaaggacacaacacaaagcgtatttatggcaggactgctcgttgggaccctaatgttcggtcccctgtgcgacagagacaggatggggggtgcccttatggaagacgcggggaggggcccaggaccagtgcagctgctaccccgtgccgatggcgcatgcggtacccggctgcgattcccccagcttgaggctccgtctgaccaccgtcactgtgcctggttgaccgctctgctgctcctactgggcagcgcgaggatctgtactctcgctcccgatccttgggaagatggccggggtgataccaccgatccagaaggcgggctgggccagtag

SEQ ID NO: 144591 - DNA, 1656 bp, Artificial Sequence
  derived and/or modified sequence
atggcacagtttgtccaagtacttgctgaaatcggcgacttcggaaggtttcagatacagctgctgatcttgctgtgcgtccttaatttcctgtccccgttttatttttttgcccacgtcttcatggtgctagatgagccacatcactgtgcagtggcatgggtcaagaaccacacattcaatttatccgccgctgagcagttggttttgagcgtcccccttgacacagccggacacccagagccttgtctcatgttccggccacccccagccaacgcttccttacaggacattctgtcacatagattcaatgagactcaaccctgcgacatggggtgggaatatcccgaaaaccgtctgccctccctgaagaatgagtttaatctggtctgcgacaggaaacaccttaaagatacaacacagtcagtctttatggctggtctgctggtgggcacactcatgttcggtcctctctgcgaccgcatcgggaggaaggctactatcctggctcagctactcctgttcactttgattggattggcaacagcatttgtgcccagtttcgaattatacatggcgcttcgcttcgccgtggccaccgccgtcgccggactctccttttcaaacgtcactttgctcacagagtgggtgggaccaagctggcggactcaagcagtggttctggcacagtgtaacttttctctggggcagatggtgttggccggacttgcctatggatttaggaactggcgtctattgcagatcactggaaccgcacccggtttacttctgttcttctatttctgggcactgcctgagagcgcccgatggctcctcacgcggggaaggatggacgaggccatccagctgatccagaaggccgcttcagtcaaccggaggaagctgtcgccggaactgatgaaccagctggttccggagaagacagggccttccggcaatgctttagatctgttcaggcacccccagttacggaaggttacacttattatcttctgcgtttggttcgtggactccctggggtactatgggttgtctcttcaggttggtgattttggactagacgtttacctgacacagctcatctttggggcagtggaggtgcctgccagatgctccagtatattcatgatgcagagattcgggaggaagtggagccagctagggacacttgtcctcggcggactcatgtgtattatcatcattttcattcccgcagatttgcccgttgtggtcacgatgctagccgttgtgggtaaaatggctaccgctgccgcattcaccatctcatacgtgtattcagcggagttgttccctaccattctgcgacaaaccggtatggggttggttgggattttctctagaatcggtggaatcctaactccattggttatattgcttggcgaataccatgctgctctgcctatgctcatctatggctccctgccgattgtcgccggactcttatgcacactcttaccagaaacgcacggccagggcttgaaggataccctgcaagatctggagctcggtccacacccaaggagtccaaaatccgtgccttctgagaaggagactgaggcaaaaggtcggacttcctctcccggtgtggcattcgtgagttcaacatatttctag

SEQ ID NO: 144592 - DNA, 618 bp, Artificial Sequence
  derived and/or modified sequence
atggtactcgacgagccacaccactgcgccgttgcttgggtgaagaaccacacatttaatctgtccgccgctgaacagctggtgctgagtgtgccattagacaccgcaggacaccctgagccctgtctgatgtttagaccacctcctgcgaatgctagcctgcaggatatcctcagtcaccggttcaacgaaacccaaccgtgcgacatgggctgggaatacccggagaaccgactgccgtctcttaagaacgagttcaacctcgtttgcgatcggaagcacctgaaggatacaacacagtcagtttttatggcagggttgctggtgggcaccctaatgttcggcccactctgcgatcgcgacaggatggggggtgcccttatggaggacgcgggacgaggcccagggcctgtccaattactgcctcgagctgatggggcttgtggaactcggctgagatttcctcagctcgaagccccaagtgaccatcgacactgcgcatggctgacagcacttctgctgctgcttggctcagccagaatatgcactctcgctccggacccctgggaagatggtcggggtgataccaccgatccagaggggggtcttggccagtag

SEQ ID NO: 144593 - DNA, 2555 bp, Artificial Sequence
  derived and/or modified sequence
acagagctaccctagtgtccccaggctgaggaggtagtgactggcatacatggctcagtttgtccaggtcctggctgaaataggtgactttggtcgcttccagatacagctattgatcctgctgtgtgttctcaacttcctgtctcccttctacttttttgcccatgtcttcatggtcctagatgagccccaccactgtgcagtggcttgggtgaagaaccacactttcaacctgagtgctgctgaacagctggtactgagcgtgcccctggacactgcaggtcacccagagccctgcctcatgttccggccaccccccgccaatgccagcctgcaggacatcctcagccaccgcttcaatgagacgcagccttgtgatatgggctgggaatatcctgagaacaggctcccatccctgaagaatgagttcaacctggtttgtgatcggaagcacctgaaggacaccacacagtcagtgttcatggctgggctccttgttggcaccctcatgtttgggcccctctgcgaccggattggccgcaaggccacaatcctggcgcagctgctcctcttcaccctcatcggcctggccacagcttttgtgcccagctttgagctctacatggccctgcgctttgctgtggctactgccgtcgctggacttagcttcagcaatgtcaccctactgacagaatgggtggggccctcatggaggacgcaggccgtggtcctggcccagtgcaacttctccctcgggcagatggtgcttgcgggactcgcctacggtttccgcaactggaggctccttcagatcaccggcactgcgcctggcttactgctcttcttctacttctgggctctgccagaatctgcacgttggctcctgacccgtgggaggatggacgaggcgatacaactgatccagaaggcggcctcggtcaataggcggaaactctccccggagctcatgaaccagctggtcccagagaagacaggcccctcagggaatgccctggatctgttcagacacccccagctccggaaggtgaccctgattatcttctgtgtctggtttgtggacagtctggggtactacggcctgagcctccaagtgggggacttcggcctggacgtctatctgacgcagctcatctttggagctgttgaggtgcctgcccgctgttccagcatcttcatgatgcagaggtttggccgcaagtggagccagttggggaccttggtcttgggtggcctgatgtgtatcatcatcatcttcatcccagcagatctgcccgtggtggtcaccatgctggctgtggtggggaagatggccacagctgctgcctttaccatctcctatgtgtactctgccgagcttttccccaccatcctccggcagacaggcatggggctggtgggcatcttctcacggatcgggggcatcctcacaccacttgtgatcctgctgggagagtaccacgctgccctccccatgctcatctacggcagcctccccatcgtggccggcctgctgtgcaccctgctgccagagacgcatggccagggcctgaaagacaccctccaggacctggagctggggcctcacccacggtcccccaaatcagtgccctcagagaaggaaacagaggccaagggaagaacttccagcccgggagtggcctttgtgagcagcacatacttctgattgaggtctctaagagctggaccatcagcagcagggagctgcctaaacacctccttggatatggccaggacccacagggacacagggcaagaccagccttgcttatggaggcaggacaccacaatctggcccatggctgtcacctcctgccgagtccaatcccagactgggaaccaccatctgagacaggacctcccggcctccttcacctttctcatctccagagccctgcccccaatactctgtctgggttaggatcttgggtatgtcttggaattaacttgtcctctaacaatcttcatggggtatggctctcttgatctcctcaatctggagtcccctgccctcaaaacacagtgatgttcagaacagaacacaaggtaagccctttccaatttgtgggaacaggaggggagaggaaacaaatgtgaagttgtggactctacccaggcaggtggatgaaaatgctgtggataaaaggaaggttatgattccttctagcggatggaccagattcctctggctaacgtatggccccataggtcactgggtcatacagagagaagattcagttcagcctaaatcaaaacttccaccttgtgttcacttcaaagatggcccaacccccgccctacactcagctcatgcctaacctatgtgtggctcagggaccagcttggggaaggaaaggaggtttgttctgctccccgcctcaccccgcctcctcctgctcatgctcagctgcttctggaccttccagggcccatgcagggtgagggaaagggtagaggtcttttcaccgagctgctgctggttgcagttctttctggtgcacattggctaatgccag

SEQ ID NO: 144594 - DNA, 1079 bp, Artificial Sequence
  derived and/or modified sequence
cgcttccagatacagctattgatcctgctgtgtgttctcaacttcctgtctcccttctacttttttgcccatgtcttcatggtcctagatgagccccaccactgtgcagtggcttgggtgaagaaccacactttcaacctgagtgctgctgaacagctggtactgagcgtgcccctggacactgcaggtcacccagagccctgcctcatgttccggccaccccccgccaatgccagcctgcaggacatcctcagccaccgcttcaatgagacgcagccttgtgatatgggctgggaatatcctgagaacaggctcccatccctgaagaatgagttcaacctggtttgtgatcggaagcacctgaaggacaccacacagtcagtgttcatggctgggctccttgttggcaccctcatgtttgggcccctctgcgaccgtgacagaatgggtggggccctcatggaggacgcaggccgtggtcctggcccagtgcaacttctccctcgggcagatggtgcttgcgggactcgcctacggtttccgcaactggaggctccttcagatcaccggcactgcgcctggcttactgctcttcttctacttctgggctctgccagaatctgcacgttggctcctgacccgtgggaggatggacgaggcgatacaactgatccagaaggcggcctcggtcaataggcggaaactctccccggagctcatgaaccagctggtcccagagaagacaggcccctcagggaatgccctggatctgttcagacacccccagctccggaaggtgaccctgattatcttctgtgtctggtttgtggacagtctggggtactacggcctgagcctccaagtgggggacttcggcctggacgtctatctgacgcagctcatctttggagctgttgaggtgcctgcccgctgttccagcatcttcatgatgcagaggtttggccgcaagtggagccagttggggaccttggtcttgggtggcctgatgtgtatcatcatcatcttcatcccagcagatctgcccgtggtggtcaccatgctggctgtggtggggaaga

SEQ ID NO: 144595 - protein, 991 aa, Artificial Sequence
  derived and/or modified sequence
MSSHHTTFPFDPERRVRSTLKKVFGFDSFKTPLQESATMAVVKGNKDVFVCMPTGAGKSLCYQLPALLAKGITIVVSPLIALIQDQVDHLLTLKVRVSSLNSKLSAQERKELLADLEREKPQTKILYITPEMAASSSFQPTLNSLVSRHLLSYLVVDEAHCVSQWGHDFRPDYLRLGALRSRLGHAPCVALTATATPQVQEDVFAALHLKKPVAIFKTPCFRANLFYDVQFKELISDPYGNLKDFCLKALGQEADKGLSGCGIVYCRTREACEQLAIELSCRGVNAKAYHAGLKASERTLVQNDWMEEKVPVIVATISFGMGVDKANVRFVAHWNIAKSMAGYYQESGRAGRDGKPSWCRLYYSRNDRDQVSFLIRKEVAKLQEKRGNKASDKATIMAFDALVTFCEELGCRHAAIAKYFGDALPACAKGCDHCQNPTAVRRRLEALERSSSWSKTCIGPSQGNGFDPELYEGGRKGYGDFSRYDEGSGGSGDEGRDEAHKREWNLFYQKQMQLRKGKDPKIEEFVPPDENCPLKEASSRRIPRLTVKAREHCLRLLEEALSSNRQSTRTADEADLRAKAVELEHETFRNAKVANLYKASVLKKVADIHRASKDGQPYDMGGSAKSCSAQAEPPEPNEYDIPPASHVYSLKPKRVGAGFPKGSCPFQTATELMETTRIREQAPQPERGGEHEPPSRPCGLLDEDGSEPLPGPRGEVPGGSAHYGGPSPEKKAKSSSGGSSLAKGRASKKQQLLATAAHKDSQSIARFFCRRVESPALLASAPEAEGACPSCEGVQGPPMAPEKYTGEEDGAGGHSPAPPQTEECLRERPSTCPPRDQGTPEVQPTPAKDTWKGKRPRSQQENPESQPQKRPRPSAKPSVVAEVKGSVSASEQGTLNPTAQDPFQLSAPGVSLKEAANVVVKCLTPFYKEGKFASKELFKGFARHLSHLLTQKTSPGRSVKEEAQNLIRHFFHGRARCESEADWHGLCGPQR

SEQ ID NO: 144596 - protein, 1018 aa, Artificial Sequence
  derived and/or modified sequence
MSSHHTTFPFDPERRVRSTLKKVFGFDSFKTPLQESATMAVVKGNKDVFVCMPTGAGKSLCYQLPALLAKGITIVVSPLIALIQDQVDHLLTLKVRVSSLNSKLSAQERKELLADLEREKPQTKILYITPEMAASSSFQPTLNSLVSRHLLSYLVVDEAHCVSQWGHDFRPDYLRLGALRSRLGHAPCVALTATATPQVQEDVFAALHLKKPVAIFKTPCFRANLFYDVQFKELISDPYGNLKDFCLKALGQEADKGLSGCGIVYCRTREACEQLAIELSCRGVNAKAYHAGLKASERTLVQNDWMEEKVPVIVATISFGMGVDKANVRFVAHWNIAKSMAGYYQESGRAGRDGKPSWCRLYYSRNDRDQVSFLIRKEVAKLQEKRGNKASDKATIMAFDALVTFCEELGCRHAAIAKYFGDALPACAKGCDHCQNPTAVRRRLEALERSSSWSKTCIGPSQGNGFDPELYEGGRKGYGDFSRYDEGSGGSGDEGRDEAHKREWNLFYQKQMQLRKGKDPKIEEFVPPDENCPLKEASSRRIPRLTVKAREHCLRLLEEALSSNRQSTRTADEADLRAKAVELEHETFRNAKVANLYKASVLKKVADIHRASKDGQPYDMGGSAKSCSAQAEPPEPNEYDIPPASHVYSLKPKRVGAGFPKGSCPFQTATELMETTRIREQAPQPERGGEHEPPSRPCGLLDEDGSEPLPGPRGEVPGGSAHYGGPSPEKKAKSSSGGSSLAKGRASKKQQLLATAAHKDSQSIARFFCRRVESPALLASAPEAEGACPSCEGVQGPPMAPEKYTGEEDGAGGHSPAPPQTEECLRERPSTCPPRDQGTPEVQPTPAKDTWKGKRPRSQQENPESQPQKRPRPSAKPSVVAEVKGSVSASEQGTLNPTAQDPFQLSAPGVSLKEAANVVVKCLTPFYKEGKFASKELFKGFARHLSHLLTQKTSPGRSVKEEAQNLIRHFFHGRARCESGPHGWVFWDTCRGQKVEGGGAAAGRRGRKSGPSPSSKSG

SEQ ID NO: 144597 - DNA, 2976 bp, Artificial Sequence
  derived and/or modified sequence
atgagctcccaccacacgaccttcccttttgatcctgaaaggcgggtcagaagcacattgaagaaggtatttggttttgactctttcaagacacctctacaagagtccgcaacaatggctgttgtgaaaggtaataaagacgtgttcgtgtgtatgcccacaggggccggcaagtccctctgttaccagctgcctgctctgctagctaaaggcatcacaattgtggtatctccactcatagccctgatccaggatcaggtggaccacctgctcacactgaaggtacgggtcagtagtctgaactccaagctgtcggcccaggagaggaaggagctcttagctgatctcgagcgagagaaaccgcagaccaagatactgtatattacacctgaaatggctgcgtccagctctttccagccaacattaaactctctcgtcagccggcacctcctctcctatttagtagtggacgaggcacactgtgtctctcagtggggccacgattttaggcccgactacctgcgcttaggcgccctcagatccagactcggccatgctccttgcgtcgccctcacggccacagctactccccaggtgcaggaggacgtgttcgcagcactgcacctgaagaagccagtcgcgatctttaagaccccctgtttcagagcaaacttattttacgacgtccagttcaaagagctcatctctgacccttatgggaacctcaaagacttctgtctcaaagcattggggcaagaggccgacaaaggtttgtctggctgtgggattgtgtactgccgcacaagagaggcatgcgagcagttggctattgaactgagctgcagaggcgtcaatgccaaggcgtaccatgccggccttaaggcgtccgagcggaccctggtccaaaatgattggatggaggaaaaggtaccggtgatagtcgccaccatatctttcgggatgggagtggacaaggcaaatgtgagatttgtggctcattggaatatcgcaaagagcatggccggatattaccaagagtccggtcgagccggacgcgatgggaagccttcctggtgtaggctatattatagccggaatgatagagaccaagtgagcttcctaattcgaaaagaggtcgctaagctgcaggagaaacgaggtaacaaggccagtgataaagcaacaataatggctttcgatgcgctggtgacattctgcgaagaactgggctgccggcacgccgccattgctaagtactttggagatgctttgccggcctgtgctaagggttgtgatcactgccagaatcctactgccgttcggcggcgccttgaagcgttggagcggagtagcagctggtcaaagacatgtatcggcccaagtcaggggaatggcttcgaccccgagttatacgagggagggcggaaagggtacggggattttagtaggtatgacgagggctctggagggtcaggagatgaggggagagacgaagctcacaaacgggagtggaacctcttctaccaaaagcaaatgcagcttaggaaaggcaaagaccctaagattgaggaattcgtgccacctgacgagaactgtccattaaaagaagctagctctaggaggataccccggctcacagttaaagctagggaacattgcctcaggctcttagaggaggctctgagcagcaacaggcaatccacgaggacggcggatgaggccgatctgcgcgccaaggcggtagagctcgagcacgagaccttcagaaatgccaaggtggctaacctatacaaagccagtgtcctgaagaaggtggcagatatccatcgtgctagcaaagacggccagccttatgatatgggaggctctgccaaaagctgttctgcacaggcagagcctccagagccgaacgagtatgatattcctcctgctagccacgtgtatagccttaagcctaaacgggtgggggctggcttccctaagggctcctgccccttccagactgccacagaactcatggagaccacgagaattagagaacaggcgccacagccagagagagggggggaacacgaacccccatctcggccatgcggattgctggacgaggatgggtccgagcctctccccggaccccgaggggaggtgcctggcggatccgcccactacggcgggcccagtcccgaaaagaaagctaaaagctccagcggtggcagctccctggcgaaggggcgtgcctcgaaaaaacagcaattgttagccacagctgcccacaaagattcgcagagtatcgcaaggtttttttgtcggcgggtggagtcccccgccctgctggcaagcgcgcctgaggccgaaggcgcatgtccatcatgtgagggcgtgcaaggacccccgatggccccagaaaagtacacaggtgaggaggatggcgcaggaggtcattcccctgctcctccccagactgaagaatgcctgagagagcgcccttctacttgccctccccgggatcagggtaccccagaggtgcaacctacaccggccaaggatacctggaagggtaagcggcccagatcacaacaggaaaatccagagagtcaaccgcagaaaaggcctaggccatcggctaagccttcagtggttgctgaagtgaagggatctgtgtctgcctcggaacagggcacgctgaacccaacggctcaggatccgttccaactgtccgcccccggagtatccctgaaagaggctgccaacgtcgtggtcaagtgtctgaccccgttttataaggagggcaaattcgcatccaaggagttgtttaaggggttcgccaggcacctgtcccacttactgactcaaaagacatcgccaggacggagtgtcaaagaagaggcccagaatctaattcggcacttcttccatggtcgtgcccgatgtgaaagcgaggcagattggcacggtttgtgcggccctcagcgatag

SEQ ID NO: 144598 - DNA, 3057 bp, Artificial Sequence
  derived and/or modified sequence
atgtcttcccatcacaccacatttcccttcgaccctgaaagacgggtgagaagtactctcaagaaggtctttgggtttgatagctttaagactccgctgcaggagagcgctacaatggctgtggtaaaaggcaacaaggatgtgtttgtgtgcatgcctacgggagccgggaagagtctttgctaccagttgcctgcgcttcttgctaagggcatcactatcgtagtttctcccttaattgctcttatacaggatcaggtcgatcacctccttacattaaaagtgagagtgtcttctctgaacagcaaactgagcgctcaggagcgaaaggaattattggccgatctggagagggagaagccacagaccaaaattctgtatataactcctgaaatggcagcttcatcctcttttcagcctacactgaactctcttgtatcaaggcacctcctgtcatatctcgtcgtggacgaagcccactgtgtttctcagtggggccacgattttcgtccagactacctccgtctgggcgccctaaggtcaaggctgggccacgcaccgtgcgtcgctctgacagctaccgccactccccaagtgcaggaggacgtcttcgcggcccttcatctcaagaaacctgtggccatatttaagacaccgtgctttcgcgcaaacttattttacgacgtgcagtttaaggagttaatatcagacccctacgggaacttgaaggacttttgtctcaaggcattgggacaggaagccgataagggtctctcaggatgcggcattgtctactgcagaacccgggaggcctgtgagcagctggcaatcgaactgtcatgccggggcgtaaatgccaaggcctaccatgccgggctgaaggcatcagagcgaacactagtacagaatgactggatggaagagaaggttccggtcatcgtcgccaccattagcttcgggatgggcgttgacaaagccaatgtaagattcgtggctcactggaatatcgcgaagagcatggctgggtactatcaagagagtggacgtgccggccgtgatgggaaaccctcttggtgccggctatattatagccgcaatgatcgagaccaggtcagttttcttataaggaaagaggttgccaaactacaggaaaagagggggaataaggcttcagacaaagcaactattatggcattcgatgcactagtgacgttttgtgaggagcttggctgccgccacgccgccatcgcaaaatacttcggtgatgcgcttcctgcctgtgccaaaggatgtgaccattgtcagaaccccacggccgtcaggaggcggctcgaggcgcttgaacggagctcttcatggtctaagacttgcatcgggccatcccagggcaatgggtttgaccccgagctctacgaagggggacggaagggatacggcgactttagccgatatgacgaaggaagcgggggatcaggggatgagggtagggatgaagcccataagcgtgaatggaatctgttctaccagaagcaaatgcagctcaggaagggcaaagatcctaagatcgaggaatttgtgcctcccgacgaaaattgccccctgaaagaagcaagttctcgacgaatccccagactgactgttaaggcccgagagcactgcctgcgcctcctggaggaggctctcagcagcaaccggcagagcacccgaaccgccgatgaggcagacctccgagcgaaggcagtagagcttgagcacgaaacttttaggaacgccaaagtggcaaatttatataaagctagtgtcctgaagaaggtggcagacattcaccgggcatcaaaagatggccagccctatgacatgggtggctcggcaaagagctgtagcgcacaagctgaacctcctgagcctaatgaatacgatattcctcccgcgagccacgtgtattccttaaagccaaagagagttggtgccggctttcccaaagggtcctgtccattccagaccgcgaccgaactcatggagacgacgcggattagggaacaggctccccagcctgagaggggcggggagcatgaacctcccagccggccttgcggcctcctggacgaagatggcagtgaacccttgcctggcccacgaggagaggtgccaggaggttccgcacactacggcggtccttcccctgagaagaaggcgaagtcgtcctcgggaggctcaagcttggctaaaggcagggccagcaagaagcagcaactgctggccaccgccgcgcataaggactcccaatctatcgcgaggtttttttgtagaagagtcgaatcccccgccctgctcgcctccgcaccggaagccgaaggcgcatgccctagttgcgagggcgtgcaagggcctcctatggctcccgaaaagtatacaggcgaggaagatggagccgggggccattcgcctgccccaccgcaaaccgaagaatgcctgcgggaacgaccgtcaacatgcccgcccagggatcagggcacccctgaagtccagcctactcccgccaaggacacttggaagggcaagagaccaaggtcgcagcaggagaaccccgagagtcaaccccaaaagcggcccaggccttccgcgaaaccgagcgttgtggcagaggtgaagggctctgtgagtgcctctgaacagggaaccctgaaccccactgcccaagatccatttcaactatccgcacctggggtctcgctcaaagaagccgccaacgttgtggtaaagtgcctgacacccttctacaaagagggcaaatttgcctctaaagagctgttcaaaggattcgctcgacacctctcacacctccttactcaaaaaaccagccccggacgatcggtcaaagaggaggcacagaatctgattcggcacttcttccacggacgagccagatgtgagagcgggccccacgggtgggttttctgggacacatgtagaggccaaaaggtcgaaggaggaggagcagctgccggacggaggggacggaagtcaggtccttctccctcctcgaagtctggctag

SEQ ID NO: 144599 - DNA, 2976 bp, Artificial Sequence
  derived and/or modified sequence
atgagcagccaccacaccaccttcccctttgatcctgagcggcgggtgcgcagcaccctgaagaaggtgtttggatttgacagcttcaagacccccctgcaggagagcgccaccatggctgtggtgaagggcaacaaggatgtgtttgtgtgcatgcccaccggggccggcaagagcctgtgctaccagctgcctgccctgctggccaagggcatcaccatcgtggtgagccccctcatcgccctgatccaggaccaggtggaccacctgctgaccctgaaggtgcgggtgagcagcctgaacagcaagctgagcgcccaggagaggaaggagctgctggccgacctggagcgggagaagccccagaccaagatcctgtacatcaccccagagatggccgccagcagcagcttccagcccaccctgaacagcctggtgagccgccacctgctgagctacctggtggtggatgaggcccactgtgtgtcccagtggggccatgacttccggccagactacctgcggctgggcgccctgcggagccggctgggccacgccccctgtgtggccctgacagccacagccaccccccaggtgcaggaggatgtgtttgctgccctgcacctgaagaagcctgtggccatcttcaagaccccctgcttccgggccaacctcttctatgatgtgcagttcaaggagctgatcagtgacccctacggcaacctgaaggacttctgcctgaaggccctgggccaggaggccgacaagggcctgagcggctgcggcatcgtgtactgcaggacccgggaggcctgtgagcagctggccatcgagctgagctgccggggcgtgaatgccaaggcctaccacgccggcctgaaggccagcgagaggaccctggtgcagaatgactggatggaggagaaggtgcctgtgattgtggccaccatcagctttggcatgggcgtggacaaggccaacgtgcgctttgtggcccactggaacatcgccaagtccatggccggctactaccaggagagcggccgggccggcagagatggcaagcccagctggtgccgcctgtactacagcagaaatgaccgggaccaggtgtccttcctgatcaggaaggaggtggccaagctgcaggagaagaggggcaacaaggccagtgacaaggccaccatcatggcctttgatgccctggtgaccttctgtgaggagctgggctgcagacatgctgccatcgccaagtactttggagatgccctgcctgcctgtgccaagggctgtgaccactgccagaaccccacagctgtgagaagaaggctggaggccctggagaggagcagctcctggagcaagacctgcatcggccccagccagggcaatggatttgatcctgagctgtatgaaggaggcaggaagggctacggggacttcagccgctatgatgagggcagcggcggcagcggagatgagggcagagatgaggcccacaagcgggagtggaacctcttctaccagaagcagatgcagctgaggaagggcaaggaccccaagattgaggagtttgtgcccccagatgagaactgccccctgaaggaggccagcagccgccgcatcccccggctgactgtgaaggcccgggagcactgcctgcggctgctggaggaggccctgagcagcaaccggcagagcaccaggacagcagatgaggccgacctgcgggccaaggctgtggagctggagcacgagaccttcagaaatgccaaggtggccaacctgtacaaggcctctgtgctgaagaaggtggccgacatccaccgggccagcaaggatggccagccctatgacatgggcggcagcgccaagagctgcagcgcccaggccgagcccccagagcccaatgaatatgacatccccccagccagccacgtgtacagcctgaagcccaagagggtgggcgccggcttccccaagggcagctgccccttccagacagccacagagctgatggagaccacccgcatccgggagcaggccccccagcctgagcggggcggggagcacgagccccccagccggccctgtggcctgctggatgaagatggcagcgagcccctgcccggccccagaggagaggtgcctgggggcagcgcccactatggaggccccagccctgagaagaaggccaagagcagcagcggcggcagcagcctggccaagggccgggccagcaagaagcagcagctgctggccacagctgcccacaaggacagccagagcatcgcccgcttcttctgccggcgggtggagagccctgccctgctggccagcgcccctgaggccgagggcgcctgccccagctgtgaaggagtgcagggcccccccatggcccctgagaagtacacaggagaggaggatggagctgggggccacagccctgccccaccccagacagaagaatgtctgcgggagcggcccagcacctgccccccccgggaccagggcaccccagaggtgcagcccaccccagccaaggacacctggaagggcaagaggcccaggagccagcaggagaaccctgagagccagccccagaagaggccccggcccagcgccaagcccagcgtggtggccgaggtgaagggctctgtgtctgccagcgagcagggcaccctgaaccccacagcccaggaccccttccagctgagcgcccctggggtgtccctgaaggaggccgccaacgtggtggtgaagtgcctgacccccttctacaaggagggcaagtttgccagcaaggagctgttcaagggctttgcccggcacctgagccacctgctgacccagaagaccagccctggccgctctgtgaaggaggaggcccagaacctgatccgccacttcttccacggccgggcccgctgtgagagcgaggccgactggcacggcctgtgtggcccccagaggtag

SEQ ID NO: 144600 - DNA, 3057 bp, Artificial Sequence
  derived and/or modified sequence
atgagcagccaccacaccaccttcccctttgatcctgagcggcgggtgcgcagcaccctgaagaaggtgtttggatttgacagcttcaagacccccctgcaggagagcgccaccatggctgtggtgaagggcaacaaggatgtgtttgtgtgcatgcccaccggggccggcaagagcctgtgctaccagctgcctgccctgctggccaagggcatcaccatcgtggtgagccccctcatcgccctgatccaggaccaggtggaccacctgctgaccctgaaggtgcgggtgagcagcctgaacagcaagctgagcgcccaggagaggaaggagctgctggccgacctggagcgggagaagccccagaccaagatcctgtacatcaccccagagatggccgccagcagcagcttccagcccaccctgaacagcctggtgagccgccacctgctgagctacctggtggtggatgaggcccactgtgtgtcccagtggggccatgacttccggccagactacctgcggctgggcgccctgcggagccggctgggccacgccccctgtgtggccctgacagccacagccaccccccaggtgcaggaggatgtgtttgctgccctgcacctgaagaagcctgtggccatcttcaagaccccctgcttccgggccaacctcttctatgatgtgcagttcaaggagctgatcagtgacccctacggcaacctgaaggacttctgcctgaaggccctgggccaggaggccgacaagggcctgagcggctgcggcatcgtgtactgcaggacccgggaggcctgtgagcagctggccatcgagctgagctgccggggcgtgaatgccaaggcctaccacgccggcctgaaggccagcgagaggaccctggtgcagaatgactggatggaggagaaggtgcctgtgattgtggccaccatcagctttggcatgggcgtggacaaggccaacgtgcgctttgtggcccactggaacatcgccaagtccatggccggctactaccaggagagcggccgggccggcagagatggcaagcccagctggtgccgcctgtactacagcagaaatgaccgggaccaggtgtccttcctgatcaggaaggaggtggccaagctgcaggagaagaggggcaacaaggccagtgacaaggccaccatcatggcctttgatgccctggtgaccttctgtgaggagctgggctgcagacatgctgccatcgccaagtactttggagatgccctgcctgcctgtgccaagggctgtgaccactgccagaaccccacagctgtgagaagaaggctggaggccctggagaggagcagctcctggagcaagacctgcatcggccccagccagggcaatggatttgatcctgagctgtatgaaggaggcaggaagggctacggggacttcagccgctatgatgagggcagcggcggcagcggagatgagggcagagatgaggcccacaagcgggagtggaacctcttctaccagaagcagatgcagctgaggaagggcaaggaccccaagattgaggagtttgtgcccccagatgagaactgccccctgaaggaggccagcagccgccgcatcccccggctgactgtgaaggcccgggagcactgcctgcggctgctggaggaggccctgagcagcaaccggcagagcaccaggacagcagatgaggccgacctgcgggccaaggctgtggagctggagcacgagaccttcagaaatgccaaggtggccaacctgtacaaggcctctgtgctgaagaaggtggccgacatccaccgggccagcaaggatggccagccctatgacatgggcggcagcgccaagagctgcagcgcccaggccgagcccccagagcccaatgaatatgacatccccccagccagccacgtgtacagcctgaagcccaagagggtgggcgccggcttccccaagggcagctgccccttccagacagccacagagctgatggagaccacccgcatccgggagcaggccccccagcctgagcggggcggggagcacgagccccccagccggccctgtggcctgctggatgaagatggcagcgagcccctgcccggccccagaggagaggtgcctgggggcagcgcccactatggaggccccagccctgagaagaaggccaagagcagcagcggcggcagcagcctggccaagggccgggccagcaagaagcagcagctgctggccacagctgcccacaaggacagccagagcatcgcccgcttcttctgccggcgggtggagagccctgccctgctggccagcgcccctgaggccgagggcgcctgccccagctgtgaaggagtgcagggcccccccatggcccctgagaagtacacaggagaggaggatggagctgggggccacagccctgccccaccccagacagaagaatgtctgcgggagcggcccagcacctgccccccccgggaccagggcaccccagaggtgcagcccaccccagccaaggacacctggaagggcaagaggcccaggagccagcaggagaaccctgagagccagccccagaagaggccccggcccagcgccaagcccagcgtggtggccgaggtgaagggctctgtgtctgccagcgagcagggcaccctgaaccccacagcccaggaccccttccagctgagcgcccctggggtgtccctgaaggaggccgccaacgtggtggtgaagtgcctgacccccttctacaaggagggcaagtttgccagcaaggagctgttcaagggctttgcccggcacctgagccacctgctgacccagaagaccagccctggccgctctgtgaaggaggaggcccagaacctgatccgccacttcttccacggccgggcccgctgtgagagcggcccccacggctgggtgttctgggacacctgccggggccagaaggtggagggcggcggcgctgctgctggccggcggggcaggaagagcggccccagccccagcagcaagtctggatag

SEQ ID NO: 144601 - DNA, 2976 bp, Artificial Sequence
  derived and/or modified sequence
atgagcagccaccacaccaccttccccttcgaccccgagcggcgggtgcggtctaccttaaaaaaagtgttcgggttcgattctttcaaaacccccttacaagagagcgctacaatggccgtggtgaagggaaataaggacgtcttcgtctgcatgcctaccggagctggcaagtcactctgttaccaactccccgctctgctggcgaaaggcattaccattgtcgtctctcccctgatcgctctcatacaggatcaagtcgatcacctcttgacactgaaggttagagtgtctagtctcaatagtaagttatccgctcaagagagaaaagaactgttagccgacttggaaagagagaaaccccagacaaaaatcctgtacattacccctgaaatggctgctagcagttcgtttcaacctacccttaattccctcgtgtccaggcaccttctgtcttatttggtcgtggacgaagctcattgtgtgtcacagtggggacatgacttccgcccagattacctgcgtctcggggcgttgcggtctcgcctagggcatgccccctgcgtagcactgactgcgaccgctaccccccaggtacaggaggacgtatttgccgccctgcatctgaagaagcccgttgcaatcttcaaaacgccctgtttccgggccaacttgttctacgacgtacagttcaaggagctgatctctgacccttatggtaatttgaaggatttttgtctcaaagccttgggccaggaagctgataagggcttgagcggatgtggcatcgtgtactgccgaacccgggaggcttgcgagcaactggccatcgagcttagctgcaggggcgttaacgcaaaggcttaccacgccggacttaaggcctccgagcgaacactggtgcaaaatgactggatggaggaaaaggtaccagtcattgtcgccacaatctcgtttgggatgggggtggacaaggccaacgttaggttcgtcgcccactggaacatcgccaagtctatggccggctactaccaggagtccggtcgtgcgggcagagatgggaaaccatcatggtgtaggttatattattcaaggaacgatcgagatcaggtgtctttcctgattaggaaagaggtggccaaactccaagagaaaagaggtaataaggccagcgacaaagccactatcatggctttcgacgccttggtgaccttctgtgaggagctgggatgtagacacgctgccatagccaagtactttggagatgctcttccagcttgtgcaaaaggctgcgatcactgccagaaccccactgcggtcaggcggcggctggaggcactggagcgatcgtctagctggtcaaagacgtgcatcggcccatctcagggcaacggtttcgacccagagttatacgaaggagggcggaagggatatggagatttcagtcgctatgacgagggaagtgggggatccggcgatgaaggccgggatgaagctcataaaagggaatggaacttgttctatcaaaagcagatgcagctgcgaaaggggaaagaccctaagattgaggaatttgtaccccccgatgagaattgtccactcaaagaggcgtcaagtcggagaatcccaagactgactgtcaaggcaagggagcactgcctccgcctgcttgaagaggccctgagcagtaacaggcagagtactcgtaccgctgacgaggcggatctgagggctaaagctgtggagctggaacacgagacctttcgtaacgctaaggttgccaacctttacaaagcttcggtccttaaaaaagtggcagacatacatcgcgcttcaaaggacggacagccgtatgacatgggggggagcgcaaagagctgctccgctcaggccgagccacctgagcccaacgagtacgacatccctcctgcaagccatgtgtacagcctgaagcccaagagagttggagcaggcttcccaaaaggatcatgtccgttccaaaccgccaccgaactgatggagacaactcggataagagagcaagccccacagcctgaacgaggaggtgaacacgagccaccatcacggccatgcggactgctggatgaagatgggtcagaacccctccccggcccgaggggtgaggtccctggcgggtctgcacattatggggggccctcgcctgagaaaaaggcaaagtcctcaagcggcggatcgagcctcgccaagggacgggccagcaagaagcagcagctcttagcaactgcagcgcacaaggatagtcagagcattgcccgattcttttgccgaagagtggaaagccctgctctccttgcatccgcaccggaggcagaaggagcctgtccctcatgtgaaggggttcagggccccccgatggctccagagaagtacaccggcgaagaagacggtgctggtggccattctccagctccacctcagacggaggaatgtctaagggagaggcctagcacatgtccgccccgagatcaggggacgcctgaagtgcagccaacacctgccaaagatacatggaaggggaaacggccgaggagccaacaagagaaccctgaatctcaaccccagaagaggccccgaccatcggctaagcctagtgtcgtggccgaggttaagggatccgtgagcgcaagcgagcaaggaaccctgaaccccacagcccaggatccgttccagctcagtgcaccaggcgtaagccttaaggaagccgcaaacgttgttgtgaaatgcctcactccattctacaaggagggcaagtttgccagcaaggaacttttcaagggctttgcgaggcacctgagccacttgctcactcaaaagacctccccaggacggagtgtgaaagaggaggcgcagaacttaatccggcacttctttcacggccgagcgcgctgtgagtctgaggccgattggcacggactatgtggcccacaacgatag

SEQ ID NO: 144602 - DNA, 3057 bp, Artificial Sequence
  derived and/or modified sequence
atgagcagccaccacaccaccttccccttcgaccccgagcggcgggtgaggagcactctgaagaaagtcttcggctttgattcctttaagacccccctgcaggagagcgcaacaatggcagtggtaaagggaaataaggatgtcttcgtgtgtatgcctacaggcgcagggaagagcctgtgctaccagctgcctgccctccttgcgaaagggattacaatcgtggtctcccccctgattgcattgatccaagatcaggtcgatcacctgcttactttaaaggttcgcgttagctctctgaattctaagctgagcgcccaggaaagaaaggaactgctggctgacctggaaagagagaaaccacagacgaaaatcctgtatatcacacccgaaatggccgcctcatcaagcttccaacccaccttgaattcccttgtgtcccggcaccttctgtcttatttagtcgtggacgaggcccattgcgttagccagtggggccacgacttcaggcctgactacttacgtctgggggctttgcgatcccgcctgggccatgccccatgcgtggcgcttacagctaccgctaccccgcaagtgcaagaggacgtcttcgccgctctccacctgaagaagcctgtcgcgatattcaaaacaccatgcttcagggctaacctgttttatgatgtgcagttcaaggaactgatttctgatccttatgggaatttgaaagatttttgtctgaaagccctggggcaggaggcggacaaagggctgagcggctgcggcatagtgtactgcaggactcgggaggcctgcgaacagttggctatcgaactgtcctgcaggggggttaatgcaaaggcctatcacgcaggcctgaaagcctccgagcgaacactcgttcaaaacgactggatggaagagaaggtgcctgtgatcgtcgccaccatctccttcggcatgggcgttgataaagcaaacgttcgattcgtggcacactggaacatcgctaagtccatggccggctactatcaggaatcaggccgggcaggacgagatggaaaaccatcctggtgcagactttattattcgaggaatgacagagaccaagtgtccttcctgatcaggaaagaagtagccaaactgcaggagaagcggggcaataaggcaagcgataaagctaccattatggcattcgacgcactcgttaccttttgtgaggagctggggtgcagacatgccgctatcgccaagtattttggtgacgcactccccgcatgcgctaagggctgcgatcattgtcagaatcctactgctgttcgtagacggctggaggccctggagcggtcctcttcatggtctaagacatgtattgggcccagtcagggcaacggctttgatcctgagttgtatgaaggcggcagaaagggatacggggacttcagcaggtacgatgaaggctccgggggaagcggggacgagggaagagacgaagctcacaaaagagagtggaacctgttttatcagaaacagatgcagctcagaaaaggcaaggaccctaaaatcgaagaatttgttccccccgatgagaattgcccgctaaaagaagcatcatcgcgcagaattcctcgtctcaccgttaaagcaagagagcattgtctacgcttactcgaggaagcactcagctctaaccgccagtccacccgcacggccgatgaagctgacttgcgcgcaaaagccgtagaacttgagcacgaaacattcaggaacgcaaaagtggcaaatctctacaaggccagcgtcctcaagaaagtggccgacatccatagggcttctaaagatggccagccatatgacatgggcggctccgccaagtcctgcagcgcccaggcagaaccgccagagcctaatgagtatgacatcccaccggcttctcacgtgtacagtctgaagcctaaacgcgtgggtgctgggttccctaagggttcttgtccgttccaaactgccactgagctgatggagacgacccgtattagagagcaggctccgcaaccggagcggggaggagagcacgagccgccaagcagaccatgcggactactggatgaagatggctccgagcctcttcctggcccaaggggggaggtgcctggcgggtcagctcactacggcggcccgagccctgaaaagaaagctaagtcctcctccggcgggtccagtctggccaaaggacgtgcgtctaaaaagcagcagcttcttgcaactgcagcacataaggactcccaaagcattgcccgctttttctgtaggagagtcgagtctcctgcgctactggcttccgcgcccgaagctgaaggtgcgtgtcccagctgtgagggggtgcagggaccccccatggcacccgaaaagtacaccggggaagaagacggcgccggagggcactccccagcaccaccccagacagaagaatgcttgagagaaaggcccagcacctgtcccccccgggaccaggggacccccgaggtccagccaacgcccgccaaggacacatggaaagggaaaagaccgcgtagtcaacaagaaaacccggagtcccagccccaaaaaaggcctcgcccatccgccaagccttcagtagttgcggaggtgaaggggtccgtgagcgcctctgaacagggaactttgaatcctacagcccaggaccctttccagctttccgcccccggcgtcagcctgaaggaagccgctaacgtcgtcgtgaagtgcctgaccccattctataaagaaggcaagtttgcatccaaagaacttttcaagggcttcgcacgtcatctgtcccacttactgactcaaaaaacttcccccggccggagcgtgaaggaagaagcacagaatcttattcgacacttctttcatggccgtgctagatgcgaatccgggccgcacgggtgggtcttttgggacacttgcagaggccaaaaagtcgaaggcgggggagccgcggccgggaggagaggaagaaaatccgggccctctccctccagcaagtccggctag

SEQ ID NO: 144603 - DNA, 2976 bp, Artificial Sequence
  derived and/or modified sequence
atgtcctcacatcacaccaccttcccttttgatcctgaacggagagtgaggagcactctgaagaaagtgtttggcttcgattcctttaaaacccccctgcaggagagtgctacaatggctgtcgtgaagggtaataaagatgtgttcgtctgcatgccaaccggtgccggaaaaagtctgtgctatcagttacctgccctattggccaagggcatcactatcgtagtaagcccactcatagccctgattcaagaccaggtggaccacttgctgactttaaaggtgcgagtgtctagcctcaatagcaagttgtcagcgcaagaaagaaaagaactgttggctgatctggaaagggaaaagcctcaaaccaagattctatacatcactccggaaatggcggcttcttccagcttccagccgacattgaatagcctggtcagcagacacctattgtcttatctggtcgtggatgaagcacactgtgtgtcccaatgggggcacgacttccgtcccgattacctcagactcggcgcactccgatccagactagggcatgcaccttgtgtcgcgctgaccgctactgctactccacaggtgcaggaagatgtgtttgcggctctgcacctgaagaagccggtggctatctttaaaacgccatgttttagagcgaaccttttttacgatgtgcagtttaaggagcttatatccgacccttatggaaacctgaaggatttctgcttaaaagccctggggcaggaggccgataaagggttgtctggctgcggaatcgtctattgcagaactcgtgaggcctgtgaacagctggccattgaactgtcatgtagaggtgtcaacgcaaaggcctatcacgccggactgaaggcgagtgagcggactctcgttcagaatgactggatggaggaaaaggttccagtgattgtggccacaatctccttcggaatgggtgtggataaggccaacgtgagattcgtggctcactggaacattgccaagtcaatggccggatattaccaggagtccggaagggccggacgggacggtaagccctcctggtgccgactgtactattcacggaacgatcgcgatcaggtgtcatttctgatccggaaagaggtcgcaaagcttcaggaaaagagaggtaacaaagcctcagataaggccacgattatggcatttgacgcacttgtgacgttctgcgaagaactgggttgtagacacgccgcaattgctaagtacttcggggacgccctccctgcttgtgcaaaaggttgcgatcactgccagaatccaaccgcagtgcgcagacgcttagaggcgctggagcggtcttcctcttggtctaaaacctgtataggaccgtcccagggtaacgggttcgatccagagctttatgagggcggacgcaagggctacggtgacttttcacgatacgacgaaggctccgggggatctggcgatgaggggcgagatgaagctcataagcgagaatggaacctcttctatcagaaacagatgcagttgagaaaaggtaaggacccaaaaatcgaggaattcgtgcctcctgatgagaactgccccctcaaggaggctagttctagacggattcctcgattgaccgtcaaagcacgtgaacactgtctcagactcctcgaggaagcgctgtcgagtaatcgccagtcaacaaggaccgcggatgaggccgacttacgagctaaggccgtcgagctcgagcatgagacttttagaaatgccaaggtagccaatctgtataaggcctctgtcctgaaaaaggttgcagacattcaccgcgctagcaaagatgggcaaccttatgatatgggtggttctgctaagtcctgttcagctcaagctgaaccacccgaacccaatgagtatgacatacctccagccagccacgtgtatagtctgaagccgaaacgggtcggagccggttttcctaagggcagctgtccttttcaaactgctaccgaactcatggaaactacgcgcatccgcgaacaggccccacaacccgagcgcggtggcgagcatgaacccccttcacgaccttgcgggctgctggacgaggacggctctgagcccctgcccggaccgagaggcgaggttccaggcggttcagctcactatggtggcccttcacccgagaagaaggctaagtcttcttccgggggtagctcactggctaaaggaagagcctctaagaagcagcagctgctggcaactgccgcacacaaagactcacaatccatcgcacgatttttttgtcgccgagtggaatcccctgcacttttagctagcgcaccggaggccgagggtgcctgtccaagctgcgagggtgtccaggggccacccatggcccctgagaagtatactggagaggaagacggggcaggagggcacagtcccgctcctccacaaaccgaagaatgcctgcgcgaaaggccttccacctgtcccccacgggaccaggggacgccggaagttcagcccacacctgcaaaagacacatggaaaggcaagagacccagatctcagcaagagaacccagagtcacagccccaaaagcgtcctcgcccatctgccaagcccagcgtggtggccgaagttaagggcagtgtcagtgcctcagaacagggtacccttaatccaaccgctcaggaccctttccagctgagtgcacctggggtgagtcttaaggaagcagctaacgttgtagtaaaatgcctcaccccgttttacaaagaggggaagttcgcttccaaggaactgtttaaggggtttgccaggcacctttcccacctcctcactcagaaaacgagccctgggcgttcagtcaaagaagaagcacagaaccttatacggcacttttttcacggcagagctcgctgcgaaagtgaggcagactggcatggactctgtgggccacaacggtag

SEQ ID NO: 144604 - DNA, 3057 bp, Artificial Sequence
  derived and/or modified sequence
atgtcatcccaccatacaactttcccatttgatccagagagaagggtgagatcaacactgaaaaaggtcttcggctttgacagcttcaaaacaccactgcaggagtcagctacaatggcagtcgtgaaaggaaacaaggacgtctttgtctgcatgccaacgggcgcaggaaagagtctttgctaccagctgcccgctcttttagctaaagggatcaccatcgtcgtgagtccgttgatcgcactgattcaagatcaggtagatcatctgctgacccttaaggtgagagtttccagcttaaatagcaaactgagcgcccaggagcgaaaagagcttttggcggacctggagcgcgaaaaacctcagactaaaatcctatatatcacacccgaaatggcagctagtagcagcttccagccgactttaaactccttggtcagtaggcacctgctgagctaccttgtcgtggatgaggctcactgtgtcagtcaatggggacatgatttccggcctgactatttgcgcttaggggcattgcggtccaggttgggccacgcgccatgtgtggccttgacagcaaccgctacaccccaggttcaggaagatgtatttgccgctttacacctgaaaaagccagtcgctatcttcaagacaccctgcttcagggcgaatctgttctacgatgtgcagttcaaggagctgatatcagacccttacggcaatctcaaggatttctgcctgaaggccttgggccaagaagccgataagggcttgtcaggctgtggaatagtctactgtcggacgagagaagcttgcgaacagctcgccatagagctctcttgtaggggggtgaacgctaaggcttatcatgctggattgaaagctagcgagaggaccttggtgcagaatgactggatggaggaaaaagtgcctgtcattgtggcaacaatcagctttggcatgggggtggacaaggccaacgtcaggtttgtggctcactggaatattgccaagagcatggctgggtattatcaagaaagcggtcgcgcagggagagatggcaagccatcatggtgccggctgtattattccaggaatgaccgcgatcaggtgagcttcctcattaggaaggaggtcgccaagctgcaggaaaagcggggaaacaaggcctctgacaaagccacaattatggcctttgatgccctagtcaccttctgtgaggagctcggctgtcgccatgcggcaattgctaaatatttcggggatgcgctgcctgcatgcgctaagggctgcgaccactgtcaaaaccccacagcagtacgaaggcgcctggaagcacttgagcgttcgtcttcctggagtaagacatgtattgggccttcacaggggaacggcttcgatcccgaactttacgagggaggcaggaagggctacggtgatttctctagatatgatgagggttccggaggcagcggagatgagggcagggacgaggctcacaagcgagaatggaatcttttctaccagaagcagatgcagctgcggaaaggcaaggatccaaaaattgaggagttcgttcctcccgatgaaaactgcccactcaaagaagcctccagcaggcgcatcccacgtcttactgtgaaagctagggagcattgtctcaggctgttagaggaggcattgagcagcaatcgacagtctacacggacagccgacgaggcagatttaagagccaaggcagtcgaactggagcacgagactttccgcaatgcgaaggtggctaacctgtacaaggcttctgttctgaagaaggtcgccgatattcaccgggctagcaaagatggccagccctacgacatggggggatcagccaagtcgtgctccgctcaagctgaacccccagagcccaatgagtatgatattccacccgcatctcacgtttattcgctaaagcctaaacgagtcggagctggattcccaaagggaagctgtcctttccagactgcaaccgagctgatggagaccaccagaatacgagaacaagcacctcagcccgaacggggaggagagcatgaaccgcctagtaggccctgtggtttactggatgaggatgggtccgaacctttaccgggtccacgtggggaggttccaggaggttccgcacactatgggggtccttcgcccgaaaaaaaggcgaagtcaagcagcggcggtagttcacttgctaaaggaagggcatccaagaagcagcaattgctggcaaccgcagcccacaaggacagtcaatctatcgcacggttcttctgcaggcgcgtggagtcccccgcactgctggcatctgctccggaggctgaaggggcttgccccagttgcgaaggggtgcaaggccctcccatggcgcctgagaagtatacaggtgaggaagatggagccggaggacactcacctgctccaccccagaccgaggaatgcctcagggagcgcccttctacctgccctccacgggatcagggcacccctgaggttcagcctacgccagcaaaggatacttggaaaggcaagagacccagatcacagcaagaaaaccccgaaagtcagccccagaaacgcccaagaccctctgccaagccctctgtggtggctgaagtgaaagggagcgtgtctgcttccgaacaagggacgctgaacccgacggcccaagacccttttcagctgtccgctcctggcgtaagtctgaaggaggccgctaatgtggttgtgaaatgcctgactcctttctacaaggaaggaaagtttgcctccaaggaactgtttaagggtttcgcaaggcaccttagccacctcctaactcagaagaccagcccaggtcggagcgtcaaagaggaggctcagaacctgatacgccactttttccacgggcgagcacggtgcgaatccggtccacacggatgggttttctgggacacgtgtagagggcagaaggtcgaaggagggggagctgccgcaggcagaaggggcagaaaatcaggcccatctccatctagtaaatccggttag

SEQ ID NO: 144605 - DNA, 3683 bp, Artificial Sequence
  derived and/or modified sequence
atataagattgcgtgggttctgcctaaagctgaattcccagcgctttggcttctctgagttggggttgtgtataggggtcttcgaacagttccggaaccagccagcagcctttaattcttgggcggaccacggccggttctgtgttcttggctaagatgagcagccaccataccacctttccttttgaccctgagcggcgagtccggagtacgctgaagaaggtctttgggtttgactcttttaagacgcctttacaggagagtgcgaccatggctgtagtaaaaggtaacaaggacgtctttgtgtgcatgcccacaggggcaggaaaatccctatgctatcagctccctgctctgttggccaaaggcatcaccattgtagtctctcctctcattgctttgattcaggaccaagtggaccacttgctaaccctaaaggtacgagtaagttccctgaactcgaagctctctgcacaggaaaggaaggagctgcttgctgacctggagcgagaaaagccccagaccaagattctgtacatcaccccagagatggcagcttcatcctccttccagcccaccctgaactccctggtgtcccgccacctgctgtcttacttggtggtggatgaagctcattgtgtttcccaatgggggcatgactttcgtcctgactacttgcgtctgggtgccctgcgctcccgcctgggacatgccccttgtgtggctctgaccgccacagccaccccacaggtccaagaggacgtgtttgctgccctgcacctgaagaaaccagttgccatcttcaagactccctgcttccgggccaacctcttctatgatgtgcaattcaaggaactgatttctgatccctatgggaacctgaaggacttctgccttaaggctcttggacaggaggctgataaagggttatctggctgcggcattgtgtactgcaggactagagaggcttgtgaacagctggccatagagctcagctgcaggggtgtgaacgccaaggcttaccatgcagggctgaaggcctctgaaagaacgctggtgcagaacgactggatggaggagaaggtccctgtaattgttgcaaccattagttttgggatgggagtggataaagccaatgtcaggtttgtcgcccattggaatattgccaagtctatggctgggtactaccaggagtctggccgggctggcagggatgggaagccttcctggtgccgtctctattactccaggaatgaccgggaccaagtcagcttcctgatcaggaaggaagtagcaaaactccaggaaaagagaggaaacaaagcatctgataaagccactatcatggcctttgatgccctggtgaccttctgtgaagaactggggtgccgccatgccgccattgccaagtacttcggggatgcgctgcctgcctgcgccaaaggctgcgaccactgccagaaccccacggccgtgcggaggcggctggaggccttggagcgcagcagcagctggagcaagacctgcatcgggccctcccaggggaacggctttgaccccgagctgtatgagggaggccgcaagggctacggggacttcagcaggtatgacgaaggttctggaggcagcggggatgaaggcagagatgaggcccacaagcgggagtggaacctcttctatcagaagcagatgcagctgcgcaagggcaaagaccccaagatagaagaatttgtacccccagatgagaactgtcccctgaaagaggcttctagcaggaggatccccaggctgactgtgaaggcacgggagcactgcctgcggcttctggaggaggcgctgagcagcaaccgccagtcaacacgtaccgctgatgaagctgacctccgggccaaggccgtggagctggaacatgagacattccggaacgccaaggtggccaacctctacaaggccagcgtgctgaagaaggtggccgatatccacagagcctccaaggatgggcagccctatgacatgggaggcagtgccaagagctgcagtgcccaagctgagcccccggagcccaatgagtatgacattccaccagcctcccatgtgtactcgctcaaacccaagcgggtgggagctggtttccccaaaggctcctgcccgttccagacggccacggaactgatggagacaactcggatcagggagcaagccccccagcccgagcggggaggcgagcacgagcccccgagccggccctgtggcctcctggatgaggatgggagtgagcccctccctgggcccagaggggaggtccctggaggcagcgctcactatggggggccctcccctgagaagaaggcaaaaagttcctctgggggcagctcccttgccaagggccgggctagcaagaaacagcagctcctagccacagcggcccacaaggattctcagagcatcgcccgcttcttctgccgaagggtggaaagcccagctctgctggcatcagccccagaggcagaaggtgcctgcccctcctgtgagggggttcagggacccccgatggccccagagaagtacacaggggaggaagatggagccgggggacattcgcctgcccctccccagactgaggagtgcctcagggagaggccaagcacctgcccgcccagagaccagggcacccctgaagtccagcccacccctgcaaaggacacatggaagggcaagcggcctcgatcccagcaggagaacccagagagccagcctcagaagaggccacgcccctcagccaagccctccgtcgtagctgaggtcaagggcagcgtctcggccagcgaacagggcaccttgaatcccacggctcaagaccccttccagctctccgctcctggcgtctccttgaaggaggctgcaaatgttgtggtcaagtgcctcacccctttctacaaggagggcaagtttgcttccaaggagttgtttaaaggctttgcccgccacctctcacacttgctgactcagaagacctctcctggaaggagcgtgaaagaagaggcccagaacctcatcaggcacttcttccatggccgggcccggtgcgagagcgaagctgactggcatggcctgtgtggcccccagagatgaccaactgctggctgggcagggcccgcgtcctcccccagattctagcatgggtcatcctgggcctcacctgctgatgccagggccatcgtcttttctcagtccttctcctttccaaccatacttggctttggggatgaccccagacaccccctgaatccaggtcagaggtcagcccacctttctttctgcttgcaaagcctatagacccttctcagagcggtcctcatggctgggttttctgggacacatgtcgaggacagaaggtggagggtggtggagctgctgctggaagaaggggaaggaagagtggcccctccccgagttctaagtcaggatgaggcccacctgtccaaggtatcggaacctacccaggggaccctcagatcctccacccactcccccatccattacgatgccagcttccagccttgcccaggtcagagctgtggcagaggagaggcagccaggccctgttcctgctcagctcctgctcaggaaggccaggcctgacagatgtttgggagaggaataaagttgtgttgttgtggggc

SEQ ID NO: 144606 - DNA, 3440 bp, Artificial Sequence
  derived and/or modified sequence
aagattgcgtgggttctgcctaaagctgaattcccagcgctttggcttctctgagttggggttgtgtataggggtcttcgaacagttccggaaccagccagcagcctttaattcttgggcggaccacggccggttctgtgttcttggctaagatgagcagccaccataccacctttccttttgaccctgagcggcgagtccggagtacgctgaagaaggtctttgggtttgactcttttaagacgcctttacaggagagtgcgaccatggctgtagtaaaaggtaacaaggacgtctttgtgtgcatgcccacaggggcaggaaaatccctatgctatcagctccctgctctgttggccaaaggcatcaccattgtagtctctcctctcattgctttgattcaggaccaagtggaccacttgctaaccctaaaggtacgagtaagttccctgaactcgaagctctctgcacaggaaaggaaggagctgcttgctgacctggagcgagaaaagccccagaccaagattctgtacatcaccccagagatggcagcttcatcctccttccagcccaccctgaactccctggtgtcccgccacctgctgtcttacttggtggtggatgaagctcattgtgtttcccaatgggggcatgactttcgtcctgactacttgcgtctgggtgccctgcgctcccgcctgggacatgccccttgtgtggctctgaccgccacagccaccccacaggtccaagaggacgtgtttgctgccctgcacctgaagaaaccagttgccatcttcaagactccctgcttccgggccaacctcttctatgatgtgcaattcaaggaactgatttctgatccctatgggaacctgaaggacttctgccttaaggctcttggacaggaggctgataaagggttatctggctgcggcattgtgtactgcaggactagagaggcttgtgaacagctggccatagagctcagctgcaggggtgtgaacgccaaggcttaccatgcagggctgaaggcctctgaaagaacgctggtgcagaacgactggatggaggagaaggtccctgtaattgttgcaaccattagttttgggatgggagtggataaagccaatgtcaggtttgtcgcccattggaatattgccaagtctatggctgggtactaccaggagtctggccgggctggcagggatgggaagccttcctggtgccgtctctattactccaggaatgaccgggaccaagtcagcttcctgatcaggaaggaagtagcaaaactccaggaaaagagaggaaacaaagcatctgataaagccactatcatggcctttgatgccctggtgaccttctgtgaagaactggggtgccgccatgccgccattgccaagtacttcggggatgcgctgcctgcctgcgccaaaggctgcgaccactgccagaaccccacggccgtgcggaggcggctggaggccttggagcgcagcagcagctggagcaagacctgcatcgggccctcccaggggaacggctttgaccccgagctgtatgagggaggccgcaagggctacggggacttcagcaggtatgacgaaggttctggaggcagcggggatgaaggcagagatgaggcccacaagcgggagtggaacctcttctatcagaagcagatgcagctgcgcaagggcaaagaccccaagatagaagaatttgtacccccagatgagaactgtcccctgaaagaggcttctagcaggaggatccccaggctgactgtgaaggcacgggagcactgcctgcggcttctggaggaggcgctgagcagcaaccgccagtcaacacgtaccgctgatgaagctgacctccgggccaaggccgtggagctggaacatgagacattccggaacgccaaggtggccaacctctacaaggccagcgtgctgaagaaggtggccgatatccacagagcctccaaggatgggcagccctatgacatgggaggcagtgccaagagctgcagtgcccaagctgagcccccggagcccaatgagtatgacattccaccagcctcccatgtgtactcgctcaaacccaagcgggtgggagctggtttccccaaaggctcctgcccgttccagacggccacggaactgatggagacaactcggatcagggagcaagccccccagcccgagcggggaggcgagcacgagcccccgagccggccctgtggcctcctggatgaggatgggagtgagcccctccctgggcccagaggggaggtccctggaggcagcgctcactatggggggccctcccctgagaagaaggcaaaaagttcctctgggggcagctcccttgccaagggccgggctagcaagaaacagcagctcctagccacagcggcccacaaggattctcagagcatcgcccgcttcttctgccgaagggtggaaagcccagctctgctggcatcagccccagaggcagaaggtgcctgcccctcctgtgagggggttcagggacccccgatggccccagagaagtacacaggggaggaagatggagccgggggacattcgcctgcccctccccagactgaggagtgcctcagggagaggccaagcacctgcccgcccagagaccagggcacccctgaagtccagcccacccctgcaaaggacacatggaagggcaagcggcctcgatcccagcaggagaacccagagagccagcctcagaagaggccacgcccctcagccaagccctccgtcgtagctgaggtcaagggcagcgtctcggccagcgaacagggcaccttgaatcccacggctcaagaccccttccagctctccgctcctggcgtctccttgaaggaggctgcaaatgttgtggtcaagtgcctcacccctttctacaaggagggcaagtttgcttccaaggagttgtttaaaggctttgcccgccacctctcacacttgctgactcagaagacctctcctggaaggagcgtgaaagaagaggcccagaacctcatcaggcacttcttccatggccgggcccggtgcgagagcggtcctcatggctgggttttctgggacacatgtcgaggacagaaggtggagggtggtggagctgctgctggaagaaggggaaggaagagtggcccctccccgagttctaagtcaggatgaggcccacctgtccaaggtatcggaacctacccaggggaccctcagatcctccacccactcccccatccattacgatgccagcttccagccttgcccaggtcagagctgtggcagaggagaggcagccaggccctgttcctgctcagctcctgctcaggaaggccaggcctgacagatgtttgggagaggaataaagttgtgttgttgtggggcatgcaggcgtgcacacag

SEQ ID NO: 144607 - DNA, 2976 bp, Artificial Sequence
  derived and/or modified sequence
atgagcagccaccacaccaccttccccttcgaccccgagagaagagtgagaagcaccctgaagaaggtgttcggcttcgacagcttcaagacccccctgcaggagagcgccaccatggccgtggtgaagggcaacaaggacgtgttcgtgtgcatgcccaccggcgccggcaagagcctgtgctaccagctgcccgccctgctggccaagggcatcaccatcgtggtgagccccctgatcgccctgatccaggaccaggtggaccacctgctgaccctgaaggtgagagtgagcagcctgaacagcaagctgagcgcccaggagagaaaggagctgctggccgacctggagagagagaagccccagaccaagatcctgtacatcacccccgagatggccgccagcagcagcttccagcccaccctgaacagcctggtgagcagacacctgctgagctacctggtggtggacgaggcccactgcgtgagccagtggggccacgacttcagacccgactacctgagactgggcgccctgagaagcagactgggccacgccccctgcgtggccctgaccgccaccgccaccccccaggtgcaggaggacgtgttcgccgccctgcacctgaagaagcccgtggccatcttcaagaccccctgcttcagagccaacctgttctacgacgtgcagttcaaggagctgatcagcgacccctacggcaacctgaaggacttctgcctgaaggccctgggccaggaggccgacaagggcctgagcggctgcggcatcgtgtactgcagaaccagagaggcctgcgagcagctggccatcgagctgagctgcagaggcgtgaacgccaaggcctaccacgccggcctgaaggccagcgagagaaccctggtgcagaacgactggatggaggagaaggtgcccgtgatcgtggccaccatcagcttcggcatgggcgtggacaaggccaacgtgagattcgtggcccactggaacatcgccaagagcatggccggctactaccaggagagcggcagagccggcagagacggcaagcccagctggtgcagactgtactacagcagaaacgacagagaccaggtgagcttcctgatcagaaaggaggtggccaagctgcaggagaagagaggcaacaaggccagcgacaaggccaccatcatggccttcgacgccctggtgaccttctgcgaggagctgggctgcagacacgccgccatcgccaagtacttcggcgacgccctgcccgcctgcgccaagggctgcgaccactgccagaaccccaccgccgtgagaagaagactggaggccctggagagaagcagcagctggagcaagacctgcatcggccccagccagggcaacggcttcgaccccgagctgtacgagggcggcagaaagggctacggcgacttcagcagatacgacgagggcagcggcggcagcggcgacgagggcagagacgaggcccacaagagagagtggaacctgttctaccagaagcagatgcagctgagaaagggcaaggaccccaagatcgaggagttcgtgccccccgacgagaactgccccctgaaggaggccagcagcagaagaatccccagactgaccgtgaaggccagagagcactgcctgagactgctggaggaggccctgagcagcaacagacagagcaccagaaccgccgacgaggccgacctgagagccaaggccgtggagctggagcacgagaccttcagaaacgccaaggtggccaacctgtacaaggccagcgtgctgaagaaggtggccgacatccacagagccagcaaggacggccagccctacgacatgggcggcagcgccaagagctgcagcgcccaggccgagccccccgagcccaacgagtacgacatcccccccgccagccacgtgtacagcctgaagcccaagagagtgggcgccggcttccccaagggcagctgccccttccagaccgccaccgagctgatggagaccaccagaatcagagagcaggccccccagcccgagagaggcggcgagcacgagccccccagcagaccctgcggcctgctggacgaggacggcagcgagcccctgcccggccccagaggcgaggtgcccggcggcagcgcccactacggcggccccagccccgagaagaaggccaagagcagcagcggcggcagcagcctggccaagggcagagccagcaagaagcagcagctgctggccaccgccgcccacaaggacagccagagcatcgccagattcttctgcagaagagtggagagccccgccctgctggccagcgcccccgaggccgagggcgcctgccccagctgcgagggcgtgcagggcccccccatggcccccgagaagtacaccggcgaggaggacggcgccggcggccacagccccgcccccccccagaccgaggagtgcctgagagagagacccagcacctgcccccccagagaccagggcacccccgaggtgcagcccacccccgccaaggacacctggaagggcaagagacccagaagccagcaggagaaccccgagagccagccccagaagagacccagacccagcgccaagcccagcgtggtggccgaggtgaagggcagcgtgagcgccagcgagcagggcaccctgaaccccaccgcccaggaccccttccagctgagcgcccccggcgtgagcctgaaggaggccgccaacgtggtggtgaagtgcctgacccccttctacaaggagggcaagttcgccagcaaggagctgttcaagggcttcgccagacacctgagccacctgctgacccagaagaccagccccggcagaagcgtgaaggaggaggcccagaacctgatcagacacttcttccacggcagagccagatgcgagagcgaggccgactggcacggcctgtgcggcccccagagatag

SEQ ID NO: 144608 - DNA, 3057 bp, Artificial Sequence
  derived and/or modified sequence
atgagcagccaccacaccaccttccccttcgaccccgagagaagagtgagaagcaccctgaagaaggtgttcggcttcgacagcttcaagacccccctgcaggagagcgccaccatggccgtggtgaagggcaacaaggacgtgttcgtgtgcatgcccaccggcgccggcaagagcctgtgctaccagctgcccgccctgctggccaagggcatcaccatcgtggtgagccccctgatcgccctgatccaggaccaggtggaccacctgctgaccctgaaggtgagagtgagcagcctgaacagcaagctgagcgcccaggagagaaaggagctgctggccgacctggagagagagaagccccagaccaagatcctgtacatcacccccgagatggccgccagcagcagcttccagcccaccctgaacagcctggtgagcagacacctgctgagctacctggtggtggacgaggcccactgcgtgagccagtggggccacgacttcagacccgactacctgagactgggcgccctgagaagcagactgggccacgccccctgcgtggccctgaccgccaccgccaccccccaggtgcaggaggacgtgttcgccgccctgcacctgaagaagcccgtggccatcttcaagaccccctgcttcagagccaacctgttctacgacgtgcagttcaaggagctgatcagcgacccctacggcaacctgaaggacttctgcctgaaggccctgggccaggaggccgacaagggcctgagcggctgcggcatcgtgtactgcagaaccagagaggcctgcgagcagctggccatcgagctgagctgcagaggcgtgaacgccaaggcctaccacgccggcctgaaggccagcgagagaaccctggtgcagaacgactggatggaggagaaggtgcccgtgatcgtggccaccatcagcttcggcatgggcgtggacaaggccaacgtgagattcgtggcccactggaacatcgccaagagcatggccggctactaccaggagagcggcagagccggcagagacggcaagcccagctggtgcagactgtactacagcagaaacgacagagaccaggtgagcttcctgatcagaaaggaggtggccaagctgcaggagaagagaggcaacaaggccagcgacaaggccaccatcatggccttcgacgccctggtgaccttctgcgaggagctgggctgcagacacgccgccatcgccaagtacttcggcgacgccctgcccgcctgcgccaagggctgcgaccactgccagaaccccaccgccgtgagaagaagactggaggccctggagagaagcagcagctggagcaagacctgcatcggccccagccagggcaacggcttcgaccccgagctgtacgagggcggcagaaagggctacggcgacttcagcagatacgacgagggcagcggcggcagcggcgacgagggcagagacgaggcccacaagagagagtggaacctgttctaccagaagcagatgcagctgagaaagggcaaggaccccaagatcgaggagttcgtgccccccgacgagaactgccccctgaaggaggccagcagcagaagaatccccagactgaccgtgaaggccagagagcactgcctgagactgctggaggaggccctgagcagcaacagacagagcaccagaaccgccgacgaggccgacctgagagccaaggccgtggagctggagcacgagaccttcagaaacgccaaggtggccaacctgtacaaggccagcgtgctgaagaaggtggccgacatccacagagccagcaaggacggccagccctacgacatgggcggcagcgccaagagctgcagcgcccaggccgagccccccgagcccaacgagtacgacatcccccccgccagccacgtgtacagcctgaagcccaagagagtgggcgccggcttccccaagggcagctgccccttccagaccgccaccgagctgatggagaccaccagaatcagagagcaggccccccagcccgagagaggcggcgagcacgagccccccagcagaccctgcggcctgctggacgaggacggcagcgagcccctgcccggccccagaggcgaggtgcccggcggcagcgcccactacggcggccccagccccgagaagaaggccaagagcagcagcggcggcagcagcctggccaagggcagagccagcaagaagcagcagctgctggccaccgccgcccacaaggacagccagagcatcgccagattcttctgcagaagagtggagagccccgccctgctggccagcgcccccgaggccgagggcgcctgccccagctgcgagggcgtgcagggcccccccatggcccccgagaagtacaccggcgaggaggacggcgccggcggccacagccccgcccccccccagaccgaggagtgcctgagagagagacccagcacctgcccccccagagaccagggcacccccgaggtgcagcccacccccgccaaggacacctggaagggcaagagacccagaagccagcaggagaaccccgagagccagccccagaagagacccagacccagcgccaagcccagcgtggtggccgaggtgaagggcagcgtgagcgccagcgagcagggcaccctgaaccccaccgcccaggaccccttccagctgagcgcccccggcgtgagcctgaaggaggccgccaacgtggtggtgaagtgcctgacccccttctacaaggagggcaagttcgccagcaaggagctgttcaagggcttcgccagacacctgagccacctgctgacccagaagaccagccccggcagaagcgtgaaggaggaggcccagaacctgatcagacacttcttccacggcagagccagatgcgagagcggcccccacggctgggtgttctgggacacctgcagaggccagaaggtggagggcggcggcgccgccgccggcagaagaggcagaaagagcggccccagccccagcagcaagagcggctag

SEQ ID NO: 144609 - protein, 162 aa, Artificial Sequence
  derived and/or modified sequence
MAAGPSGCLVPAFGLRLLLATVLQAVSAFGAEFSSEACRELGFSSNLLCSSCDLLGQFNLLQLDPDCRGCCQEEAQFETKKLYAGAILEVCGCKLGRFPQVQAFVRSDKPKLFRGLQIKYVRGSDPVLKLLDDNGNIAEELSILKWNTDSVEEFLSEKLERI

SEQ ID NO: 144610 - protein, 141 aa, Artificial Sequence
  derived and/or modified sequence
MAAGPSGCLVPAFGLRLLLATVLQAVSAFGAEFSSEACRELGFSSNLLCSSCDLLGQFNLLQLDPDCRGCCQEEAQFETKKYSSIVSKQECHHSNCMQELFLKFVDENWEGSLKSKLLLGVINPNCSEDCKSSMSVVQTLY

SEQ ID NO: 144611 - DNA, 1777 bp, Artificial Sequence
  derived and/or modified sequence
gtcgtgaataaaagaaaggagaccgcagaagtaaagaagtggggagtttaggcaagtgcctgatttgggtaatcgaaagcacccagtgattgtatttgatgacttttaagctttcatatgccgttatttaatacctgtcacttccaaatgagagatgtaagggcaacggccgttagcgttctgttttggatcaggctctggagtggacgcccctagcttaggggtccttctaggcagccagaaacctgcggaaaatggtagcgatggcggctgggccgagtgggtgtctggtgccggcgtttgggctacggttgttgttggcgactgtgcttcaagcggtgtctgcttttggggcagagttttcatcggaggcatgcagagagttaggcttttctagcaacttgctttgcagctcttgtgatcttctcggacagttcaacctgcttcagctggatcctgattgcagaggatgctgtcaggaggaagcacaatttgaaaccaaaaagctgtatgcaggagctattcttgaagtttgtggatgaaaattgggaaggttccctcaagtccaagcttttgttaggagtgataaacccaaactgttcagaggactgcaaatcaagtatgtccgtggttcagaccctgtattaaagcttttggacgacaatgggaacattgctgaagaactgagcattctcaaatggaacacagacagtgtagaagaattcctgagtgaaaagttggaacgcatataaatcttgcttaaattttgtcctatccttttgttaccttatcaaatgaaatattacagcacctagaaaataatttagttttgcttgcttccattgatcagtcttttacttgaggcattaaatatctaattaaatcgtgaaatggcagtatagtccatgatatctaaggagttggcaagcttaacaaaacccattttttataaatgtccatcctcctgcatttgttgataccactaacaaaatgctttgtaacagacttgcggttaattatgcaaatgatagtttgtgataattggtccagttttacgaacaacagatttctaaattagagaggttaacaagacagatgattactatgcctcatgtgctgtgtgctctttgaaaggaatgacagcagactacaaagcaaataagatatactgagcctcaacagattgcctgctcctcagagtctctcctatttttgtattacccagctttctttttaatacaaatgttatttatagtttacaatgaatgcactgcataaaaactttgtagcttcattattgtaaaacatattcaagatcctacagtaagagtgaaacattcacaaagatttgcgttaatgaagactacacagaaaacctttctagggatttgtgtggatcagatacatacttggcaaatttttgagttttacattcttacagaaaagtccatttaaaagtgatcatttgtaagaccaaaatataaataaaaagtttcaaaaatctatctgaatttggaattcttctggtttgttctttcatgtttaaaaatgatgtttttcaatgcatttttttcatgtaagccctttttttagccaaaatgtaaaaatggctgtaatatttaaaacttataacatcttattgttggtaatagtgctttatatttgtctgattttatttttcaaagttttttcatttatgaacacattttcattggtatattatttaaggaatatctcttgatatagaatttttatattaaaaatgatttttctttgc

SEQ ID NO: 144612 - DNA, 727 bp, Artificial Sequence
  derived and/or modified sequence
agaaacctgcggaaaatggtagcgatggcggctgggccgagtgggtgtctggtgccggcgtttgggctacggttgttgttggcgactgtgcttcaagcggtgtctgcttttggggcagagttttcatcggaggcatgcagagagttaggcttttctagcaacttgctttgcagctcttgtgatcttctcggacagttcaacctgcttcagctggatcctgattgcagaggatgctgtcaggaggaagcacaatttgaaaccaaaaagtattcatccattgtttctaagcaagaatgccatcactcaaactgtatgcaggagctattcttgaagtttgtggatgaaaattgggaaggttccctcaagtccaagcttttgttaggagtgataaacccaaactgttcagaggactgcaaatcaagtatgtccgtggttcagaccctgtattaaagcttttggacgacaatgggaacattgctgaagaactgagcattctcaaatggaacacagacagtgtagaagaattcctgagtgaaaagttggaacgcatataaatcttgcttaaattttgtcctatccttttgttaccttatcaaatgaaatattacagcacctagaaaataatttagttttgcttgcttccattgatcagtcttttacttgaggcattaaatatctaattaaatcgtgaaatggcagtatagtccatgatatctaaggagttggc

SEQ ID NO: 144613 - DNA, 489 bp, Artificial Sequence
  derived and/or modified sequence
atggccgccggccccagcggctgcctggtgcccgccttcggcctgagactgctgctggccaccgtgctgcaggccgtgagcgccttcggcgccgagttcagcagcgaggcctgcagagagctgggcttcagcagcaacctgctgtgcagcagctgcgacctgctgggccagttcaacctgctgcagctggaccccgactgcagaggctgctgccaggaggaggcccagttcgagaccaagaagctgtacgccggcgccatcctggaggtgtgcggctgaaagctgggcagattcccccaggtgcaggccttcgtgagaagcgacaagcccaagctgttcagaggcctgcagatcaagtacgtgagaggcagcgaccccgtgctgaagctgctggacgacaacggcaacatcgccgaggagctgagcatcctgaagtggaacaccgacagcgtggaggagttcctgagcgagaagctggagagaatctag

SEQ ID NO: 144614 - DNA, 489 bp, Artificial Sequence
  derived and/or modified sequence
atggccgcaggccctagtggttgcctggtgccagcttttggattgaggctccttctcgccacagtcttacaggcggtgtccgctttcggagcagagttttcaagcgaggcttgtcgggagctggggttttcctctaatctgctatgctccagctgcgacttactcggacagttcaaccttctacaacttgaccccgattgcaggggatgttgtcaagaagaagcccagttcgagaccaagaaactgtacgccggagcgatcctagaggtgtgcggatgaaagttaggcaggttcccccaagtccaggcatttgttcggagtgacaagccgaaattgtttaggggtctgcagatcaaatacgtcagaggcagcgaccccgtgctgaagcttctggacgacaatggtaatattgccgaagaactgagcatcttgaagtggaataccgattccgtcgaggagttcctcagtgagaagctggagcgtatttag

SEQ ID NO: 144615 - DNA, 483 bp, Artificial Sequence
  derived and/or modified sequence
atggctgctggccccagcggctgcctggtgcctgccttcggcctgcggctgctgctggccaccgtgctgcaggccgtgtctgcctttggagctgagttcagcagcgaggcctgccgggagctgggcttcagcagcaacctgctgtgcagcagctgtgacctgctgggccagttcaacctgctgcagctggaccctgactgccggggctgctgccaggaggaggcccagtttgagaccaagaagctgtatgctggggccatcctggaggtgtgtggcctgggccgcttcccccaggtgcaggcctttgtgcggagtgacaagcccaagctgttccggggcctgcagatcaagtatgtgcggggcagtgaccctgtgctgaagctgctggatgacaatggaaatattgctgaggagctgagcatcctgaagtggaacacagacagcgtggaggagttcctgtctgagaagctggagcgcatctag

SEQ ID NO: 144616 - DNA, 489 bp, Artificial Sequence
  derived and/or modified sequence
atggccgccggccccagcggctgcctggtgcccgccttcggcctgcggctgctgcttgccacagtcctccaggccgtcagcgccttcggcgccgagttctcaagcgaggcctgcagggaactgggattcagcagcaatcttttgtgctcctcttgcgacctgcttggtcagttcaacttgctccagttagatcccgattgtaggggctgttgccaggaggaggcccagtttgagacgaaaaagctgtacgcaggggccatattggaggtatgcgggtgaaaactgggaagatttcctcaagtgcaggctttcgtgcgtagcgacaaaccgaagttgttcagaggccttcagattaagtacgttaggggctccgacccagtacttaaactcctggatgataacggtaacattgccgaagagctcagcatcctgaaatggaacacagactcagttgaggaatttctgtcggaaaagctggagaggatatag

SEQ ID NO: 144617 - DNA, 489 bp, Artificial Sequence
  derived and/or modified sequence
atggccgctggcccatccgggtgcctggtgccagccttcgggctgcggctcttgctcgcaacagtgttgcaggcggtctctgcatttggcgcagaatttagctctgaggcttgtcgtgagctcggtttctctagcaacttgctctgtagttcttgcgatctgctcggtcagttcaatttgttacagctagacccagactgccggggatgttgtcaggaggaggcccaattcgagaccaagaagctgtacgctggtgctatcctagaggtgtgcggttgaaaactgggcaggttccctcaggtgcaggcattcgtgcggagtgataagccaaagctgttccgagggctccagattaagtacgtcagaggctcagatcctgtgctaaaactgttggatgacaacggcaacattgccgaggaactttctatcttgaaatggaatacagactccgtggaggaatttctgtcagaaaaactggaacggatttag

SEQ ID NO: 144618 - protein, 418 aa, Artificial Sequence
  derived and/or modified sequence
MYRPARVTSTSRFLNPYVVCFIVVAGVVILAVTIALLVYFLAFDQKSYFYRSSFQLLNVEYNSQLNSPATQEYRTLSGRIESLITKTFKESNLRNQFIRAHVAKLRQDGSGVRADVVMKFQFTRNNNGASMKSRIESVLRQMLNNSGNLEINPSTEITSLTDQAAANWLINECGAGPDLITLSEQRILGGTEAEEGSWPWQVSLRLNNAHHCGGSLINNMWILTAAHCFRSNSNPRDWIATSGISTTFPKLRMRVRNILIHNNYKSATHENDIALVRLENSVTFTKDIHSVCLPAATQNIPPGSTAYVTGWGAQEYAGHTVPELRQGQVRIISNDVCNAPHSYNGAILSGMLCAGVPQGGVDACQGDSGGPLVQEDSRRLWFIVGIVSWGDQCGLPDKPGVYTRVTAYLDWIRQQTGI

SEQ ID NO: 144619 - protein, 301 aa, Artificial Sequence
  derived and/or modified sequence
MKFQFTRNNNGASMKSRIESVLRQMLNNSGNLEINPSTEITSLTDQAAANWLINECGAGPDLITLSEQRILGGTEAEEGSWPWQVSLRLNNAHHCGGSLINNMWILTAAHCFRSNSNPRDWIATSGISTTFPKLRMRVRNILIHNNYKSATHENDIALVRLENSVTFTKDIHSVCLPAATQNIPPGSTAYVTGWGAQEYAGHTVPELRQGQVRIISNDVCNAPHSYNGAILSGMLCAGVPQGGVDACQGDSGGPLVQEDSRRLWFIVGIVSWGDQCGLPDKPGVYTRVTAYLDWIRQQTGI

SEQ ID NO: 144620 - DNA, 1257 bp, Artificial Sequence
  derived and/or modified sequence
atgtacagacccgccagagtgaccagcaccagcagattcctgaacccctacgtggtgtgcttcatcgtggtggccggcgtggtgatcctggccgtgaccatcgccctgctggtgtacttcctggccttcgaccagaagagctacttctacagaagcagcttccagctgctgaacgtggagtacaacagccagctgaacagccccgccacccaggagtacagaaccctgagcggcagaatcgagagcctgatcaccaagaccttcaaggagagcaacctgagaaaccagttcatcagagcccacgtggccaagctgagacaggacggcagcggcgtgagagccgacgtggtgatgaagttccagttcaccagaaacaacaacggcgccagcatgaagagcagaatcgagagcgtgctgagacagatgctgaacaacagcggcaacctggagatcaaccccagcaccgagatcaccagcctgaccgaccaggccgccgccaactggctgatcaacgagtgcggcgccggccccgacctgatcaccctgagcgagcagagaatcctgggcggcaccgaggccgaggagggcagctggccctggcaggtgagcctgagactgaacaacgcccaccactgcggcggcagcctgatcaacaacatgtggatcctgaccgccgcccactgcttcagaagcaacagcaaccccagagactggatcgccaccagcggcatcagcaccaccttccccaagctgagaatgagagtgagaaacatcctgatccacaacaactacaagagcgccacccacgagaacgacatcgccctggtgagactggagaacagcgtgaccttcaccaaggacatccacagcgtgtgcctgcccgccgccacccagaacatcccccccggcagcaccgcctacgtgaccggctggggcgcccaggagtacgccggccacaccgtgcccgagctgagacagggccaggtgagaatcatcagcaacgacgtgtgcaacgccccccacagctacaacggcgccatcctgagcggcatgctgtgcgccggcgtgccccagggcggcgtggacgcctgccagggcgacagcggcggccccctggtgcaggaggacagcagaagactgtggttcatcgtgggcatcgtgagctggggcgaccagtgcggcctgcccgacaagcccggcgtgtacaccagagtgaccgcctacctggactggatcagacagcagaccggcatctag

SEQ ID NO: 144621 - DNA, 1257 bp, Artificial Sequence
  derived and/or modified sequence
atgtataggcctgctagggttacttcgaccagccggttcctgaacccttatgtcgtctgcttcatcgtggtggcaggagttgtgatcctcgccgtgacaatagcattgttggtgtattttctcgcattcgatcagaaaagctatttctatagatcatcattccagttgctcaacgttgagtataacagtcagttaaactcccccgccactcaggagtaccgcacactgagcggaaggatagaatcactgattacaaaaaccttcaaggagtccaacctccgcaaccagtttattagggctcatgtggctaagctgagacaagacgggtcgggggtgagggctgacgtggtcatgaagttccagtttacgagaaacaataacggagcaagcatgaagagcaggatcgagtccgtgctgagacagatgttaaacaactccggaaatttggagattaatccatcaacggagattacctctctgaccgatcaagctgcggcaaactggctgatcaatgagtgtggggcgggacctgacctaattacgctctcagagcagcgtatcctcggcggcacagaagccgaggaggggagctggccgtggcaggtttccctgagactcaacaacgctcatcattgcggcggatccctaatcaacaacatgtggatattgactgctgctcactgcttcagaagtaacagcaatcctcgcgactggatcgccacttctggcatttcaacaacgttccccaaactacggatgcgcgtgcgtaacattttgattcacaacaactataaatctgctactcacgaaaatgacattgctctggtccgcctcgaaaattctgttacttttaccaaggacattcactctgtctgtctcccagcagctacccaaaacatacctcctggcagtacagcctatgttacaggttggggcgcacaggaatatgccggccacaccgtacccgagctcagacaagggcaggtgcgtattatcagtaacgacgtgtgtaatgcacctcattcatataatggtgcaatcctgtccggcatgctctgcgccggtgtgcctcagggcggtgtcgatgcctgtcagggggacagcggcggacccctcgtgcaggaggacagcaggagactctggttcattgtgggaattgtttcgtggggggaccagtgtggtctacctgacaagccaggtgtgtatacacgagtcactgcatacctcgattggattagacaacagactggtatctag

SEQ ID NO: 144622 - DNA, 1257 bp, Artificial Sequence
  derived and/or modified sequence
atgtacagacctgcccgggtgaccagcaccagccgcttcctgaacccctacgtggtgtgcttcatcgtggtggccggcgtggtgatcctggccgtgaccatcgccctgctggtgtacttcctggcctttgaccagaagagctacttctaccgcagcagcttccagctgctgaatgtggagtacaacagccagctgaacagccctgccacccaggagtaccgcaccctgagcggccgcatcgagagcctcatcaccaagaccttcaaggagagcaacctgaggaaccagttcatccgggcccacgtggccaagctgcggcaggacggcagcggcgtgcgggcagatgtggtgatgaagttccagttcaccaggaacaacaatggagcctccatgaagagcagaattgaatctgtgctgcggcagatgctgaacaacagcggcaacctggagatcaaccccagcacagagatcaccagcctgacagaccaggccgccgccaactggctgatcaatgaatgtggggccggccctgacctgatcaccctgtctgagcagaggatcctgggcggcacagaagctgaggagggctcctggccctggcaggtgtccctgcggctgaacaatgcccaccactgcggcggcagcctcatcaacaacatgtggatcctgacagctgcccactgcttccgcagcaacagcaacccccgggactggatcgccaccagcggcatcagcaccaccttccccaagctgaggatgagggtgaggaacatcctgatccacaacaactacaagagcgccacccatgaaaatgacatcgccctggtgcggctggagaacagcgtgaccttcaccaaggacatccacagcgtgtgcctgcctgctgccacccagaacatccccccaggcagcacagcctacgtgacaggctggggcgcccaggagtatgccggccacacagtgcctgagctgcggcagggccaggtgcgcatcatcagcaatgatgtgtgcaatgccccccacagctacaacggggccatcctgagcggcatgctgtgtgccggcgtgccccagggcggcgtggatgcctgccagggcgacagcggcggccccctggtgcaggaggacagccggcggctgtggttcatcgtgggcatcgtgtcctggggagaccagtgtggcctgcctgacaagccaggagtgtacaccagggtgacagcctacctggactggatccggcagcagacaggcatctag

SEQ ID NO: 144623 - DNA, 1257 bp, Artificial Sequence
  derived and/or modified sequence
atgtaccggcccgcccgggtgaccagcaccagccggttcctgaacccttatgttgtatgttttatcgttgtggctggcgtagtgatcctggccgtcacaatcgccctccttgtttatttccttgcatttgaccagaagagctacttctatcgctcatctttccagctgctcaacgtggagtataactcccagttaaatagtcccgcaacccaagagtataggactttatctgggaggattgagagcttgatcacaaaaacattcaaggaaagcaatctgcggaaccagtttatccgggcacacgttgctaagctgcggcaagatggctcaggtgttagggccgacgtggttatgaagtttcaattcacacgcaataataatggagcttcaatgaaatcgcggattgagtcagtccttcgccagatgctgaataactcaggcaatctagaaatcaatccttctacggagattacgagtctgacggatcaggcagccgctaattggctcatcaatgagtgtggggccgggccagatctgataacgttgtctgaacagagaatactgggggggacggaggctgaagaaggctcctggccatggcaggtaagcctcagacttaataatgcccaccactgtggcggaagtctgattaataatatgtggattctcacagccgcccactgtttccgcagtaacagcaacccacgggattggatcgccacatccggcatctctactacattccctaagctgcggatgagagtccggaacatcttaatccataataactataaatcagccacacacgaaaatgatattgccctcgttagactggagaacagtgtgacattcacaaaggacattcattccgtgtgtctaccagcagccacccagaacattccccccggcagcaccgcttacgtgactgggtggggcgcacaggaatacgccggacacacggtgcccgaactaaggcagggtcaggtgcgtatcatttcaaacgacgtgtgcaacgccccacacagctacaacggggccattctttcaggcatgctttgtgcaggggtgcctcaaggtggcgttgatgcttgccagggcgattctggtgggccacttgttcaggaggactctcggcgcttatggttcattgtcggaatagttagctggggggaccagtgtggactgcccgacaagcctggcgtgtataccagggtgactgcctatctggattggatccggcagcagaccggcatttag

SEQ ID NO: 144624 - DNA, 1257 bp, Artificial Sequence
  derived and/or modified sequence
atgtaccggcctgcccgagtgaccagcactagtcgtttcttgaatccttacgtcgtgtgttttatagtggtggccggtgtcgtgattctggccgtcacgattgccctccttgtttactttctagctttcgatcagaaaagttacttttaccggagctctttccaattgcttaacgtggaatataacagccaactgaattcacctgcaacccaagagtacaggactctgtccggaaggattgagtcactcattactaagacgttcaaagagagcaacctgagaaatcagtttatccgagcccacgtggccaagctaagacaggatgggtctggtgtacgggctgacgtggtcatgaagtttcagtttacccgcaataataatggcgcttccatgaagtcacggatagaatctgttctgcgccagatgctcaacaacagtggaaacctagagattaacccaagtaccgagatcacatccctcactgaccaggcagcggcaaattggttgattaacgaatgtggcgctggccctgacttgatcactttatctgagcagcgcattcttggaggcacagaggctgaagaaggttcctggccttggcaggtatctcttcggttgaataatgctcatcattgcggcggaagtttaattaataacatgtggatcttgaccgccgctcactgcttccggtccaacagcaatcccagggattggatcgccacctcggggatttccacaactttcccaaaactgcggatgcgtgttcggaatattctcattcacaacaattataagtcggccacgcacgagaatgacatcgccctagttcgcctcgaaaactcagttaccttcacaaaagatattcattccgtgtgcctgcccgctgccacgcagaacatcccgcctggaagtaccgcttacgtaactggttggggagcccaggagtacgcaggacacacagtgccggaactccggcagggacaggtgcgcataatctccaacgacgtgtgcaatgccccacattcgtataacggtgccattctaagcggaatgctgtgtgccggtgtgcctcaaggaggggtggacgcctgccagggggactctgggggtccactcgtacaggaggattcgcgcaggctatggttcattgtgggaatcgtctcctggggggaccagtgtggccttccagataagccgggtgtgtacacacgagtgacagcgtaccttgactggatcagacagcagaccggaatatag

SEQ ID NO: 144625 - DNA, 1257 bp, Artificial Sequence
  derived and/or modified sequence
atgtatcggcccgcccgcgtaacatccacctcgaggttcctaaacccgtacgttgtctgcttcattgtggtcgcaggcgtggtgattctcgctgtgactatcgccctcctagtctactttctcgccttcgaccaaaagtcttatttttacagatcaagctttcagctcctgaatgtggagtataacagccagttgaattctcctgccacccaagaatatcgcacgctaagtgggagaatagaaagcctgatcactaagaccttcaaagagagtaacctccgcaaccaatttatccgagctcatgtggctaaattacggcaagatggatccggcgtccgggcagacgtggtgatgaagtttcagttcacacggaacaacaatggggcttccatgaagtcacgcatcgaatccgtcctgcgccagatgctgaataatagcgggaacctggaaatcaatccctccacggagataacatctttaacagatcaggcagcggctaattggctgattaacgagtgtggtgccggaccagatctgattactcttagtgaacagcgaatcttggggggaacagaggcagaagagggatcctggccttggcaagtatcgttacggttaaataacgctcatcattgtggcggaagccttatcaacaatatgtggattctgactgcagcacattgtttcagaagtaattcaaatccaagagattggattgccactagtggaatatcaactaccttccctaaactccgcatgcgcgttaggaacattcttatacacaacaactataaatcggcaacccacgaaaacgatattgccctcgtgcgacttgaaaattcggtgacttttaccaaagacattcatagcgtttgtctgcccgctgccactcagaacattcccccaggttcgaccgcctacgtcacaggctggggtgcccaagaatatgctggtcatacggtcccggaactacgacaggggcaggtgagaattatctctaacgatgtctgtaacgcccctcatagttataatggggcgattctgtctggaatgttatgcgcaggcgttccacaaggcggagtggatgcttgccagggagactccggtggacccttggttcaggaggattcccggagactgtggttcatcgtcgggattgtgtcatggggcgatcagtgcgggctgcctgacaagccaggagtgtatacaagagtgactgcatacctcgactggatccggcagcagacaggaatctag

SEQ ID NO: 144626 - DNA, 1257 bp, Artificial Sequence
  derived and/or modified sequence
atgtaccgaccagctagggtgacttccacaagccgctttcttaacccatatgtcgtttgttttatcgtagttgctggcgtggtaattctggccgtcactatagctctcttagtgtactttctggcattcgatcagaagtcttatttttaccgttctagcttccaattgctcaatgtggagtataacagtcaactcaattcaccagccacacaggaatatcggacactctctggtcgaattgagagtcttatcactaaaacctttaaggaaagcaatctcagaaatcagtttatccgggcacatgttgctaaattacgccaggatggttccggcgtaagagcagacgtagtgatgaaatttcaatttacgagaaataacaacggagctagtatgaaaagtaggatcgagtccgtactgagacaaatgctcaataacagcggtaacctagagatcaatccgtcaacagaaattacatctctgaccgaccaggccgccgccaactggctgattaatgagtgcggcgcgggccccgatttgattaccctgtctgaacagcgaatacttggaggaaccgaagcagaagagggatcttggccttggcaagtgtcacttagattgaacaatgctcaccattgtggaggatcccttattaacaatatgtggattctgaccgctgcacactgtttcaggtcaaacagcaacccacgcgattggatagccacttcaggcattagcacaacattcccaaaactacgaatgagagttaggaacatactcatacataataattataagagcgcgacacatgaaaatgacatcgccctggtgagactagaaaactccgtgacttttacgaaagacattcattccgtctgtctccctgcggcaacccagaatattccgccaggctcaacggcgtatgtcaccggatggggcgctcaggaatatgcaggccataccgttccagaactccgacagggccaggtgcggattatatcaaatgatgtgtgcaatgcgccgcactcttacaacggcgcaatactaagcggtatgctgtgtgccggcgtaccgcaaggcggagtggacgcgtgtcagggtgactcaggaggacctctcgtgcaggaggatagtagaaggctgtggtttatcgtgggtatcgtgtcttggggggatcagtgcggcctacccgacaaaccaggggtttatactcgggtcactgcctatttagactggataagacaacagactgggatttag

SEQ ID NO: 144627 - DNA, 2817 bp, Artificial Sequence
  derived and/or modified sequence
actatagatcacacgtaatacatgagagtcattcatttgagtgggaatctcaaagcagttgagtaggcagaaaaaagaacctcttcattaaggattaaaatgtataggccagcacgtgtaacttcgacttcaagatttctgaatccatatgtagtatgtttcattgtcgtcgcaggggtagtgatcctggcagtcaccatagctctacttgtttactttttagcttttgatcaaaaatcttacttttataggagcagttttcaactcctaaatgttgaatataatagtcagttaaattcaccagctacacaggaatacaggactttgagtggaagaattgaatctctgattactaaaacattcaaagaatcaaatttaagaaatcagttcatcagagctcatgttgccaaactgaggcaagatggtagtggtgtgagagcggatgttgtcatgaaatttcaattcactagaaataacaatggagcatcaatgaaaagcagaattgagtctgttttacgacaaatgctgaataactctggaaacctggaaataaacccttcaactgagataacatcacttactgaccaggctgcagcaaattggcttattaatgaatgtggggccggtccagacctaataacattgtctgagcagagaatccttggaggcactgaggctgaggagggaagctggccgtggcaagtcagtctgcggctcaataatgcccaccactgtggaggcagcctgatcaataacatgtggatcctgacagcagctcactgcttcagaagcaactctaatcctcgtgactggattgccacgtctggtatttccacaacatttcctaaactaagaatgagagtaagaaatattttaattcataacaattataaatctgcaactcatgaaaatgacattgcacttgtgagacttgagaacagtgtcacctttaccaaagatatccatagtgtgtgtctcccagctgctacccagaatattccacctggctctactgcttatgtaacaggatggggcgctcaagaatatgctggccacacagttccagagctaaggcaaggacaggtcagaataataagtaatgatgtatgtaatgcaccacatagttataatggagccatcttgtctggaatgctgtgtgctggagtacctcaaggtggagtggacgcatgtcagggtgactctggtggcccactagtacaagaagactcacggcggctttggtttattgtggggatagtaagctggggagatcagtgtggcctgccggataagccaggagtgtatactcgagtgacagcctaccttgactggattaggcaacaaactgggatctagtgcaacaagtgcatccctgttgcaaagtctgtatgcaggtgtgcctgtcttaaattccaaagctttacatttcaactgaaaaagaaactagaaatgtcctaatttaacatcttgttacataaatatggtttaacaaacactgtttaacctttctttattattaaaggttttctattttctccagagaactatatgaatgttgcatagtactgtggctgtgtaacagaagaaacacactaaactaattacaaagttaacaatttcattacagttgtgctaaatgcccgtagtgagaagaacaggaaccttgagcatgtatagtagaggaacctgcacaggtctgatgggtcagaggggtcttctctgggtttcactgaggatgagaagtaagcaaactgtggaaacatgcaaaggaaaaagtgatagaataatattcaagacaaaaagaacagtatgaggcaagagaaataatatgtatttaaaatttttggttactcaatatcttatacttagtatgagtcctaaaattaaaaatgtgaaactgttgtactatacgtataacctaaccttaattattctgtaagaacatgcttccataggaaatagtggataattttcagctatttaaggcaaaagctaaaatagttcactcctcaactgagacccaaagaattatagatatttttcatgatgacccatgaaaaatatcactcatctacataaaggagagactatatctattttatagagaagctaagaaatatacctacacaaacttgtcaggtgctttacaactacatagtactttttaacaacaaaataataattttaagaatgaaaaatttaatcatcgggaagaacgtcccactacagacttcctatcactggcagttatatttttgagcgtaaaagggtcgtcaaacgctaaatctaagtaacgaattgaaagtttaaagagggggaagagttggtttgcaaaggaaaagtttaaatagcttaatatcaatagaatgatcctgaagacagaaaaaactttgtcactcttcctctctcattttctttctctctctctccccttctcatacacatgcctcccccaccaaagaatataatgtaaattaaatccactaaaatgtaatggcatgaaaatctctgtagtctgaatcactaatattcctgagtttttatgagctcctagtacagctaaagtttgcctatgcatgatcatctatgcgtcagagcttcctccttctacaagctaactccctgcatctgggcatcaggactgctccatacatttgctgaaaacttcttgtatttcctgatgtaaaattgtgcaaacacctacaataaagccatctacttttagggaaagggagttgaaaatgcaaccaactcttggcgaactgtacaaacaaatctttgctatactttatttcaaataaattctttttaaaataa

SEQ ID NO: 144628 - DNA, 1592 bp, Artificial Sequence
  derived and/or modified sequence
aaagcagttgagtaggcagaaaaaagaacctcttcattaaggattaaaatgtatagatcaaaaatcttacttttataggagcagttttcaactcctaaatgttgaatataatagtcagttaaattcaccagctacacaggaatacaggactttgagtggaagaattgaatctctgattactaaaacattcaaagaatcaaatttaagaaatcagttcatcagagctcatgttgccaaactgaggcaagatggtagtggtgtgagagcggatgttgtcatgaaatttcaattcactagaaataacaatggagcatcaatgaaaagcagaattgagtctgttttacgacaaatgctgaataactctggaaacctggaaataaacccttcaactgagataacatcacttactgaccaggctgcagcaaattggcttattaatgaatgtggggccggtccagacctaataacattgtctgagcagagaatccttggaggcactgaggctgaggagggaagctggccgtggcaagtcagtctgcggctcaataatgcccaccactgtggaggcagcctgatcaataacatgtggatcctgacagcagctcactgcttcagaagcaactctaatcctcgtgactggattgccacgtctggtatttccacaacatttcctaaactaagaatgagagtaagaaatattttaattcataacaattataaatctgcaactcatgaaaatgacattgcacttgtgagacttgagaacagtgtcacctttaccaaagatatccatagtgtgtgtctcccagctgctacccagaatattccacctggctctactgcttatgtaacaggatggggcgctcaagaatatgctggccacacagttccagagctaaggcaaggacaggtcagaataataagtaatgatgtatgtaatgcaccacatagttataatggagccatcttgtctggaatgctgtgtgctggagtacctcaaggtggagtggacgcatgtcagggtgactctggtggcccactagtacaagaagactcacggcggctttggtttattgtggggatagtaagctggggagatcagtgtggcctgccggataagccaggagtgtatactcgagtgacagcctaccttgactggattaggcaacaaactgggatctagtgcaacaagtgcatccctgttgcaaagtctgtatgcaggtgtgcctgtcttaaattccaaagctttacatttcaactgaaaaagaaactagaaatgtcctaatttaacatcttgttacataaatatggtttaacaaacactgtttaacctttctttattattaaaggttttctattttctccagagaactatatgaatgttgcatagtactgtggctgtgtaacagaagaaacacactaaactaattacaaagttaacaatttcattacagttgtgctaaatgcccgtagtgagaagaacaggaaccttgagcatgtatagtagaggaacctgcacaggtctgatgggtcagaggggtcttctctgggtttcactgaggatgagaagtaagcaaactgtggaaacatgc

SEQ ID NO: 144629 - RNA, 1257 nt, Artificial Sequence
  derived and/or modified sequence
auguaucggcccgcccgcguaacauccaccucgagguuccuaaacccguacguugucugcuucauuguggucgcaggcguggugauucucgcugugacuaucgcccuccuagucuacuuucucgccuucgaccaaaagucuuauuuuuacagaucaagcuuucagcuccugaauguggaguauaacagccaguugaauucuccugccacccaagaauaucgcacgcuaagugggagaauagaaagccugaucacuaagaccuucaaagagaguaaccuccgcaaccaauuuauccgagcucauguggcuaaauuacggcaagauggauccggcguccgggcagacguggugaugaaguuucaguucacacggaacaacaauggggcuuccaugaagucacgcaucgaauccguccugcgccagaugcugaauaauagcgggaaccuggaaaucaaucccuccacggagauaacaucuuuaacagaucaggcagcggcuaauuggcugauuaacgaguguggugccggaccagaucugauuacucuuagugaacagcgaaucuuggggggaacagaggcagaagagggauccuggccuuggcaaguaucguuacgguuaaauaacgcucaucauuguggcggaagccuuaucaacaauauguggauucugacugcagcacauuguuucagaaguaauucaaauccaagagauuggauugccacuaguggaauaucaacuaccuucccuaaacuccgcaugcgcguuaggaacauucuuauacacaacaacuauaaaucggcaacccacgaaaacgauauugcccucgugcgacuugaaaauucggugacuuuuaccaaagacauucauagcguuugucugcccgcugccacucagaacauucccccagguucgaccgccuacgucacaggcuggggugcccaagaauaugcuggucauacggucccggaacuacgacaggggcaggugagaauuaucucuaacgaugucuguaacgccccucauaguuauaauggggcgauucugucuggaauguuaugcgcaggcguuccacaaggcggaguggaugcuugccagggagacuccgguggacccuugguucaggaggauucccggagacugugguucaucgucgggauugugucauggggcgaucagugcgggcugccugacaagccaggaguguauacaagagugacugcauaccucgacuggauccggcagcagacaggaaucuag

SEQ ID NO: 144630 - RNA, 1257 nt, Artificial Sequence
  derived and/or modified sequence
auguaccgaccagcuagggugacuuccacaagccgcuuucuuaacccauaugucguuuguuuuaucguaguugcuggcgugguaauucuggccgucacuauagcucucuuaguguacuuucuggcauucgaucagaagucuuauuuuuaccguucuagcuuccaauugcucaauguggaguauaacagucaacucaauucaccagccacacaggaauaucggacacucucuggucgaauugagagucuuaucacuaaaaccuuuaaggaaagcaaucucagaaaucaguuuauccgggcacauguugcuaaauuacgccaggaugguuccggcguaagagcagacguagugaugaaauuucaauuuacgagaaauaacaacggagcuaguaugaaaaguaggaucgaguccguacugagacaaaugcucaauaacagcgguaaccuagagaucaauccgucaacagaaauuacaucucugaccgaccaggccgccgccaacuggcugauuaaugagugcggcgcgggccccgauuugauuacccugucugaacagcgaauacuuggaggaaccgaagcagaagagggaucuuggccuuggcaagugucacuuagauugaacaaugcucaccauuguggaggaucccuuauuaacaauauguggauucugaccgcugcacacuguuucaggucaaacagcaacccacgcgauuggauagccacuucaggcauuagcacaacauucccaaaacuacgaaugagaguuaggaacauacucauacauaauaauuauaagagcgcgacacaugaaaaugacaucgcccuggugagacuagaaaacuccgugacuuuuacgaaagacauucauuccgucugucucccugcggcaacccagaauauuccgccaggcucaacggcguaugucaccggauggggcgcucaggaauaugcaggccauaccguuccagaacuccgacagggccaggugcggauuauaucaaaugaugugugcaaugcgccgcacucuuacaacggcgcaauacuaagcgguaugcugugugccggcguaccgcaaggcggaguggacgcgugucagggugacucaggaggaccucucgugcaggaggauaguagaaggcugugguuuaucguggguaucgugucuuggggggaucagugcggccuacccgacaaaccagggguuuauacucgggucacugccuauuuagacuggauaagacaacagacugggauuuag

SEQ ID NO: 144631 - protein, 770 aa, Artificial Sequence
  derived and/or modified sequence
MPASAARPRPGPGQPTASPFPLLLLAVLSGPVSGRVPRSVPRTSLPISEADSCLTRFAVPHTYNYSVLLVDPASHTLYVGARDTIFALSLPFSGERPRRIDWMVPEAHRQNCRKKGKKEDECHNFVQILAIANASHLLTCGTFAFDPKCGVIDVSRFQQVERLESGRGKCPFEPAQRSAAVMAGGVLYAATVKNYLGTEPIITRAVGRAEDWIRTDTLPSWLNAPAFVAAVALSPAEWGDEDGDDEIYFFFTETSRAFDSYERIKVPRVARVCAGDLGGRKTLQQRWTTFLKADLLCPGPEHGRASSVLQDVAVLRPELGAGTPIFYGIFSSQWEGATISAVCAFRPQDIRTVLNGPFRELKHDCNRGLPVVDNDVPQPRPGECITNNMKLRHFGSSLSLPDRVLTFIRDHPLMDRPVFPADGHPLLVTTDTAYLRVVAHRVTSLSGKEYDVLYLGTEDGHLHRAVRIGAQLSVLEDLALFPEPQPVENMKLYHSWLLVGSRTEVTQVNTTNCGRLQSCSECILAQDPVCAWSFRLDECVAHAGEHRGLVQDIESADVSSLCPKEPGERPVVFEVPVATAAHVVLPCSPSSAWASCVWHQPSGVTALTPRRDGLEVVVTPGAMGAYACECQEGGAAHVVAAYSLVWGSQRDAPSRAHTVGAGLAGFFLGILAASLTLILIGRRQQRRRQRELLARDKVGLDLGAPPSGTTSYSQDPPSPSPEDERLPLALAKRGSGFGGFSPPFLLDPCPSPAHIRLTGAPLATCDETSI

SEQ ID NO: 144632 - DNA, 2313 bp, Artificial Sequence
  derived and/or modified sequence
atgcccgccagcgccgccagacccagacccggccccggccagcccaccgccagccccttccccctgctgctgctggccgtgctgagcggccccgtgagcggcagagtgcccagaagcgtgcccagaaccagcctgcccatcagcgaggccgacagctgcctgaccagattcgccgtgccccacacctacaactacagcgtgctgctggtggaccccgccagccacaccctgtacgtgggcgccagagacaccatcttcgccctgagcctgcccttcagcggcgagagacccagaagaatcgactggatggtgcccgaggcccacagacagaactgcagaaagaagggcaagaaggaggacgagtgccacaacttcgtgcagatcctggccatcgccaacgccagccacctgctgacctgcggcaccttcgccttcgaccccaagtgcggcgtgatcgacgtgagcagattccagcaggtggagagactggagagcggcagaggcaagtgccccttcgagcccgcccagagaagcgccgccgtgatggccggcggcgtgctgtacgccgccaccgtgaagaactacctgggcaccgagcccatcatcaccagagccgtgggcagagccgaggactggatcagaaccgacaccctgcccagctggctgaacgcccccgccttcgtggccgccgtggccctgagccccgccgagtggggcgacgaggacggcgacgacgagatctacttcttcttcaccgagaccagcagagccttcgacagctacgagagaatcaaggtgcccagagtggccagagtgtgcgccggcgacctgggcggcagaaagaccctgcagcagagatggaccaccttcctgaaggccgacctgctgtgccccggccccgagcacggcagagccagcagcgtgctgcaggacgtggccgtgctgagacccgagctgggcgccggcacccccatcttctacggcatcttcagcagccagtgggagggcgccaccatcagcgccgtgtgcgccttcagaccccaggacatcagaaccgtgctgaacggccccttcagagagctgaagcacgactgcaacagaggcctgcccgtggtggacaacgacgtgccccagcccagacccggcgagtgcatcaccaacaacatgaagctgagacacttcggcagcagcctgagcctgcccgacagagtgctgaccttcatcagagaccaccccctgatggacagacccgtgttccccgccgacggccaccccctgctggtgaccaccgacaccgcctacctgagagtggtggcccacagagtgaccagcctgagcggcaaggagtacgacgtgctgtacctgggcaccgaggacggccacctgcacagagccgtgagaatcggcgcccagctgagcgtgctggaggacctggccctgttccccgagccccagcccgtggagaacatgaagctgtaccacagctggctgctggtgggcagcagaaccgaggtgacccaggtgaacaccaccaactgcggcagactgcagagctgcagcgagtgcatcctggcccaggaccccgtgtgcgcctggagcttcagactggacgagtgcgtggcccacgccggcgagcacagaggcctggtgcaggacatcgagagcgccgacgtgagcagcctgtgccccaaggagcccggcgagagacccgtggtgttcgaggtgcccgtggccaccgccgcccacgtggtgctgccctgcagccccagcagcgcctgggccagctgcgtgtggcaccagcccagcggcgtgaccgccctgacccccagaagagacggcctggaggtggtggtgacccccggcgccatgggcgcctacgcctgcgagtgccaggagggcggcgccgcccacgtggtggccgcctacagcctggtgtggggcagccagagagacgcccccagcagagcccacaccgtgggcgccggcctggccggcttcttcctgggcatcctggccgccagcctgaccctgatcctgatcggcagaagacagcagagaagaagacagagagagctgctggccagagacaaggtgggcctggacctgggcgccccccccagcggcaccaccagctacagccaggacccccccagccccagccccgaggacgagagactgcccctggccctggccaagagaggcagcggcttcggcggcttcagcccccccttcctgctggacccctgccccagccccgcccacatcagactgaccggcgcccccctggccacctgcgacgagaccagcatctag

SEQ ID NO: 144633 - DNA, 2313 bp, Artificial Sequence
  derived and/or modified sequence
atgcctgcaagtgcggcacggccccgaccggggcctggccaacccaccgcatcccctttcccgttgttattactggctgtgctgtctggacctgtgtccgggagagtgccacgatctgttccccgcacatcactacccatctcagaggcggatagctgcctcacacgttttgccgtcccccacacctataattattctgtcctgttagtagacccagcttcccatacactgtacgtgggagcccgcgataccattttcgcgttatccctgcctttctccggcgagagaccacggcggattgactggatggtacctgaagctcatcggcaaaactgtagaaagaagggcaagaaggaggatgaatgccataacttcgtgcagattctcgctatagcaaatgccagccacctgcttacatgcggaaccttcgctttcgaccctaagtgtggcgtcatagatgtcagtcgatttcagcaggtagaacgcctggagtccggaaggggcaagtgccctttcgaacctgcacagcggtccgccgccgtaatggcagggggcgtcctctatgcggcaacggtgaaaaattatctgggaacagaaccaataattaccagggccgttggcagagccgaggattggatccggacggataccctgccatcttggttaaacgcccctgcgttcgtggcagctgttgcactgtccccagctgagtggggcgacgaggatggcgatgacgaaatttattttttttttacagagacatctagagcctttgactcctacgaacggataaaagtgccaagagtggctcgggtgtgcgccggagacctgggcggacggaaaaccctgcagcagcgatggactaccttcctgaaggctgacctgctctgtccaggacccgagcacggacgtgcaagtagcgtgctccaggatgttgcagtgctgagacccgaactgggagcagggacccccatattctacggtatcttctccagccagtgggaaggggcgaccatttcggccgtgtgcgcctttcgacctcaagatatccgcactgttttgaacggcccttttagggagttgaaacacgattgtaataggggcctaccggtggtcgataatgacgtgccccagccacggcccggggaatgcatcactaataacatgaagttacgacattttggatccagcctgagtctacccgaccgagtgctgaccttcattcgggatcaccccctaatggatcgccctgtgttcccagccgatggccatccccttttagtcacgactgacactgcttacctccgagtggtggcccacagagttacctccctgagcggcaaagagtacgatgtattgtatctgggcactgaggacgggcacctgcaccgcgctgttcgtatcggtgcacagctatccgtcctggaagacctggccctgttcccagagccacaacccgtagagaacatgaaactgtatcatagttggctgctggttggctcaagaacagaggtcacccaagttaacaccaccaactgtggaagacttcagtcttgctcggaatgtattctggctcaagacccagtttgtgcctggtcattccgccttgacgagtgcgttgcacatgctggggagcatagaggactggttcaagacattgaaagcgcagacgtttcctccctgtgccccaaggagcccggagaaagacccgtggtgtttgaggtacccgttgcaaccgctgcacacgtcgttctcccttgctcaccctcatccgcatgggccagctgcgtgtggcaccagccctccggggtgacagcactgactccgcgacgtgacggactggaggtggtagtaaccccaggcgccatgggagcatacgcgtgcgaatgccaagaagggggtgccgcgcacgtggtggccgcgtattccctggtgtggggaagccaacgtgacgcgccatccagagcccatacggtgggcgctggtctggccggattttttttggggattctcgctgccagccttaccctgatactgatcggacggcgacagcagcgcaggcggcagagggagcttctcgcgcgtgacaaagtcggtctcgatttaggcgcaccaccaagcgggaccacttcttactcgcaggatccccctagtcccagtccagaggatgagagacttcctttggcattggcaaagcgcggctccgggtttgggggctttagcccgccatttctcctggatccttgccccagccccgcgcacatacgcctaacaggggctcccttggcaacttgtgatgagaccagcatttag

SEQ ID NO: 144634 - DNA, 2313 bp, Artificial Sequence
  derived and/or modified sequence
atgcctgccagcgctgcccggccccggcccggccctggccagcccacagccagccccttccccctgctgctgctggccgtgctgagcggccctgtgtctggccgggtgcccaggtctgtgcccaggaccagcctgcccatcagcgaggccgacagctgcctgaccaggtttgctgtgccccacacctacaactacagcgtgctgctggtggaccctgccagccacaccctgtatgtgggcgcccgggacaccatctttgccctgagcctgcccttctctggagagcggcccaggagaattgactggatggtgcctgaggcccaccggcagaactgcaggaagaagggcaagaaggaggatgagtgccacaactttgtgcagatcctggccatcgccaatgccagccacctgctgacctgtggcacctttgcctttgaccccaagtgtggggtgattgatgtgagccgcttccagcaggtggagcggctggagagcggccggggcaaatgtccctttgagcccgcccagaggtctgctgctgtgatggccggcggcgtgctgtatgctgccaccgtgaagaactacctgggcacagagcccatcatcaccagggctgtgggccgggcagaggactggatcagaacagacaccctgcccagctggctgaatgccccagcctttgtggccgctgtggccctgagccctgctgagtggggagatgaagatggagatgatgagatctacttcttcttcacagagaccagccgggcctttgacagctatgagcgcatcaaggtgccccgggtggcccgggtgtgtgccggggacctgggcggcaggaagaccctgcagcagcgctggaccaccttcctgaaggctgacctgctgtgccccggccctgagcacggccgggccagctctgtgctgcaggatgtggccgtgctgcggcctgagctgggcgccggcacccccatcttctacggcatcttcagcagccagtgggagggcgccaccatctctgctgtgtgtgccttccggccccaggacatcagaacagtgctgaatggccccttccgggagctgaagcatgactgcaacagaggcctgcctgtggtggacaatgatgtgccccagcccaggcctggagagtgcatcaccaacaacatgaagctgcggcacttcggcagcagcctgagcctgcctgacagagtgctgaccttcatccgggaccaccccctgatggacaggcctgtgtttcctgcagatggccaccccctgctggtgaccacagacacagcctacctgcgggtggtggcccaccgggtgaccagcctgagcggcaaggagtatgatgtgctgtacctgggcacagaagatggccacctgcacagagctgtgcgcatcggggcccagctgtctgtgctggaggacctggccctcttccctgagccccagcctgtggagaacatgaagctgtaccacagctggctgctggtgggcagcaggacagaggtgacccaggtgaacaccaccaactgtggccgcctgcagagctgcagcgagtgcatcctggcccaggaccctgtgtgtgcctggagcttccggctggatgaatgtgtggcccatgctggggagcaccggggcctggtgcaggacattgaatctgcagatgtgagcagcctgtgccccaaggagcccggggagaggcctgtggtgtttgaggtgcctgtggccacagctgcccacgtggtgctgccctgcagccccagcagcgcctgggccagctgtgtgtggcaccagcccagcggcgtgacagccctgacccccaggagagatggcctggaggtggtggtgacccctggggccatgggcgcctatgcctgtgagtgccaggagggcggggccgcccacgtggtggccgcctacagcctggtgtggggcagccagagagatgcccccagccgggcccacacagtgggcgccggcctggccggcttcttcctgggcatcctggccgccagcctgaccctcatcctgattggccggcggcagcagaggcggcggcagcgggagctgctggcccgggacaaggtgggcctggacctgggcgcccctccttctggcaccaccagctacagccaggacccccccagccccagcccagaagatgagcggctgcccctggccctggccaagaggggcagcggctttggaggcttcagcccccccttcctgctggacccctgccccagccctgcccacatccggctgaccggggcccccctggccacctgtgatgagaccagcatctag

SEQ ID NO: 144635 - DNA, 2313 bp, Artificial Sequence
  derived and/or modified sequence
atgcccgccagcgccgcccggccccggcccggccccggccagcccaccgcatccccttttcctctgctgcttcttgctgtgttgagcggacccgtgtccggccgggtcccaaggtcagtgccacggacctccctgccaatctctgaagcggactcttgccttacaagattcgctgtgccgcatacgtacaactactcagtattgctggtcgatcccgcttcacacacattgtatgtgggagccagagatactatctttgcactgtctctgcccttcagtggtgagaggcctagaaggatcgattggatggtgcccgaggctcaccgacagaattgcagaaagaagggcaagaaggaagacgagtgccacaattttgtccagattctagcgatcgcaaatgcgagccatctactgacatgcggtacctttgctttcgatcccaagtgtggagtgatcgacgttagtcgcttccagcaggtggaaaggctggagtccggccgcggcaaatgcccgttcgagcctgctcagcgaagcgcagctgtcatggctggtggggtgctatacgccgccactgttaagaactacctaggcacagagcccatcatcacacgtgccgtgggccgggctgaagactggatccgtacagataccctcccctcttggctcaatgcccccgcctttgtcgccgccgtggcactgtctccggcagagtggggggatgaggatggggatgatgaaatttatttcttttttacagagacgagtcgggcattcgacagttacgagaggatcaaagtgccgagggtagctcgtgtgtgcgcgggcgacctgggcgggaggaagacattgcaacaacgatggactacattcctcaaggcagatttactgtgcccaggcccagagcacggtagagcctccagcgtactccaggatgtggctgttctgcgacctgagctgggggctggcacccctatcttctacggcatcttttcctcccagtgggagggtgctacaatttctgccgtctgcgccttcagaccccaagacatcaggactgtcctgaatggcccattccgagaactaaagcacgactgtaacagaggcttgcccgtcgtggacaacgacgtcccccagcctcgtccaggcgaatgtattaccaacaatatgaaactgcggcactttgggagcagcttgagtctccccgacagggtcttgaccttcattagggaccatcccttgatggacagacctgtgttcccagccgacggccacccactccttgttacaacagacacagcctatctcagggtagttgcccatagagtcacctctctctccggcaaagaatatgacgtgctgtacctgggtaccgaggatggccatctgcatcgagcagtcagaatcggggcacagctaagcgtgctcgaagaccttgcactgttcccagagccacagcctgtcgagaacatgaaactctatcactcatggctgctcgtgggcagcagaacagaagtgacccaggtgaatacaacgaattgcgggcggctgcagagctgttctgaatgcatcctcgctcaggatcccgtgtgcgcctggtcgtttcgcttagacgagtgcgtcgcccacgctggggaacaccggggcctagtccaggatatcgagtccgcagatgtcagctcactctgtcccaaggagcccggagagagacccgtggttttcgaagtgcccgttgcgacagccgcgcacgtggtgctaccatgtagcccctcctcagcttgggcctcttgtgtgtggcatcagccaagcggcgtgaccgctctgacgccccggcgcgacggcctcgaagtagtagtgacaccgggggcgatgggagcatacgcctgcgaatgccaggaagggggggctgcccatgtggtggcagcctacagccttgtgtgggggtcccaacgggacgcgccctcccgagctcacacggtcggcgctggcctagccggtttcttcctcggcatactagctgcatcactgacattaatcctgataggaagaaggcagcagcgccgcagacaacgcgaacttctcgcccgtgacaaagtgggtctcgacctcggagcccccccctctggtaccacgtcctattcacaggacccaccctccccctcacctgaggacgagcggctccccctagccctcgctaagcggggatcgggtttcggaggattctctcccccgtttctgctggatccatgcccgagcccagcacatataagactgacaggcgctcccttggcgacctgtgatgagacctctatctag

SEQ ID NO: 144636 - DNA, 2313 bp, Artificial Sequence
  derived and/or modified sequence
atgcccgctagcgctgccagacccaggccagggccaggccagcccactgcttcccccttcccactcctcctgcttgcggttctttccggtcctgtgagcggacgcgtgccaagaagcgtcccacgtactagcctgcccatcagcgaagctgattcctgcctcacacgctttgctgttccacatacatacaattactccgtcctgctagtggacccagcttcccacacactgtatgtgggggctagggacaccatttttgctctctctctccccttctccggggaaagaccacggagaatcgattggatggtcccagaagcacaccgccagaattgccgcaagaagggtaaaaaggaggatgagtgccacaacttcgtgcagattttggccattgctaatgcttctcacctcctgacctgtggcactttcgcattcgatccaaagtgcggagtaattgacgttagccgctttcagcaggtggagaggctggagtctggccgagggaagtgccccttcgagccagcccaaaggagtgcggctgtcatggccggaggcgttctgtacgccgctacagtgaaaaactaccttgggactgagcccataatcactagagccgtcggccgtgcagaagactggataagaacagatacgctgccctcctggctgaacgctcctgcctttgtcgctgcagtcgccctctctccagcagagtggggggatgaggatggcgatgatgaaatctactttttcttcacggagacctcccgtgcctttgatagctatgagcgaattaaagtaccccgtgtggcacgggtttgcgctggagatctggggggtagaaagacgctccaacaaaggtggactacctttctgaaggctgatctcctctgcccaggtcccgagcatggccgagcctcgagcgtgctacaggatgtggccgtgttgcggccagagcttggcgcaggcacacctatattctacgggatattcagctcacagtgggagggtgctaccatctcagccgtgtgtgcttttcgccctcaggacatccgcaccgtgctgaacggtcccttccgggagctgaaacatgattgcaatcggggtctcccagttgtggacaacgatgtgccccagccacgtcctggggaatgcattacaaataacatgaagctgcgccactttggcagctccctgtcactccccgaccgagtgctgaccttcattcgtgaccatccactcatggacagaccagtttttccggctgatggccatcctctgctggtcaccaccgacaccgcctacttacgggtggtggcccatcgtgttacttcactcagtggcaaggaatatgatgtgctgtatctcggcaccgaagacggacatttgcatcgcgcagtgaggattggcgctcagctctctgtgctcgaagacttagcccttttcccagaacctcagccagtggagaatatgaagctctatcattcgtggcttttggtcggctcacgaactgaggtgacacaggtcaatactactaactgcggtagattgcagagctgttccgaatgtatcctggcccaggaccctgtctgcgcatggtcatttaggttggatgaatgcgtcgctcacgccggagagcatcggggattagtgcaggatattgaatctgctgacgtttcatccctgtgtcccaaggaacctggcgagcggcctgtggtgttcgaggtacccgtggcgaccgccgctcacgtagtgctgccctgttccccctcctctgcatgggccagctgcgtttggcaccagccttctggggtaactgcactgaccccaagacgcgatggacttgaggtcgtggtgaccccaggagccatgggcgcttatgcgtgtgagtgtcaggaaggcggagccgctcacgtcgtggctgcctattccctcgtctggggctcccagagagatgccccaagtagggcacacacagtcggcgctggactcgcagggttctttctgggaattttagcggcaagtttgactctcatccttatcggtaggaggcagcagaggcgacggcaacgggaattgttggctcgcgacaaggtcggactggatctcggcgctcccccttcaggaacaacaagctacagccaagacccaccgtcaccgagcccggaggacgagcgattgccattggctttggcaaaaaggggatctggcttcgggggattttcccctcctttcttacttgacccatgcccatcccccgcacatataagactcaccggtgcccctctagccacctgtgacgaaacttctatatag

SEQ ID NO: 144637 - DNA, 4312 bp, Artificial Sequence
  derived and/or modified sequence
gggggcggagccgggcggtgtttcatccctcagcctcaggctgagccggaccgagccgagaggacccgagtggggccgaggccagtagccccggggccctgagcagaggccgtagcttgcgccgcacccgcggccaggcggagccaaagatgccggcctctgctgcgcggccccgcccgggtcccgggcagcctacagcctcgcccttcccgctactgctgctggcggtgctgagcggcccggtatccggccgcgtcccccgctcggtgcccagaacctcgcttccaatctctgaggctgactcctgtctcacccggttcgcagtccctcacacatacaattactctgttctccttgtggatcctgcctcccacacactttatgttggcgcccgggacaccatcttcgctttatccctgcccttctcaggggagagaccccgcaggattgactggatggttcctgaggctcacagacagaactgtaggaagaaaggcaagaaagaggacgaatgtcacaattttgtccagattctcgccattgccaatgcctctcacctcctcacttgtggcaccttcgcttttgatccgaagtgcggggttattgatgtgtccaggttccagcaggttgaaagacttgagagtggccgggggaaatgtccttttgagccagctcagcggtcagcagctgtaatggctgggggggtcctctatgctgccactgtgaaaaactacctggggacggagccaattatcaccagagcagtgggtcgtgccgaggactggattcggacagataccttgccttcctggctgaacgccccagcctttgtcgcagccgtggccttgagcccagccgaatggggggatgaagatggagacgacgaaatctacttcttctttacggagacttcccgagcatttgactcatacgagcgcattaaagtcccacgggtggcccgtgtgtgtgcgggggacctcgggggccggaagaccctccagcagagatggacgacgtttttgaaagctgacctgctctgtccagggcctgagcatggccgggcctccagtgtcctgcaggatgttgctgtgcttcgacctgagcttggggcagggactcccatcttttatggcatcttttcttcccagtgggagggggctactatctctgctgtctgtgccttccgaccacaagacattcggacagtgctgaatggtcccttcagagaactaaaacatgactgcaacagaggactgcctgtcgtggacaatgatgtgccccagcccagacctggagagtgcatcaccaacaacatgaagctccggcactttggctcatctctctccctgcctgaccgcgtactcaccttcatccgggaccacccactcatggacaggccagtgtttccagctgatggccaccccctgctggtcactacagatacagcctatctcagagtcgtggcccacagggtgaccagcctctcagggaaagagtatgatgtgctctacctggggacagaggatggacacctccaccgagcagtgcggatcggagctcagctcagcgttcttgaagatctggccttattcccagagccacagccagttgagaacatgaaattgtaccacagctggctcctggttggctcccgtactgaggtgacacaagtgaatacaaccaactgtggccgtctccagagctgctcagagtgcatcctggcccaggacccagtctgtgcctggagcttccggctggatgagtgtgtggcccatgccggggagcaccgagggttggtccaagacatagagtcagcagatgtctcctctttgtgtcctaaagagcctggagaacgtccagtagtgtttgaagttcccgtggctacagctgcgcatgtggtcttgccatgttctccaagctcagcatgggcatcctgtgtgtggcaccagcccagtggagtgactgcactcaccccccggcgggatggactggaggtggtggtgaccccaggggccatgggcgcttatgcctgtgaatgtcaggagggtggggcagcccatgtggtagcagcttacagcttggtatggggcagccagcgagatgctccgagccgggcccacacagtgggggcgggactggctggcttcttcttggggattctcgcagcatccctgactctcattctgattggtcggcgtcagcagcgacggcgacagagggaacttctggctagagacaaggtgggcctggacctgggggctccaccttctgggaccacaagctacagccaagaccctccctccccctctcctgaagatgagcggttgccgctggccctggccaagaggggcagtggctttggtggattctcaccacccttcctgcttgatccttgcccaagcccagcccacattcggctaactggggctcctctagccacatgtgatgaaacatccatctagagctgggcaaatgaccactagtgtataagtgatcactggaacggagtgaccactgagatgctgggggtcactgggcctggaagaccatcccagcctctgagttctctttgagtatgagtgattacttggattttagtatctgttctctctgagcctggatgggcttggggccagacctttgcctgattcctgattcccatgagaaatcagaactgctttctgcagcaaatcagggcttccccctaacatctgaactcctgtaaaccttcatccctggccccctatcttgggcccattagttttggggatggggcacagggcatagctatgactttgctttctggttggagcctggccggaaggaagagccctggaggtggttgggggcaaatgtgccctgagtccttggggtggttctgcttattcttcaagtttatctgaatctgtggggagtgcatgatccccatgttgcaatatggagtctctgccctgagatcttccccatctcagttttccttccatgaaagagtacgtgtaaatacatagtgttcataagagacctggccacatgtgcatgaatgactgggccgatgcttaggaatatttatgagggatggggagggagacaattggaatgggggcgttgcctgcagaactttagaccctgtagccatagagggaatggcgttcctttctaaaaggaactgaaacactgcccctctccccattgccccacaaccttactctaaatttgagtagagaaaagctcctaaagtgaccttccgggtgggaagggcagcagtacacatgaccccatccttttctttgtttttaccccctggctgccaccactgccatgtcacagctgctttctctggctggagtgtaggctgtaccccatttccttggctcccattaaaaatcaacaacattctaatgattagggaacaacagaaggggaacagtcataggatatacgagcagtataaagatacgtttgcaatcagtgactactcagggtgacacccttgccctaaagcaggagtcccccctacctggggtccatggactccctgaaattgtatgcaaaatgttgtttgtacatgtgtgtctgtatgtctctgtggggaggttttatggcttttgtcagattttcaaggccttaacaaagttaaaggaccactgccctgaggttactgcactgaggccaagttaggatggcatcactctgtggcagctctccctggacttgccctgcctggaacagggtgatttgctggaatggagttaccactgagatgccaaaggttgctgggtctggaagactgttgtggcctctcagttctctttgagtctgactgactgtggccagtccctggactggtagctgctggaggccttcttgtttctccagtccctggaagctgagctctatgtgtatttgatgacattgtcagctcttaccaaacgtcaagacctcttcctgcttgaccactcgcacatggctctaggcttctcctgctgagtcctggtcttggcctgtgaatgtgcctcgttcatccctggtgcttgagcccctcaagctccagtcaatgatccagtccttcccctttgaagttttctgctctactttccttggcagcagcctgtgaactactcaaaagagtccccttgggtttggaattatcagtggctttgccactagtaaatgtgtgatcttcggcaagtaacctaacctagggacatcagtttactcatctgcgaagtggggataataaaacctacctcagggttgcttcaaggattaaatgagaaaatatgtcaacaataaagacctgtctgtaccaata

SEQ ID NO: 144638 - DNA, 2672 bp, Artificial Sequence
  derived and/or modified sequence
caggcggagccaaagatgccggcctctgctgcgcggccccgcccgggtcccgggcagcctacagcctcgcccttcccgctactgctgctggcggtgctgagcggcccggtatccggccgcgtcccccgctcggtgcccagaacctcgcttccaatctctgaggctgactcctgtctcacccggttcgcagtccctcacacatacaattactctgttctccttgtggatcctgcctcccacacactttatgttggcgcccgggacaccatcttcgctttatccctgcccttctcaggggagagaccccgcaggattgactggatggttcctgaggctcacagacagaactgtaggaagaaaggcaagaaagagggggggtcctctatgctgccactgtgaaaaactacctggggacggagccaattatcaccagagcagtgggtcgtgccgaggactggattcggacagataccttgccttcctggctgaacgccccagcctttgtcgcagccgtggccttgagcccagccgaatggggggatgaagatggagacgacgaaatctacttcttctttacggagacttcccgagcatttgactcatacgagcgcattaaagtcccacgggtggcccgtgtgtgtgcgggggacctcgggggccggaagaccctccagcagagatggacgacgtttttgaaagctgacctgctctgtccagggcctgagcatggccgggcctccagtgtcctgcaggatgttgctgtgcttcgacctgagcttggggcagggactcccatcttttatggcatcttttcttcccagtgggagggggctactatctctgctgtctgtgccttccgaccacaagacattcggacagtgctgaatggtcccttcagagaactaaaacatgactgcaacagaggactgcctgtcgtggacaatgatgtgccccagcccagacctggagagtgcatcaccaacaacatgaagctccggcactttggctcatctctctccctgcctgaccgcgtactcaccttcatccgggaccacccactcatggacaggccagtgtttccagctgatggccaccccctgctggtcactacagatacagcctatctcagagtcgtggcccacagggtgaccagcctctcagggaaagagtatgatgtgctctacctggggacagaggatggacacctccaccgagcagtgcggatcggagctcagctcagcgttcttgaagatctggccttattcccagagccacagccagttgagaacatgaaattgtaccacagctggctcctggttggctcccgtactgaggtgacacaagtgaatacaaccaactgtggccgtctccagagctgctcagagtgcatcctggcccaggacccagtctgtgcctggagcttccggctggatgagtgtgtggcccatgccggggagcaccgagggttggtccaagacatagagtcagcagatgtctcctctttgtgtcctaaagagcctggagaacgtccagtagtgtttgaagttcccgtggctacagctgcgcatgtggtcttgccatgttctccaagctcagcatgggcatcctgtgtgtggcaccagcccagtggagtgactgcactcaccccccggcgggatggactggaggtggtggtgaccccaggggccatgggcgcttatgcctgtgaatgtcaggagggtggggcagcccatgtggtagcagcttacagcttggtatggggcagccagcgagatgctccgagccgggcccacacagtgggggcgggactggctggcttcttcttggggattctcgcagcatccctgactctcattctgattggtcggcgtcagcagcgacggcgacagagggaacttctggctagagacaaggtgggcctggacctgggggctccaccttctgggaccacaagctacagccaagaccctccctccccctctcctgaagatgagcggttgccgctggccctggccaagaggggcagtggctttggtggattctcaccacccttcctgcttgatccttgcccaagcccagcccacattcggctaactggggctcctctagccacatgtgatgaaacatccatctagagctgggcaaatgaccactagtgtataagtgatcactggaacggagtgaccactgagatgctgggggtcactgggcctggaagaccatcccagcctctgagttctctttgagtatgagtgattacttggattttagtatctgttctctctgagcctggatgggcttggggccagacctttgcctgattcctgattcccatgagaaatcagaactgctttctgcagcaaatcagggcttccccctaacatctgaactcctgtaaaccttcatccctggccccctatcttgggcccattagttttggggatggggcacagggcatagctatgactttgctttctggttggagcctggccggaaggaagagccctggaggtggttgggggcaaatgtgccctgagtccttggggtggttctgcttattcttcaagtttatctgaatctgtggggagtgcatgatccccatgttgcaatatggagtctctgccctgagatcttccccatctcagttttccttccatgaaagagtacgtgta

SEQ ID NO: 144639 - protein, 444 aa, Artificial Sequence
  derived and/or modified sequence
MGKGGNQGEGAAEREVSVPTFSWEEIQKHNLRTDRWLVIDRKVYNITKWSIQHPGGQRVIGHYAGEDATDAFRAFHPDLEFVGKFLKPLLIGELAPEEPSQDHGKNSKITEDFRALRKTAEDMNLFKTNHVFFLLLLAHIIALESIAWFTVFYFGNGWIPTLITAFVLATSQAQAGWLQHDYGHLSVYRKPKWNHLVHKFVIGHLKGASANWWNHRHFQHHAKPNIFHKDPDVNMLHVFVLGEWQPIEYGKKKLKYLPYNHQHEYFFLIGPPLLIPMYFQYQIIMTMIVHKNWVDLAWAVSYYIRFFITYIPFYGILGALLFLNFIRFLESHWFVWVTQMNHIVMEIDQEAYRDWFSSQLTATCNVEQSFFNDWFSGHLNFQIEHHLFPTMPRHNLHKIAPLVKSLCAKHGIEYQEKPLLRALLDIIRSLKKSGKLWLDAYLHK

SEQ ID NO: 144640 - protein, 386 aa, Artificial Sequence
  derived and/or modified sequence
MGKGGNQGEGAAEREVSVPTFSWEEIQKHNLRTDRWLVIDRKVYNITKWSIQHPGGQRVIGHYAGEDATDAFRAFHPDLEFVGKFLKPLLIGELAPEEPSQDHGKNSKITEDFRALRKTAEDMNLFKTNHVFFLLLLAHIIALESIAWFTVFYFGNGWIPTLITAFVLATSQAQAGWLQHDYGHLSVYRKPKWNHLVHKFVIGHLKGASANWWNHRHFQHHAKPNIFHKDPDVNMLHVFVLGEWQPIEYGKKKLKYLPYNHQHEYFFLIGPPLLIPMYFQYQIIMTMIVHKNWVDLAWAVSYYIRFFITYIPFYGILGALLFLNFIRFLESHWFVWVTQMNHIVMEIDQEAYRDWFSSQLTATCNVEQSFFNDWFSGHLNFQIEHQ

SEQ ID NO: 144641 - DNA, 3630 bp, Artificial Sequence
  derived and/or modified sequence
attcgttgcccccaccgggatctcctctaggatctcctccggcgcccggggccggagagtgggggagggaggaggtcggacacgtagcctgcctcgcagcagggctcgactccacgcgggagggcgggggagccggggacccgccgctccagcccgctggccttcgaaagatcctcctgggccaatggcaggcggggcgacgcgaccggattggtgcaggcgctctgctgatcgctgtggaaactcgggcggcggggaacgcgggaggatgtggaacccgaggcggggggagccggaggggcgggcagaggaggtgtcgaggccctgagctcccggggagtttttactggaggcaaaagtccatagcgggagggctgagggaggggcggaggaaggggaccgcttgggggcactgggaagccagggatcctccgccaggaaggcagggacactcccgagcgcaggcgagaaggctgggggagggggcgcggtgggaggagtaggagaagacaaaagccgaaagcgaagagggcccgggctgcacacaccggctgggaggcagccgtctgtgcagcgagcagccggcgcggggaggccgcagtgcacggggcgtcacagtcggcaggcagcatggggaagggagggaaccagggcgagggggccgccgagcgcgaggtgtcggtgcccaccttcagctgggaggagattcagaagcataacctgcgcaccgacaggtggctggtcattgaccgcaaggtttacaacatcaccaaatggtccatccagcacccggggggccagcgggtcatcgggcactacgctggagaagatgcaacggatgccttccgcgccttccaccctgacctggaattcgtgggcaagttcttgaaacccctgctgattggtgaactggccccggaggagcccagccaggaccacggcaagaactcaaagatcactgaggacttccgggccctgaggaagacggctgaggacatgaacctgttcaagaccaaccacgtgttcttcctcctcctcctggcccacatcatcgccctggagagcattgcatggttcactgtcttttactttggcaatggctggattcctaccctcatcacggcctttgtccttgctacctctcaggcccaagctggatggctgcaacatgattatggccacctgtctgtctacagaaaacccaagtggaaccaccttgtccacaaattcgtcattggccacttaaagggtgcctctgccaactggtggaatcatcgccacttccagcaccacgccaagcctaacatcttccacaaggatcccgatgtgaacatgctgcacgtgtttgttctgggcgaatggcagcccatcgagtacggcaagaagaagctgaaatacctgccctacaatcaccagcacgaatacttcttcctgattgggccgccgctgctcatccccatgtatttccagtaccagatcatcatgaccatgatcgtccataagaactgggtggacctggcctgggccgtcagctactacatccggttcttcatcacctacatccctttctacggcatcctgggagccctccttttcctcaacttcatcaggttcctggagagccactggtttgtgtgggtcacacagatgaatcacatcgtcatggagattgaccaggaggcctaccgtgactggttcagtagccagctgacagccacctgcaacgtggagcagtccttcttcaacgactggttcagtggacaccttaacttccagattgagcaccacctcttccccaccatgccccggcacaacttacacaagatcgccccgctggtgaagtctctatgtgccaagcatggcattgaataccaggagaagccgctactgagggccctgctggacatcatcaggtccctgaagaagtctgggaagctgtggctggacgcctaccttcacaaatgaagccacagcccccgggacaccgtggggaaggggtgcaggtggggtgatggccagaggaatgatgggcttttgttctgaggggtgtccgagaggctggtgtatgcactgctcacggaccccatgttggatctttctccctttctcctctcctttttctcttcacatctcccccatagcaccctgccctcatgggacctgccctccctcagccgtcagccatcagccatggccctcccagtgcctcctagccccttcttccaaggagcagagaggtggccaccgggggtggctctgtcctacctccactctctgcccctaaagatgggaggagaccagcggtccatgggtctggcctgtgagtctccccttgcagcctggtcactaggcatcacccccgctttggttcttcagatgctcttggggttcataggggcaggtcctagtcgggcagggcccctgaccctcccggcctggcttcactctccctgacggctgccattggtccaccctttcatagagaggcctgctttgttacaaagctcgggtctccctcctgcagctcggttaagtacccgaggcctctcttaagatgtccagggccccaggcccgcgggcacagccagcccaaaccttgggccctggaagagtcctccaccccatcactagagtgctctgaccctgggctttcacgggccccattccaccgcctccccaacttgagcctgtgaccttgggaccaaagggggagtccctcgtctcttgtgactcagcagaggcagtggccacgttcagggaggggccggctggcctggaggctcagcccaccctccagcttttcctcagggtgtcctgaggtccaagattctggagcaatctgacccttctccaaaggctctgttatcagctgggcagtgccagccaatccctggccatttggccccaggggacgtgggccctgcaggctgcaggagggcactggagctgggaggtctcgtcccagccctccccatctcggggctgctgtgtggacggcgctgcctcaggcactctcctgtctgaacctgcccttactgtgtttaacctgttgctccaggatgcattctgataggagggggcggcagggctgggccttgtgacaatctgcctttcaccacatggccttgcctcggtggccctgactgtcagggagggccagggaggcagagcgggagggagtctcaggaggaggctgccctgaggggctggggagggggtacctcatgaggaccagggtggagctgagaagaggaggaggtgggggctggaggtgctggtagctgaggggacgggcaagtgagaggggagggagggaagtcctgggaggatcctgagctgctgttgcagtctaacccactaatcagttcttagattcaggggaagggcaggcaccaacaactcagaatgggggctttcggggagggcgcctagtccccccagctctaagcagccaggagggacctgcatctaagcatctgggttgccatggcaatggcatgccccccagctactgtatgcccccgacccccgcagaggcagaatgaacccatagggagctgatcgtaatgtttatcatgttacttccccacccctacattttttgaaataaaataaggaattttattctca

SEQ ID NO: 144642 - DNA, 1703 bp, Artificial Sequence
  derived and/or modified sequence
aaagcgaagagggcccgggctgcacacaccggctgggaggcagccgtctgtgcagcgagcagccggcgcggggaggccgcagtgcacggggcgtcacagtcggcaggcagcatggggaagggagggaaccagggcgagggggccgccgagcgcgaggtgtcggtgcccaccttcagctgggaggagattcagaagcataacctgcgcaccgacaggtggctggtcattgaccgcaaggtttacaacatcaccaaatggtccatccagcacccggggggccagcgggtcatcgggcactacgctggagaagatgcaacggatgccttccgcgccttccaccctgacctggaattcgtgggcaagttcttgaaacccctgctgattggtgaactggccccggaggagcccagccaggaccacggcaagaactcaaagatcactgaggacttccgggccctgaggaagacggctgaggacatgaacctgttcaagaccaaccacgtgttcttcctcctcctcctggcccacatcatcgccctggagagcattgcatggttcactgtcttttactttggcaatggctggattcctaccctcatcacggcctttgtccttgctacctctcaggcccaagctggatggctgcaacatgattatggccacctgtctgtctacagaaaacccaagtggaaccaccttgtccacaaattcgtcattggccacttaaagggtgcctctgccaactggtggaatcatcgccacttccagcaccacgccaagcctaacatcttccacaaggatcccgatgtgaacatgctgcacgtgtttgttctgggcgaatggcagcccatcgagtacggcaagaagaagctgaaatacctgccctacaatcaccagcacgaatacttcttcctgattgggccgccgctgctcatccccatgtatttccagtaccagatcatcatgaccatgatcgtccataagaactgggtggacctggcctgggccgtcagctactacatccggttcttcatcacctacatccctttctacggcatcctgggagccctccttttcctcaacttcatcaggttcctggagagccactggtttgtgtgggtcacacagatgaatcacatcgtcatggagattgaccaggaggcctaccgtgactggttcagtagccagctgacagccacctgcaacgtggagcagtccttcttcaacgactggttcagtggacaccttaacttccagattgagcaccagtgagcgcggggctgcggggaggcggggagacccacagcgggagggaagtggccgctatcccactgggcagaatgcagaatgtgggggccacctctttgtctctctgacaaggtctctgcccaatatagagcaaggctcccagccagccccgctgaggtcaggagaggggctcccctattccatctccctgagggtcatcctgtgcccctcatgctgtgccacttggtcatagtggttaccacctccctccatgtgggcctgggactttgtagttatggagcctgcacacgcacctcatgaccctgtgaggctagcagggcagggctacgtagcttgcctggaacatcggccgagggactgccctgctgccccttgtccttgcttcacctcttgtcactgtttttttttttttttattaaaaaataaaaaatgta

SEQ ID NO: 144643 - DNA, 1335 bp, Artificial Sequence
  derived and/or modified sequence
atgggcaaaggaggaaatcagggcgaaggcgccgccgagcgggaggtgagcgtgccaactttttcatgggaagagatccagaagcacaacctgagaaccgatcgctggctcgtcattgatcgaaaggtatataatatcaccaaatggagtattcaacatcccggcggacagagggtcatcggacactacgccggtgaggacgccaccgatgctttccgagcttttcatcccgatctggagtttgtggggaagttcctcaaacctctgcttattggcgagctagcccctgaggagccttcacaagaccatggaaaaaattcgaaaataactgaggacttccgggccttacgtaaaacggccgaagatatgaatctttttaagacaaatcacgtgtttttcttattgcttctcgcccacatcatagccctggagtcaatcgcgtggtttactgtgttctactttgggaacggatggatcccgacactcattactgcattcgtcttagccaccagccaggcacaggccgggtggcttcaacacgattatggacatctgtccgtctaccgcaaaccaaagtggaaccatctcgtccacaagttcgttatcggtcacctaaagggggcatcagctaattggtggaatcacaggcactttcagcaccatgccaagcccaatatcttccataaggacccagacgtgaacatgttacacgtctttgtgctgggcgagtggcagccaatcgagtacggtaagaaaaaattgaagtacctcccctataatcatcaacatgagtatttcttccttatcgggccacccctattgattcccatgtattttcagtaccagatcattatgactatgattgtccacaaaaattgggtcgatctcgcatgggctgtatcatactatatccggttcttcattacatacatccccttttacggtatacttggtgcgcttctgtttctcaacttcataagatttctggaatcgcactggtttgtgtgggtgactcagatgaatcatattgtgatggagatcgatcaggaagcgtaccgggattggttttcgtcccagctgacagcaacttgtaatgtggaacagagcttcttcaacgactggttcagcggacacctcaacttccagattgaacatcacctttttcctaccatgccccggcataacttgcacaagatcgcacctctggttaagagcctctgcgctaagcacggaatcgagtaccaggaaaagcccttgctccgcgcattgctagacattattcgtagtctcaaaaaaagtggcaagctgtggttggacgcttatcttcacaagtag

SEQ ID NO: 144644 - DNA, 1161 bp, Artificial Sequence
  derived and/or modified sequence
atggggaaggggggaaatcagggtgaaggggcagccgaacgggaggtgtccgtgcccacattttcttgggaggaaatacagaaacacaatttaagaaccgatcgatggctggtcattgaccggaaggtctacaacatcaccaagtggtcaattcagcaccccggagggcaacgcgtgatcggacattatgcgggtgaagatgcaaccgatgcgttcagagctttccatcctgatctcgagttcgtcggcaaatttttgaagcctcttttgataggcgagctcgctcccgaggaaccatcccaagatcacggaaagaactcgaagatcacagaggatttccgggcacttcgcaagactgcagaagatatgaatctgttcaaaaccaatcatgtgttcttcctcctgctgctcgcacatataattgcgttagaaagcatcgcctggtttactgtcttctacttcggcaacgggtggataccaaccctaataaccgcttttgttttggccacatctcaggcacaagccggttggctccagcacgactacggacatctgtctgtgtaccggaaaccgaagtggaaccacctggtccacaaatttgtcattgggcatctgaagggagccagcgccaactggtggaaccaccgccattttcagcatcatgcgaaacctaacatcttccacaaagatccagacgtgaatatgcttcacgtattcgtgctgggagaatggcagccaatcgagtacggcaagaagaaactcaagtacttaccgtacaaccaccagcacgagtactttttcctgatcgggccccccctgctgatcccaatgtacttccaatatcagattattatgaccatgatagtacacaagaactgggtggatttggcctgggctgttagctactatatccggttttttattacatacatccccttttacggcatactgggggctctgctcttcctcaactttattcgatttttggagagtcactggtttgtctgggttactcagatgaatcatatcgtgatggagatcgaccaggaagcctacagggactggtttagttcacaactcaccgcaacctgtaatgtcgagcaatcttttttcaatgattggttcagtgggcatctgaactttcaaatcgaacaccagtag

SEQ ID NO: 144645 - DNA, 1335 bp, Artificial Sequence
  derived and/or modified sequence
atgggcaaaggaggcaaccagggcgagggcgctgctgagcgggaggtgtctgtgcccaccttctcctgggaggagatccagaagcacaacctgaggacagaccgctggctggtgattgacaggaaggtgtacaacatcaccaagtggagcatccagcaccctgggggccagagggtcatcggccactacgccggggaggatgccacagatgccttccgggccttccacccagacctggagtttgtgggcaagttcctgaagcccctgctgattggagagctggcccctgaggagcccagccaggaccacggcaagaacagcaagatcacagaggacttccgggccctgaggaagacagctgaggacatgaacctcttcaagaccaaccacgtgttcttcctgctgctgctggcccacatcatcgccctggagagcatcgcctggttcaccgtcttctactttggaaatggctggatccccaccctcatcacagcctttgtgctggccaccagccaggcccaggccggctggctgcagcacgactatggccacctgtctgtgtacaggaagcccaagtggaaccacctggtgcacaagtttgtgattggccacctgaagggggccagcgccaactggtggaaccaccgccacttccagcaccacgccaagcccaacatcttccacaaggaccctgatgtgaacatgctgcacgtgtttgtgctgggggagtggcagcccattgaatatggcaagaagaagctgaagtacctgccctacaaccaccagcacgagtacttcttcctgattggcccccccctgctgatccccatgtacttccagtaccagatcatcatgaccatgattgtgcacaagaactgggtggacctggcctgggccgtgtcctactacatccgcttcttcatcacctacatccccttctacggcatcctgggcgccctgctcttcctgaacttcatccgcttcctggagagccactggtttgtgtgggtgacccagatgaaccacatcgtgatggagattgaccaggaggcctacagagactggttcagcagccagctgacagccacctgcaatgtggagcagagcttcttcaatgactggttcagcggccacctgaacttccagatcgagcaccacctgttccccaccatgcccaggcacaacctgcacaagatcgcccccctggtgaagagcctgtgtgccaagcacggcatcgagtaccaggagaagcccctgctgcgggccctgctggacatcatccgcagcctgaagaagagcggcaagctgtggctggatgcctacctgcacaagtag

SEQ ID NO: 144646 - DNA, 1161 bp, Artificial Sequence
  derived and/or modified sequence
atgggcaaaggaggcaaccagggcgagggcgctgctgagcgggaggtgtctgtgcccaccttctcctgggaggagatccagaagcacaacctgaggacagaccgctggctggtgattgacaggaaggtgtacaacatcaccaagtggagcatccagcaccctgggggccagagggtcatcggccactacgccggggaggatgccacagatgccttccgggccttccacccagacctggagtttgtgggcaagttcctgaagcccctgctgattggagagctggcccctgaggagcccagccaggaccacggcaagaacagcaagatcacagaggacttccgggccctgaggaagacagctgaggacatgaacctcttcaagaccaaccacgtgttcttcctgctgctgctggcccacatcatcgccctggagagcatcgcctggttcaccgtcttctactttggaaatggctggatccccaccctcatcacagcctttgtgctggccaccagccaggcccaggccggctggctgcagcacgactatggccacctgtctgtgtacaggaagcccaagtggaaccacctggtgcacaagtttgtgattggccacctgaagggggccagcgccaactggtggaaccaccgccacttccagcaccacgccaagcccaacatcttccacaaggaccctgatgtgaacatgctgcacgtgtttgtgctgggggagtggcagcccattgaatatggcaagaagaagctgaagtacctgccctacaaccaccagcacgagtacttcttcctgattggcccccccctgctgatccccatgtacttccagtaccagatcatcatgaccatgattgtgcacaagaactgggtggacctggcctgggccgtgtcctactacatccgcttcttcatcacctacatccccttctacggcatcctgggcgccctgctcttcctgaacttcatccgcttcctggagagccactggtttgtgtgggtgacccagatgaaccacatcgtgatggagattgaccaggaggcctacagagactggttcagcagccagctgacagccacctgcaatgtggagcagagcttcttcaatgactggttcagcggccacctgaacttccagatcgagcaccagtag

SEQ ID NO: 144647 - DNA, 1335 bp, Artificial Sequence
  derived and/or modified sequence
atgggcaagggcggcaaccagggcgagggcgccgccgagcgggaggtgtctgttcccacattcagctgggaggagattcaaaagcataacctgcggacagatcggtggctggtgattgataggaaagtgtataatatcacaaagtggtccatccagcatccgggcggacagcgagtcatcggacattacgcaggagaagacgccaccgacgcatttcgggcgtttcatccagacttggagtttgtaggcaagttccttaagccacttctcatcggtgagctggccccagaagagccttctcaggatcacggcaaaaatagcaaaataacagaagatttcagggcccttcggaagactgctgaggatatgaacctgtttaagactaaccacgtcttctttctgctgctgctagcgcacattatcgcactggaatccatcgcatggttcacagtcttttacttcggcaacggatggatccctactcttattacagcctttgtacttgctacgtcacaggcccaagctggctggctccagcatgattatggccacttaagcgtgtatcgaaagcccaagtggaatcacctggtccataaatttgtgattggacacctgaaaggtgctagcgcaaattggtggaaccatcgccacttccagcaccatgctaagcctaacattttccacaaggatcccgacgtaaatatgctccatgtatttgtgctcggtgaatggcagccaatcgagtacggtaaaaagaagctaaagtacctgccttacaaccatcagcacgagtacttcttcctaataggaccaccattgctgattcctatgtattttcagtatcagattatcatgacaatgatcgtgcacaaaaattgggtggacttggcctgggcggtgtcctactatatccgttttttcattacgtatattccattctatgggattcttggggcccttctgtttctgaattttatacgcttcctagaaagccactggtttgtctgggtgacacaaatgaaccacatcgtgatggagatcgatcaggaagcatacagagactggttctcaagccagctaactgccacgtgtaacgttgaacagtcattttttaacgactggttctcaggccacctgaacttccagattgagcatcacttatttccaacgatgccaaggcataatcttcacaagatagctcccttagttaaaagcctctgcgctaagcatggcatcgaatatcaagagaaacctttgcttagggcactgttggatattattcgcagtctcaagaaatccggcaagctttggctggacgcatatctccataaatag

SEQ ID NO: 144648 - DNA, 1161 bp, Artificial Sequence
  derived and/or modified sequence
atgggcaagggcggcaaccagggcgagggcgccgccgagcgggaggttagcgtgccaaccttcagctgggaggagattcagaagcacaacctgcggacagatagatggctggtcatagacaggaaagtctataacatcaccaagtggtcaatccagcatcctggtggtcagcgggttataggccactatgcaggagaggacgctactgatgctttccgggccttccatcctgaccttgagtttgttggcaagttcctgaagccccttctcatcggcgagcttgcgcccgaggagccatcacaggaccacgggaaaaactctaaaatcactgaagacttccgcgccttacgcaaaacagcagaagacatgaacctgttcaagaccaatcatgtattttttctgttactgctggcacacatcattgccctcgagagtatagcctggttcaccgtgttttattttgggaacggttggatcccgacattaattaccgcttttgtgctggcgacgtctcaggcacaagccggctggctgcagcacgactacggccatctgtcagtgtacagaaagcccaagtggaaccaccttgtccataaattcgttattggtcatctaaagggagcatccgcgaactggtggaaccataggcacttccagcatcacgctaaacctaacatattccataaagatccggatgtgaacatgttacatgtgttcgtgctcggggagtggcagccaatcgaatacggcaagaaaaagctgaaatacctcccctataatcatcagcacgaatatttctttcttatcgggccccccctcttgatccccatgtatttccaataccagatcattatgaccatgatcgtccataagaattgggtggatctggcatgggctgtgagttactatatccggttttttatcacctatatacccttctatggcattttgggcgcactattgtttctcaatttcatccgatttcttgagagccactggtttgtatgggtaactcagatgaatcacatagtcatggagatcgaccaagaagcctatcgggactggtttagctcacagctgaccgccacctgtaacgtagagcagtcctttttcaacgactggttttcgggacatctcaatttccagattgagcaccagtag

SEQ ID NO: 144649 - DNA, 1335 bp, Artificial Sequence
  derived and/or modified sequence
atggggaagggcggaaatcaaggtgagggcgcagccgaaagagaggtgtccgtgcctacctttagttgggaggagattcagaaacataatctgaggaccgacagatggctggtgatcgatcgaaaggtttacaacattaccaaatggagcatccagcatcctggtggccagagagtcatcggccattacgccggtgaggatgcgactgatgcttttagggcatttcatccggatctcgagtttgttgggaagtttctcaagccgctcctcattggcgaactggctcctgaagaaccctctcaggaccatgggaagaacagtaaaattaccgaggactttagagcacttcgcaagacggccgaagatatgaatctgttcaagaccaatcacgttttttttctattactgctggcacacattatcgcccttgagtcaattgcgtggttcacagtcttctatttcggcaacggatggatacctacgctgatcactgcatttgttctggctacatctcaggcccaggcaggatggctgcaacatgactatggacatctgtctgtgtatcggaagcccaagtggaaccatctcgtacataaattcgtgattggacacctgaagggggcaagcgcgaactggtggaaccacaggcacttccaacatcacgccaaacccaatatcttccacaaagaccccgacgtgaatatgctgcatgtgtttgtgttgggggagtggcagccaatcgagtatggcaaaaaaaaactcaagtatctgccttacaaccaccagcacgagtattttttcctgattgggccacctctccttattcccatgtactttcagtaccagattatcatgacgatgattgtgcacaagaattgggttgaccttgcctgggctgtgtcgtactatataaggttttttataacctatattccattttatggtattcttggcgcactcttgtttctcaattttatccgcttcttggaaagtcattggtttgtgtgggtgacccagatgaatcatatcgtcatggagatcgatcaggaggcttacagagattggttttcttcgcagctgaccgccacttgtaacgtggagcagagcttcttcaacgattggttttctggacacctgaattttcagattgagcaccacctgtttcccaccatgccacggcataacctgcataaaatcgccccacttgtgaagtccctgtgtgcaaagcacggaatcgagtatcaggaaaagcccctgctgagggcattgctcgatataatcaggagccttaagaagtccggaaagctttggctggacgcgtatttgcacaagtag

SEQ ID NO: 144650 - DNA, 1161 bp, Artificial Sequence
  derived and/or modified sequence
atgggaaaaggtggcaaccagggggagggtgcggcagaaagagaagtgagcgtccccaccttctcctgggaggagatccagaagcataatcttcgcacagatcgctggctggtcattgatcggaaggtctacaatattacaaagtggtctattcaacatcccggaggtcagcgagtgatcggacattatgcaggggaagacgcaacagacgcgttcagagcgtttcatcctgatttggaatttgtggggaagttcctgaaacccttgcttattggggaactcgccccagaggagccttcacaagatcatggaaaaaattcaaagattacagaagattttcgggctctgcggaagactgcagaagacatgaacctgtttaagacaaaccatgttttcttcttactcctcctggcacatatcatcgcacttgaatctatcgcatggttcaccgtgttttatttcggaaacggctggatcccaactctcattacagctttcgtcctggcgacgagccaggcccaagcgggttggctgcagcacgattatggtcatctgtctgtctaccgcaagcctaagtggaaccacctggttcataagtttgttattggccatctgaaaggggcttccgctaattggtggaaccatagacacttccagcaccacgcgaagcccaacatattccacaaagaccctgacgttaacatgctgcatgtgtttgtgctcggggagtggcaaccaatcgaatatgggaagaagaaactgaagtatctcccgtataaccatcagcatgaatacttctttctcatcggaccaccccttctgatccctatgtactttcagtaccaaataatcatgactatgatcgttcataagaattgggttgatctggcctgggccgtctcttactatattaggttttttattacttatatccctttttacggcatcttaggagccttacttttcctgaactttatcagatttctggagtcacattggttcgtttgggtgacgcagatgaaccacattgtaatggaaatcgaccaggaggcttaccgcgactggttcagctctcaattaaccgccacttgcaacgttgaacaatctttttttaatgactggttctcagggcatctgaactttcaaattgaacaccagtag

SEQ ID NO: 144651 - DNA, 1335 bp, Artificial Sequence
  derived and/or modified sequence
atgggcaagggcggcaaccagggcgagggcgccgccgagagagaggtgagcgtgcccaccttcagctgggaggagatccagaagcacaacctgagaaccgacagatggctggtgatcgacagaaaggtgtacaacatcaccaagtggagcatccagcaccccggcggccagagagtgatcggccactacgccggcgaggacgccaccgacgccttcagagccttccaccccgacctggagttcgtgggcaagttcctgaagcccctgctgatcggcgagctggcccccgaggagcccagccaggaccacggcaagaacagcaagatcaccgaggacttcagagccctgagaaagaccgccgaggacatgaacctgttcaagaccaaccacgtgttcttcctgctgctgctggcccacatcatcgccctggagagcatcgcctggttcaccgtgttctacttcggcaacggctggatccccaccctgatcaccgccttcgtgctggccaccagccaggcccaggccggctggctgcagcacgactacggccacctgagcgtgtacagaaagcccaagtggaaccacctggtgcacaagttcgtgatcggccacctgaagggcgccagcgccaactggtggaaccacagacacttccagcaccacgccaagcccaacatcttccacaaggaccccgacgtgaacatgctgcacgtgttcgtgctgggcgagtggcagcccatcgagtacggcaagaagaagctgaagtacctgccctacaaccaccagcacgagtacttcttcctgatcggcccccccctgctgatccccatgtacttccagtaccagatcatcatgaccatgatcgtgcacaagaactgggtggacctggcctgggccgtgagctactacatcagattcttcatcacctacatccccttctacggcatcctgggcgccctgctgttcctgaacttcatcagattcctggagagccactggttcgtgtgggtgacccagatgaaccacatcgtgatggagatcgaccaggaggcctacagagactggttcagcagccagctgaccgccacctgcaacgtggagcagagcttcttcaacgactggttcagcggccacctgaacttccagatcgagcaccacctgttccccaccatgcccagacacaacctgcacaagatcgcccccctggtgaagagcctgtgcgccaagcacggcatcgagtaccaggagaagcccctgctgagagccctgctggacatcatcagaagcctgaagaagagcggcaagctgtggctggacgcctacctgcacaagtag

SEQ ID NO: 144652 - DNA, 1161 bp, Artificial Sequence
  derived and/or modified sequence
atgggcaagggcggcaaccagggcgagggcgccgccgagagagaggtgagcgtgcccaccttcagctgggaggagatccagaagcacaacctgagaaccgacagatggctggtgatcgacagaaaggtgtacaacatcaccaagtggagcatccagcaccccggcggccagagagtgatcggccactacgccggcgaggacgccaccgacgccttcagagccttccaccccgacctggagttcgtgggcaagttcctgaagcccctgctgatcggcgagctggcccccgaggagcccagccaggaccacggcaagaacagcaagatcaccgaggacttcagagccctgagaaagaccgccgaggacatgaacctgttcaagaccaaccacgtgttcttcctgctgctgctggcccacatcatcgccctggagagcatcgcctggttcaccgtgttctacttcggcaacggctggatccccaccctgatcaccgccttcgtgctggccaccagccaggcccaggccggctggctgcagcacgactacggccacctgagcgtgtacagaaagcccaagtggaaccacctggtgcacaagttcgtgatcggccacctgaagggcgccagcgccaactggtggaaccacagacacttccagcaccacgccaagcccaacatcttccacaaggaccccgacgtgaacatgctgcacgtgttcgtgctgggcgagtggcagcccatcgagtacggcaagaagaagctgaagtacctgccctacaaccaccagcacgagtacttcttcctgatcggcccccccctgctgatccccatgtacttccagtaccagatcatcatgaccatgatcgtgcacaagaactgggtggacctggcctgggccgtgagctactacatcagattcttcatcacctacatccccttctacggcatcctgggcgccctgctgttcctgaacttcatcagattcctggagagccactggttcgtgtgggtgacccagatgaaccacatcgtgatggagatcgaccaggaggcctacagagactggttcagcagccagctgaccgccacctgcaacgtggagcagagcttcttcaacgactggttcagcggccacctgaacttccagatcgagcaccagtag

SEQ ID NO: 144653 - protein, 530 aa, Artificial Sequence
  derived and/or modified sequence
MSRSPQRALPPGALPRLLQAAPAAAPRALLPQWPRRPGRRWPASPLGMKVFRRKALVLCAGYALLLVLTMLNLLDYKWHKEPLQQCNPDGPLGAAAGAAGGSWGRPGPPPAGPPRAHARLDLRTPYRPPAAAVGAAPAAAAGMAGVAAPPGNGTRGTGGVGDKRQLVYVFTTWRSGSSFFGELFNQNPEVFFLYEPVWHVWQKLYPGDAVSLQGAARDMLSALYRCDLSVFQLYSPAGSGGRNLTTLGIFGAATNKVVCSSPLCPAYRKEVVGLVDDRVCKKCPPQRLARFEEECRKYRTLVIKGVRVFDVAVLAPLLRDPALDLKVIHLVRDPRAVASSRIRSRHGLIRESLQVVRSRDPRAHRMPFLEAAGHKLGAKKEGVGGPADYHALGAMEVICNSMAKTLQTALQPPDWLQGHYLVVRYEDLVGDPVKTLRRVYDFVGLLVSPEMEQFALNMTSGSGSSSKPFVVSARNATQAANAWRTALTFQQIKQVEEFCYQPMAVLGYERVNSPEEVKDLSKTLLRKPRL

SEQ ID NO: 144654 - DNA, 1593 bp, Artificial Sequence
  derived and/or modified sequence
atgtctcgaagcccccaaagagctctgcctccgggggcactaccgagactgttgcaggctgctcccgccgccgccccccgtgccctgctgccccagtggccacggaggcccggacgacgctggccagcctccccactgggcatgaaggttttcaggcggaaggccctggtgttatgcgccgggtatgctctgctcttagttcttaccatgctgaacctgttggactacaaatggcataaagagcccttgcagcagtgtaaccccgacggtccactgggcgcagctgccggtgcagcagggggctcatggggccggcccggccctcctccagccggcccccctagagcccatgcgagactggatctacgtacaccttaccgaccccccgccgcggccgtgggagccgctcccgctgccgctgccggaatggcaggggtagctgctccccctggaaacggaacgcgggggaccggaggggtgggagacaaaagacagttggtgtatgtgtttactacctggcgcagcggctcctccttcttcggagaactatttaatcagaatccggaagtgttcttcctgtatgagccagtatggcacgtatggcaaaaactatacccgggcgatgctgtctcacttcagggggctgccagagacatgctgagcgcgctgtatagatgcgacctgtctgtgttccaattatactcaccagccgggtccggaggcaggaacctgactaccctgggaatatttggagctgccacgaataaagtggtctgtagcagtccactgtgccctgcttataggaaggaggtggtcggcctggtcgacgaccgcgtttgcaaaaagtgtcctccccagcgtctggcaaggtttgaggaagaatgcagaaagtatcgcacacttgtgatcaagggcgtcagggtcttcgatgtggccgtgttggccccgctgttgagagatcctgctctcgacctgaaagtgatccacttagtgagagatccccgggccgtggcttcgtctagaattcgcagcaggcatggccttataagagagtccctccaggtggtcagaagtagggatccccgggctcaccgaatgccttttctggaagctgcagggcacaagttgggcgctaaaaaagagggcgtaggtggccctgcggactatcacgcactgggcgcgatggaggtgatctgcaatagcatggccaaaactctacaaaccgccttgcagcctcccgattggctgcaaggacactacctggtggttcgctatgaggacctggtaggcgatccggtgaaaaccttgaggcgggtttatgattttgtggggctgctcgtttcccctgagatggaacagtttgcgctcaatatgacttccggttctggctcttcctctaagcctttcgtagtctccgctagaaacgctacacaggctgccaatgcttggagaaccgccctgacatttcaacagatcaaacaagtggaggagttctgttaccagccaatggctgtgctcggttatgagcgagttaattcacctgaagaggtgaaagacctcagtaagaccctgcttcggaagcctaggttgtag

SEQ ID NO: 144655 - DNA, 1593 bp, Artificial Sequence
  derived and/or modified sequence
atgagccgcagcccccagagggccctgcccccaggggccctgccccggctgctgcaggccgccccagctgctgccccccgggccctgctgccccagtggcccaggaggcctggaagacgctggccagccagccccctgggcatgaaggtgttccggaggaaggccctggtgctgtgtgccggctacgccctgctgctggtgctgaccatgctgaacctgctggactacaagtggcacaaggagcccctgcagcagtgcaacccagatggccccctgggcgctgctgctggagctgctgggggctcctggggccggcccggccccccacctgctggccccccccgggcccacgcccggctggacctgcggaccccctaccggcccccagctgctgctgtgggcgccgccccagctgctgctgctggcatggccggcgtggccgcccctcctggaaatggcacccggggcactggaggagtgggggacaagaggcagctggtgtatgtgttcaccacctggaggagcggcagcagcttcttcggggagctgttcaaccagaaccctgaggtgttcttcctgtatgagcctgtgtggcacgtgtggcagaagctgtacccaggagatgctgtgtccctgcagggcgccgcccgggacatgctgagcgccctgtaccgctgtgacctgtctgtgttccagctgtacagccctgctggcagcggcggcaggaacctgaccaccctgggcatctttggagctgccaccaacaaggtggtgtgcagcagccccctgtgcccagcctacaggaaggaggtggtgggcctggtggatgacagagtgtgcaagaagtgccccccccagaggctggccaggtttgaggaggagtgcaggaagtaccgcaccctggtgatcaagggcgtgcgggtgtttgatgtggccgtgctggcccccctgctgcgggaccctgccctggacctgaaggtgatccacctggtgcgggaccccagggctgtggccagcagccgcatccgcagccgccacggcctcatccgggagagcctgcaggtggtgcgcagccgggacccccgggcccacaggatgcccttcctggaggccgccggccacaagctgggcgccaagaaggagggcgtgggcggccctgctgactaccacgccctgggcgccatggaggtgatctgcaacagcatggccaagaccctgcagacagccctgcagcccccagactggctgcagggccactacctggtggtgcgctatgaggacctggtgggggaccctgtgaagaccctgcggcgggtgtatgactttgtgggcctgctggtgtccccagagatggagcagtttgccctgaacatgaccagcggcagcggcagcagcagcaagccctttgtggtgtctgccagaaatgccacccaggccgccaatgcctggaggacagccctgaccttccagcagatcaagcaggtggaggagttctgctaccagcccatggctgtgctgggctatgaaagagtgaacagccctgaggaggtgaaggacctgagcaagaccctgctgaggaagccccggctgtag

SEQ ID NO: 144656 - DNA, 1593 bp, Artificial Sequence
  derived and/or modified sequence
atgagccggagcccccagcgggccctgccccccggcgccctgcccagactgcttcaggccgcccctgcagcagcccccagggccctcctcccgcagtggcccagacgtccaggccgtcgttggcccgcctctccattagggatgaaagtgtttcgacgcaaagctttagttctgtgcgctggctacgcgctgttactagtcctcacaatgctgaatctacttgactacaagtggcacaaggagcctctacagcaatgtaacccagatggaccactcggtgctgccgccggagccgctggagggagttgggggcgtcccggccctcccccagctgggccaccccgtgctcatgccaggcttgatctgaggacaccgtatcgtcccccagcagcagctgtcggcgccgcacctgctgccgctgccggcatggcaggcgtggctgcccctccaggcaacgggacaagaggaactggtggcgtcggagacaaacggcagttggtctacgtttttacaacttggcgaagcggctcctcctttttcggtgagctgtttaatcagaaccctgaagtgtttttcctctatgagcctgtgtggcacgtgtggcagaaactgtaccctggagatgccgtgtctttgcagggggcagcccgcgatatgctgtctgccctgtacagatgtgacctcagcgtgtttcaattgtactctccagcaggatccggcggtaggaacctgacaaccctgggtatcttcggcgctgcaactaacaaagtcgtttgttcctcccccctctgcccggcatatcgcaaagaagttgtgggtctggtggatgatcgtgtctgtaaaaagtgtcctccgcagaggctggcacgcttcgaagaagaatgtcgaaagtaccgaaccctagtcatcaaaggcgttcgtgtgtttgacgtcgccgtgctcgctcctctgctacgggatccagcgttggatctaaaggtgatccatctggtgcgagacccacgggccgtggcatcttctagaatccggtcacggcacgggctcatccgggagtcactccaggtggtaagatcccgggacccaagagcccatcgcatgcccttcctggaggctgctggccataagctgggcgccaagaaagagggcgtcggtggacctgctgactaccacgcgctcggcgcaatggaagtgatttgcaactctatggctaaaacacttcagactgcgcttcaacccccagattggttgcagggacactatctcgtggtcagatatgaagatcttgtcggcgacccagtcaagactcttcggcgcgtctatgatttcgtcggcctgttagtttcgccggaaatggagcaattcgcactcaatatgacatccggcagcggctcatccagtaaacccttcgtggtcagcgcacgcaacgcaacccaggccgcaaatgcatggcgaactgctctgacttttcaacagataaagcaggtagaagaattctgctatcagcccatggcggtgctgggctatgaaagagtgaactcaccggaagaggtcaaagatcttagtaaaacactcttaagaaaaccccgtttgtag

SEQ ID NO: 144657 - DNA, 1593 bp, Artificial Sequence
  derived and/or modified sequence
atgtctcgctctccccaaagagctttgccaccaggtgcactccctcggctgctgcaggccgctcctgccgcagccccaagggcgctccttcctcagtggccccgacgtccaggcaggcggtggcctgctagccccttggggatgaaagtgttccgtcggaaagctttggtgttatgcgccggatatgctttactgctcgtactaaccatgctcaacctgctggactacaaatggcacaaagaaccgctacagcagtgcaatccggacgggccactcggagcagcagccggagcagctggtggaagctgggggaggccaggtcctccccctgcgggaccacccagagcccacgcaagactcgatctccgcacaccgtatagacccccagctgctgcagtgggtgctgcccctgcagctgccgcagggatggcaggcgtggcagctcccccaggcaacggaacacgaggaaccggaggagtgggcgacaagcgccagctcgtgtatgtgttcacaacctggaggtctggttcaagctttttcggagagctgtttaatcaaaatcccgaggtgttcttcttatatgaaccggtgtggcacgtgtggcagaaactttatcccggtgacgctgtgtcccttcagggggctgccagagacatgttgagcgccctgtatcggtgcgaccttagcgtgttccagctgtattcgcccgctggatcggggggtaggaacttgactacactgggtatcttcggcgcagccacaaacaaagtggtctgttcctcccctctttgtcccgcataccgaaaggaagtcgtcggcttagtcgatgaccgtgtgtgcaaaaagtgtccaccccagagacttgctagatttgaggaagaatgtcgtaagtacaggaccctggtcatcaagggtgtgagagtcttcgatgtggcggtcctggcacccctcttgcgggatcctgccttggatttgaaggtaatccatctcgtgcgagacccacgggcagtggcctcctccagaatacgttctcgccacggacttataagagagtctctgcaggttgtgagatctagagaccccagggcccatcgtatgccttttctcgaagctgctgggcacaaactcggagctaaaaaagaaggggtcggcggaccggctgattaccacgccctgggggcaatggaagtcatttgcaactccatggcaaagactcttcagactgctctccagccccctgactggcttcaggggcactaccttgtggtccgctatgaagaccttgtgggagatcccgtgaagacattacgcagagtttacgacttcgtgggactcctagtcagtccagagatggaacaattcgcccttaatatgacatcaggatcgggatcgtccagcaagcctttcgttgtgtccgcacgaaacgctacccaagcagccaacgcgtggcggaccgcgctcactttccaacagattaaacaggtggaagaattttgctatcagccaatggcggtccttggatacgagagagtaaactcacctgaggaggtcaaagatttgagcaaaacattgctccgcaagcctcgcctctag

SEQ ID NO: 144658 - DNA, 3526 bp, Artificial Sequence
  derived and/or modified sequence
cgcagaggtgtcctcagtgcccggagaggttggcagtgtcggccccgagggaagcgtggagcggacggccgacaggggatttctgcccaaacttcatcaccaactctttctgagagcaaaaacatggggccgagtccggcagctgcacgcagaatccaactctctggcagctctcggcaccgacgagctccagatcccgcgttcgcatcccggcgctttgcgcgcagagctaagccttcggacccgtggactgcagcccccgcgcgtcgcggtaaagcgggtcgcgtctccagcccccgaggcgcagcgacggtgggagccggctcggcgttgggggcgggggcggggccggcgaagggggagggctgcgcggcggaggggaggagccgcggcgacagacggcggcgcgcaccaaccgggcgccggctggcaggagccgcgcagaggctggtccgagcgcgttgcgggcgcccggcgtaaggggagtcgggtagcagcatcctcctgggcgccgctttcgcgcggcggcggcggctgcggcggggtctttctttgcttaaatacctcgttggccagaagcgctggtaccgggggcgggttgggtcgggtcgggcagtgctgcacacctgggtttccttgcctagagctgtgtgttcggggtcctttggtccagtcggaggctgcggagcggcgggggttgcctgcgctgtccgcccgggcatcctcccggtgatggaagcagccgccgccgccgctgcggggtcgcgctgtgccccatccaccgctgccagagaggtgggaaaattcgccgcacggaggccgaaagcgagaggggctgcgccgctatgccgggagctgagtcccatataagccgcccccagccatcgcccccagccggcttcgttcccctgagcgagacaggaagctgcggtcccgagaaagcggaggagacgtcgctggagccgggaggcgccgggttcggcggagcgcggagcggggctctgggccgcgtgaaagtttttcttcccgagccgcagggcgcccgctgcccggaaactgcccagggataagtcggccgactccccagacccctcgaaggtgcggggacccccagcggaagcgagagggagcgaaatcgaggaacgagtgacagccggacagtccgccgggcggtgatccggggccgctcccgggcgcgccctcggctccaggtcctacccggagccgctgccatgggagagccagccttgggcgctggggaccagccgccgcgcccgcctcggagtcgcggcccgagtcccggcgccagcagccagcccgctgcgtccccttcccgggctgcagggctgcctccgccgcgccgccggcccggattgtgcctgtgatgagccgcagcccgcagcgagctctgcccccgggcgcgctccctcggctgctccaggctgcgcctgcagccgcgccgcgtgccctgctcccgcagtggccccggcgcccaggacgccgctggcccgcgtcccctctcggaatgaaggtgttccgtaggaaggcgctggtgttgtgcgcgggctatgcactgctgctggtgctcactatgctcaacctcctggactacaagtggcacaaggagccgctgcagcagtgcaaccccgatgggccgctgggtgccgcagcgggggcagccggaggcagctgggggcgcccagggccgcctccggccgggccgccccgtgctcatgcccgtttggacctccgcactccttaccgccctcccgctgccgccgtcggggcggctcctgcagccgcggcagggatggcgggggttgcggcccctccaggcaatggcactcggggcaccgggggcgtcggggacaagcggcagctggtgtacgtgttcaccacgtggcgctctggctcgtcgttcttcggcgagctattcaaccagaatcccgaggtgttctttctctacgagccagtgtggcatgtatggcaaaaactgtatccgggggacgccgtttccctgcagggggcagcgcgggacatgctgagcgctctttaccgctgcgacctctctgtcttccagttgtatagccccgcgggcagcggggggcgcaacctcaccacgctgggcatcttcggcgcagccaccaacaaggtggtgtgctcgtcaccactctgccccgcctaccgcaaggaggtcgtggggttggtggacgaccgcgtgtgcaagaagtgcccgccacagcgcctggcgcgtttcgaggaggagtgccgcaagtaccgcacactagtcataaagggtgtgcgcgtcttcgacgtggcggtcttggcgccactgctgcgagacccggccctggacctcaaggtcatccacttggtgcgtgatccccgcgcggtggcgagttcacggatccgctcgcgccacggcctcatccgtgagagcctacaggtggtgcgcagccgagacccgcgagctcaccgcatgcccttcttggaggccgcgggccacaagcttggcgccaagaaggagggcgtgggcggccccgcagactaccacgctctgggcgctatggaggtcatctgcaatagtatggctaagacgctgcagacagccctgcagccccctgactggctgcagggccactacctggtggtgcggtacgaggacctggtgggagaccccgtcaagacactacggagagtgtacgattttgtgggactgttggtgagccccgaaatggagcagtttgccctgaacatgaccagtggctcgggctcctcctccaagcctttcgtggtatctgcacgcaatgccacgcaggccgccaatgcctggcggaccgccctcaccttccagcagatcaaacaggtggaggagttttgctaccagcccatggccgtcctgggctatgagcgggtcaacagccctgaggaggtcaaagacctcagcaagaccctgcttcggaagccccgtctctaaaaggggttcccaggagacctgattccctgtggtgatacctataaagaggatcgtagtgtgtttaaataaacacagtccagactcaaacggaggaagcccacatattctattatagatatataaataatcacacacacacttgctgtcaatgttttgagtcagtgcatttcaaggaacagccacaaaatacacacccctaagaaaaggcaagacttgaacgttctgaccaggtgcccctcttcttctttgccttctcttgtcctctttctcctatttcttaccctgtcctccacctgccttccattttgaagtgggatgttaatgaaatcaagttccagtaacccaaatcttgtttacaaaatattcgtggtatctgtgaacatgttaagagtaatttggatgtgggggtgggggtggagaaaggggaagtggtccagaaacaaaaagccccattgggcatgataagccgaggaggcattcttctaaagcagacttttgtgtaaaaagcaaaggttacatgtgagtattaataaagaagataataaataa

SEQ ID NO: 144659 - DNA, 1593 bp, Artificial Sequence
  derived and/or modified sequence
atgagcagaagcccccagagagccctgccccccggcgccctgcccagactgctgcaggccgcccccgccgccgcccccagagccctgctgccccagtggcccagaagacccggcagaagatggcccgccagccccctgggcatgaaggtgttcagaagaaaggccctggtgctgtgcgccggctacgccctgctgctggtgctgaccatgctgaacctgctggactacaagtggcacaaggagcccctgcagcagtgcaaccccgacggccccctgggcgccgccgccggcgccgccggcggcagctggggcagacccggccccccccccgccggcccccccagagcccacgccagactggacctgagaaccccctacagaccccccgccgccgccgtgggcgccgcccccgccgccgccgccggcatggccggcgtggccgccccccccggcaacggcaccagaggcaccggcggcgtgggcgacaagagacagctggtgtacgtgttcaccacctggagaagcggcagcagcttcttcggcgagctgttcaaccagaaccccgaggtgttcttcctgtacgagcccgtgtggcacgtgtggcagaagctgtaccccggcgacgccgtgagcctgcagggcgccgccagagacatgctgagcgccctgtacagatgcgacctgagcgtgttccagctgtacagccccgccggcagcggcggcagaaacctgaccaccctgggcatcttcggcgccgccaccaacaaggtggtgtgcagcagccccctgtgccccgcctacagaaaggaggtggtgggcctggtggacgacagagtgtgcaagaagtgccccccccagagactggccagattcgaggaggagtgcagaaagtacagaaccctggtgatcaagggcgtgagagtgttcgacgtggccgtgctggcccccctgctgagagaccccgccctggacctgaaggtgatccacctggtgagagaccccagagccgtggccagcagcagaatcagaagcagacacggcctgatcagagagagcctgcaggtggtgagaagcagagaccccagagcccacagaatgcccttcctggaggccgccggccacaagctgggcgccaagaaggagggcgtgggcggccccgccgactaccacgccctgggcgccatggaggtgatctgcaacagcatggccaagaccctgcagaccgccctgcagccccccgactggctgcagggccactacctggtggtgagatacgaggacctggtgggcgaccccgtgaagaccctgagaagagtgtacgacttcgtgggcctgctggtgagccccgagatggagcagttcgccctgaacatgaccagcggcagcggcagcagcagcaagcccttcgtggtgagcgccagaaacgccacccaggccgccaacgcctggagaaccgccctgaccttccagcagatcaagcaggtggaggagttctgctaccagcccatggccgtgctgggctacgagagagtgaacagccccgaggaggtgaaggacctgagcaagaccctgctgagaaagcccagactgtag

SEQ ID NO: 144660 - protein, 651 aa, Artificial Sequence
  derived and/or modified sequence
MSGVRAVRISIESACEKQVHEVGLDGTETYLPPLSMSQNLARLAQRIDFSQGSGSEEEEAAGTEGDAQEWPGAGSSADQDDEEGVVKFQPSLWPWDSVRNNLRSALTEMCVLYDVLSIVRDKKFMTLDPVSQDALPPKQNPQTLQLISKKKSLAGAAQILLKGAERLTKSVTENQENKLQRDFNSELLRLRQHWKLRKVGDKILGDLSYRSAGSLFPHHGTFEVIKNTDLDLDKKIPEDYCPLDVQIPSDLEGSAYIKVSIQKQAPDIGDLGTVNLFKRPLPKSKPGSPHWQTKLEAAQNVLLCKEIFAQLSREAVQIKSQVPHIVVKNQIISQPFPSLQLSISLCHSSNDKKSQKFATEKQCPEDHLYVLEHNLHLLIREFHKQTLSSIMMPHPASAPFGHKRMRLSGPQAFDKNEINSLQSSEGLLEKIIKQAKHIFLRSRAAATIDSLASRIEDPQIQAHWSNINDVYESSVKVLITSQGYEQICKSIQLQLNIGVEQIRVVHRDGRVITLSYQEQELQDFLLSQMSQHQVHAVQQLAKVMGWQVLSFSNHVGLGPIESIGNASAITVASPSGDYAISVRNGPESGSKIMVQFPRNQCKDLPKSDVLQDNKWSHLRGPFKEVQWNKMEGRNFVYKMELLMSALSPCLL

SEQ ID NO: 144661 - protein, 621 aa, Artificial Sequence
  derived and/or modified sequence
MSGVRAVRISIESACEKQVHEVGLDGTETYLPPLSMSQEWPGAGSSADQDDEEGVVKFQPSLWPWDSVRNNLRSALTEMCVLYDVLSIVRDKKFMTLDPVSQDALPPKQNPQTLQLISKKKSLAGAAQILLKGAERLTKSVTENQENKLQRDFNSELLRLRQHWKLRKVGDKILGDLSYRSAGSLFPHHGTFEVIKNTDLDLDKKIPEDYCPLDVQIPSDLEGSAYIKVSIQKQAPDIGDLGTVNLFKRPLPKSKPGSPHWQTKLEAAQNVLLCKEIFAQLSREAVQIKSQVPHIVVKNQIISQPFPSLQLSISLCHSSNDKKSQKFATEKQCPEDHLYVLEHNLHLLIREFHKQTLSSIMMPHPASAPFGHKRMRLSGPQAFDKNEINSLQSSEGLLEKIIKQAKHIFLRSRAAATIDSLASRIEDPQIQAHWSNINDVYESSVKVLITSQGYEQICKSIQLQLNIGVEQIRVVHRDGRVITLSYQEQELQDFLLSQMSQHQVHAVQQLAKVMGWQVLSFSNHVGLGPIESIGNASAITVASPSGDYAISVRNGPESGSKIMVQFPRNQCKDLPKSDVLQDNKWSHLRGPFKEVQWNKMEGRNFVYKMELLMSALSPCLL

SEQ ID NO: 144662 - DNA, 1956 bp, Artificial Sequence
  derived and/or modified sequence
atgagcggggttagagcagtgcgcataagtatcgagtccgcatgtgagaaacaagtacatgaggttggactggacggcaccgagacctatctgccaccgctcagtatgtcacagaacctggcacgactagctcagcggatcgatttttcccagggcagcgggtctgaggaagaagaagccgccggcactgagggcgacgcccaggagtggcctggcgcgggcagctcagctgaccaggacgatgaagagggcgtggtaaaatttcagccttccttgtggccatgggatagcgttcggaacaatttgcgcagcgcactgaccgagatgtgtgtgctgtatgacgtgctgagtatagtccgtgataaaaaatttatgactttagaccccgtatctcaggatgctctgccaccgaaacagaatccacagacccttcagttgatctcgaagaagaaaagtctggcgggcgcggcacagatattgctgaaaggagctgagagactgactaagagtgttacagaaaatcaggagaataaactgcagcgggacttcaattccgaactcctgcggctgcgacagcactggaaactgcggaaagtaggtgataaaattctgggggatctctcctaccggtcagcagggtccttgtttccccaccatgggaccttcgaagtgatcaagaacacagacttggatcttgataagaagatcccagaggactattgtccccttgacgtacaaatcccctctgacctcgaagggagcgcgtatatcaaagttagcattcagaagcaggctccagacattggtgacctgggaacagtaaatctgtttaaaaggcctttgcctaagagcaagccaggttccccccattggcagacaaagttggaagcagcacaaaatgttttgctatgtaaggagatcttcgcccagctcagtcgcgaggcggtccagatcaagtcacaagtcccgcatattgtagtgaaaaaccagatcatttcacaacctttcccttctcttcagctgagtatctcactgtgccatagcagcaacgataagaaatctcagaaatttgcgaccgaaaagcaatgccccgaggaccatctttatgtgttggaacataacctgcacctcctcataagagagtttcacaagcagacattatcgagcatcatgatgcctcaccctgcctccgctccctttggtcataagagaatgcggttgtccggcccacaggccttcgataaaaatgaaattaacagcctccaatcaagcgaaggccttttagagaagatcataaagcaggctaaacacatattcctccggagccgtgccgccgccactatcgactctctggcgagcaggattgaagatccacaaatccaagcccactggagtaacattaacgatgtgtacgaaagtagcgtaaaggtcttgataactagccagggctatgaacagatatgcaaatccatccaactgcagctcaatattggggtggagcagatccgcgtggttcaccgggacggcagggtgattaccctgagctatcaagagcaggagcttcaggacttcctgctgagccagatgtctcagcatcaggtgcatgccgtccaacaacttgccaaggtcatgggctggcaagtcttatcctttagtaaccatgttggactgggcccaattgagtctatagggaacgctagtgcgattactgtagcttctccctctggcgattatgctattagcgtccgaaatgggccagaatcgggaagcaaaattatggtgcagttcccacggaatcagtgcaaagacctgccaaaatcagacgtattgcaagacaacaaatggtcccatttaagagggcccttcaaggaagtgcagtggaataagatggagggtagaaattttgtctataagatggagttactcatgtcagccttgtctccatgcctcttgtag

SEQ ID NO: 144663 - DNA, 1866 bp, Artificial Sequence
  derived and/or modified sequence
atgtccggcgtccgggcagtgagaatcagcattgagagcgcctgtgagaagcaggtccatgaggtcggactggacgggaccgagacttatctccctcccttatcaatgtcacaggaatggccgggtgccggcagctctgctgaccaggacgacgaggaaggagtagtgaaatttcagccctccctgtggccatgggattcagtaagaaataatctgcggtccgccctgacggagatgtgtgtgctttatgatgtcctctcaatcgttcgcgataaaaagttcatgactcttgacccagtgagccaggacgctttgcccccaaagcagaacccccagacccttcaactgatctccaaaaagaaatccctcgctggggcggcgcagatactcctgaaaggcgctgagaggctgacaaagtccgtaactgaaaaccaggaaaataagctccagagagacttcaatagcgaactgttaaggcttagacaacactggaaattgcgaaaggttggagataaaatcctgggcgacctgtcataccgtagcgcaggatccttgtttccacaccatggtactttcgaagttataaagaatacagatttagaccttgacaaaaaaatccccgaggactattgccccctagatgtccaaattccttctgacctcgagggatctgcttatatcaaggtcagcatccagaagcaggctccggacatcggtgatctgggaaccgtgaatctgtttaagcggccgctgccaaagagcaagccaggctcgccacactggcagacaaagcttgaagcagcacagaacgtgttgctttgtaaagagattttcgctcagcttagcagggaagcggtgcagatcaagtcccaagtacctcatatcgtggtgaagaaccagatcatctcccaaccttttccgagtctccagttgtctatatctctatgtcacagtagcaatgacaagaagtcacaaaagtttgcaaccgagaagcaatgccctgaggaccatctgtacgttcttgagcacaatctgcacctgctcatcagagagttccacaaacagactctgtctagcatcatgatgcctcacccagcatccgcacctttcgggcacaaacgcatgaggttgagcgggccacaggcatttgacaagaacgaaataaattcgctgcagagcagtgaaggcttgctagagaagatcataaaacaagcaaagcacatattcctgcggtcccgtgctgcggccactattgactcattggccagccgaatcgaagatcctcagatccaggcccattggtcgaacataaatgatgtgtacgaatcttccgttaaagtcctcatcacgagccagggctacgagcagatttgtaagtccattcagttgcagctgaatatcggcgtcgaacaaatcagggttgtgcatagagatggtagggtcattactttatcctatcaagagcaagaactgcaggactttctcttgtcccagatgtcacagcatcaagtgcacgcagtgcagcaactcgctaaagtgatggggtggcaggttctttcgttcagtaatcacgtgggactaggcccgatcgaatccatcgggaacgcttcagcgatcaccgttgcgagcccctcgggggattacgctatctcagtgaggaacggccccgagagtggttcaaaaatcatggtgcagttcccgcgcaatcagtgcaaagatcttcctaagtctgatgtgttgcaggacaacaagtggtcccatctgcgggggcctttcaaggaggtgcagtggaataagatggagggcagaaacttcgtgtataagatggaattgctgatgtcagcattgtccccctgccttctctag

SEQ ID NO: 144664 - DNA, 438 bp, Artificial Sequence
  derived and/or modified sequence
atgagcggagtccgcgccgtccgcattagcattgaatccgcctgcgagaagcaagttcatgaagtggggctggatggtaccgagacctaccttcctcccttgtctatgtctcagaatctagccaggctcgcacaacgtattgacttcagccagggatccggaagcgaggaggaggaagctgcgggcaccgaaggcgacgcacaagaatggccgggagccggatcctccgccgaccaagacgatgaggagggggtggtgaagttccaaccatcactctggccttgggacagcgtacgcaacaacctccgatcagccttaaccgagatgtgtgtactgtacgacgttctgtctatcgtgagggataagaagtttatgaccctcgaccctgtttcacaagatgcactcccaccgaagcaggtctttgtcgactttaactag

SEQ ID NO: 144665 - DNA, 1956 bp, Artificial Sequence
  derived and/or modified sequence
atgtctggagtgcgggctgtgcgcatcagcattgaaagtgcctgtgagaagcaggtgcatgaggtgggcctggatggaacagagacctacctgccccccctgtccatgagccagaacctggcccggctggcccagagaattgacttcagccagggcagcggcagcgaggaggaggaggccgccggcacagaaggagatgcccaggagtggccaggagctggcagcagcgctgaccaggatgatgaggagggcgtggtgaagttccagcccagcctgtggccctgggacagcgtgaggaacaacctgcggagcgccctgacagagatgtgtgtgctgtatgatgtgctgagcatcgtgcgggacaagaagttcatgaccctggaccctgtgtcccaggatgccctgccccccaagcagaacccccagaccctgcagctgatcagcaagaagaagagcctggccggggccgcccagatcctgctgaagggagctgagcggctgaccaagtctgtgacagagaaccaggagaacaagctgcagagggacttcaacagcgagctgctgcggctgcggcagcactggaagctgaggaaggtgggggacaagatcctgggggacctgagctacagatctgctggcagcctcttcccccaccacggcacctttgaggtgatcaagaacacagacctggacctggacaagaagatccctgaggactactgccccctggatgtgcagatccccagcgacctggagggcagcgcctacatcaaggtgtccatccagaagcaggccccagacatcggggacctgggcaccgtgaacctcttcaagaggcccctgcccaagagcaagccaggcagcccccactggcagaccaagctggaggccgcccagaatgtgctgctgtgcaaggagatctttgcccagctgagccgggaggccgtgcagatcaagagccaggtgccccacatcgtggtgaagaaccagatcatcagccagcccttccccagcctgcagctgagcatcagcctgtgccacagcagcaatgacaagaagagccagaagtttgccacagagaagcagtgcccagaggaccacctgtatgtgctggagcacaacctgcacctgctgatccgggagttccacaagcagaccctgagcagcatcatgatgccccacccagccagcgcccccttcggccacaagaggatgaggctgagcggcccccaggcctttgacaagaatgagatcaacagcctgcagagcagcgagggcctgctggagaagatcatcaagcaggccaagcacatcttcctgcggagcagagctgctgccaccatcgacagcctggccagcagaattgaggacccccagatccaggcccactggagcaacatcaatgatgtgtatgagagctctgtgaaggtgctgatcaccagccagggctatgagcagatctgcaagagcatccagctgcagctgaacattggagtggagcagatccgggtggtgcacagagatggccgggtcatcaccctgagctaccaggagcaggagctgcaggacttcctgctgagccagatgagccagcaccaggtgcatgctgtgcagcagctggccaaggtgatgggctggcaggtgctgtccttcagcaaccacgtgggcctgggccccatcgagagcattggaaatgccagcgccatcaccgtggccagccccagcggggactatgccatctctgtgagaaatggacctgagagcggcagcaagatcatggtgcagttccccaggaaccagtgcaaggacctgcccaagagtgatgtgctgcaggacaacaagtggagccacctgcggggccccttcaaggaggtgcagtggaacaagatggagggcaggaactttgtgtacaagatggagctgctgatgtctgccctgagcccctgcctgctgtag

SEQ ID NO: 144666 - DNA, 1866 bp, Artificial Sequence
  derived and/or modified sequence
atgtctggagtgcgggctgtgcgcatcagcattgaaagtgcctgtgagaagcaggtgcatgaggtgggcctggatggaacagagacctacctgccccccctgtccatgagccaggagtggccaggagctggcagcagcgctgaccaggatgatgaggagggcgtggtgaagttccagcccagcctgtggccctgggacagcgtgaggaacaacctgcggagcgccctgacagagatgtgtgtgctgtatgatgtgctgagcatcgtgcgggacaagaagttcatgaccctggaccctgtgtcccaggatgccctgccccccaagcagaacccccagaccctgcagctgatcagcaagaagaagagcctggccggggccgcccagatcctgctgaagggagctgagcggctgaccaagtctgtgacagagaaccaggagaacaagctgcagagggacttcaacagcgagctgctgcggctgcggcagcactggaagctgaggaaggtgggggacaagatcctgggggacctgagctacagatctgctggcagcctcttcccccaccacggcacctttgaggtgatcaagaacacagacctggacctggacaagaagatccctgaggactactgccccctggatgtgcagatccccagcgacctggagggcagcgcctacatcaaggtgtccatccagaagcaggccccagacatcggggacctgggcaccgtgaacctcttcaagaggcccctgcccaagagcaagccaggcagcccccactggcagaccaagctggaggccgcccagaatgtgctgctgtgcaaggagatctttgcccagctgagccgggaggccgtgcagatcaagagccaggtgccccacatcgtggtgaagaaccagatcatcagccagcccttccccagcctgcagctgagcatcagcctgtgccacagcagcaatgacaagaagagccagaagtttgccacagagaagcagtgcccagaggaccacctgtatgtgctggagcacaacctgcacctgctgatccgggagttccacaagcagaccctgagcagcatcatgatgccccacccagccagcgcccccttcggccacaagaggatgaggctgagcggcccccaggcctttgacaagaatgagatcaacagcctgcagagcagcgagggcctgctggagaagatcatcaagcaggccaagcacatcttcctgcggagcagagctgctgccaccatcgacagcctggccagcagaattgaggacccccagatccaggcccactggagcaacatcaatgatgtgtatgagagctctgtgaaggtgctgatcaccagccagggctatgagcagatctgcaagagcatccagctgcagctgaacattggagtggagcagatccgggtggtgcacagagatggccgggtcatcaccctgagctaccaggagcaggagctgcaggacttcctgctgagccagatgagccagcaccaggtgcatgctgtgcagcagctggccaaggtgatgggctggcaggtgctgtccttcagcaaccacgtgggcctgggccccatcgagagcattggaaatgccagcgccatcaccgtggccagccccagcggggactatgccatctctgtgagaaatggacctgagagcggcagcaagatcatggtgcagttccccaggaaccagtgcaaggacctgcccaagagtgatgtgctgcaggacaacaagtggagccacctgcggggccccttcaaggaggtgcagtggaacaagatggagggcaggaactttgtgtacaagatggagctgctgatgtctgccctgagcccctgcctgctgtag

SEQ ID NO: 144667 - DNA, 438 bp, Artificial Sequence
  derived and/or modified sequence
atgtctggagtgcgggctgtgcgcatcagcattgaaagtgcctgtgagaagcaggtgcatgaggtgggcctggatggaacagagacctacctgccccccctgtccatgagccagaacctggcccggctggcccagagaattgacttcagccagggcagcggcagcgaggaggaggaggccgccggcacagaaggagatgcccaggagtggccaggagctggcagcagcgctgaccaggatgatgaggagggcgtggtgaagttccagcccagcctgtggccctgggacagcgtgaggaacaacctgcggagcgccctgacagagatgtgtgtgctgtatgatgtgctgagcatcgtgcgggacaagaagttcatgaccctggaccctgtgtcccaggatgccctgccccccaagcaggtgtttgtggacttcaactag

SEQ ID NO: 144668 - DNA, 4874 bp, Artificial Sequence
  derived and/or modified sequence
gcaccgtgattcaccggaagcgctctagggaaccctggagcttccgcgcctgcccagttttgctccgaaagacttaccgaggagggagcttgcggtgcgttctgggaaagttgctgggccagctcctttgtttccagtctgagcgttgcgttcggtttcccgagggtcttctgaggcaccgcggctgcgggcttctgagttcccggctctccgcagggaagcctcctcttcgtacctcgttttttggctcgtggggggtcctcccaccgctggccgacgcagccagcatgtccggggtgcgcgcagtgcggatcagcatcgaatcggcctgcgagaagcaggtccatgaggtgggcctggatggcaccgagacgtacctgcccccgctgtccatgtcgcagaatctggcgcgtctggcccagcggatagacttcagccagggttcgggctccgaggaggaggaggcggcggggaccgagggcgacgcgcaggagtggccgggcgccgggtccagcgcagaccaggacgacgaggaaggagtggtaaaatttcagccttccctttggccttgggactcagtgaggaacaatttgagaagtgccctgacagagatgtgtgttctctatgatgttctcagtattgttagggataaaaaatttatgactcttgatcctgtctctcaggatgcacttcctccaaaacagaatcctcagacgttgcaattgatatctaaaaagaagtcacttgctggagcagcacaaatcttattgaagggggcagaaagactgactaaatcagttaccgaaaaccaagaaaacaagctacaaagagacttcaattctgagcttttgcgattacggcaacactggaaacttcgaaaagttggagataaaattctcggagatctgagctacagaagtgcaggatctctctttcctcatcatggtacatttgaagtaataaagaatacagatctcgatctggataaaaagatacctgaagattactgtcctcttgatgtccaaattcctagtgatttagaggggtctgcatatatcaaggtttcaatacaaaaacaggctccagatataggtgacctcggcacagttaacctcttcaaacgacctttgcccaaatccaaaccaggttccccacattggcagacaaaattagaagcggcacagaatgttctcttatgtaaagaaatttttgcacagctctctcgggaagctgttcaaattaaatcacaagtccctcacattgtggtgaaaaaccagattatctctcagccctttccgagcttgcagttatctatttctttgtgccattcctcaaatgataagaaatcccaaaaatttgctactgagaagcaatgtccggaggaccacctttatgtcctagagcataatttgcatctactgattagagagtttcataaacagaccttgagttccatcatgatgcctcatccagcaagtgcaccttttggccacaagagaatgagactttcgggtcctcaagcttttgataaaaatgaaattaattcattacagtccagtgaagggcttctggaaaaaataattaaacaagcaaagcatatttttctaaggagtagagctgctgcaaccattgacagcttagcaagccgaattgaggatcctcagatacaggctcattggtcaaatatcaatgatgtttatgaatctagtgtgaaagttttaatcacatcacaaggctatgaacaaatatgcaagtccattcaactgcaattgaatattggagttgagcagattcgagttgtacatagagatggaagagtaattacactgtcttatcaggagcaggagctacaggattttcttctgtctcagatgtcacagcaccaggtacatgcagttcagcaactcgccaaggttatgggctggcaagtactgagcttcagtaatcatgtgggacttggacctatagagagcattggtaatgcatctgccatcacggtggcctccccaagtggtgactatgctatttcagttcgtaatggacctgaaagtggcagcaagattatggttcagtttcctcgtaaccaatgtaaagaccttccaaaaagtgatgttttacaagataacaaatggagtcatcttcgtgggccattcaaagaagttcagtggaataaaatggaaggtcgaaattttgtttataaaatggagctgcttatgtctgcacttagcccttgtctactatgattttttccagatgtttcctaaagaagtttccagaaactttgacttgaaatgtttgcagatcaactataagcacaaagaagagataacttccaaaagagtgctgtttttaaaaataataattaggaaatgtttatttagcactttcaaacttttcactttataaatgacaagtgctttgaaatgcagaagtttatgtacagttgtatatacagtatgacaagatgtaaaataatatgtttttcatgcagtttaaaatattactaacttaagggtttctatgtgctttttaaaatattccttctttgatgttgacatcaaataaagtatgtggtttaaaaaaatctccaaatacctttttttccccccaaatactttctaaactttttttttttgagatggtatctcactctgtagcccagtctggagtgcagtggtgtgatcatggttcactgcagtcttgacctcccaggcttaggtgatccttctgtctcagccttccgagtagctgggaccacaggcatgcacaaccacgcctggctaatttttgtattttttataaagacagggtttttccatgttgcccaggctggtttcgaactcggctcaagtgatctacctgcctctgcctcccaaagtgctaggattacaggcgtgagccaccatgcccagcctactctaaattattgataacctcttcctccagttgtctcctttaagctttcctgggtctaacctacataggtaatttaagaacatcctcagaaaggacagctgaaggcaataggaggcagattatctctttagggcgtcctcaagtttttttggtctgttctcccacttgattgacctcaccagttgagacacctagtgtatggctcatgcccagccttccacctgggattctccagcctccacccagcagccctggattgctttctccaattaaggcctttccatcagctctctgctttttcaaagcgaaaaaactaatggattagtgggttatcttttccaaggaacaggtttgcacttcttggaaaaagtgcctaaagtgtgcccattaatatgaggatagatttaggctcataagccttttggtaacactgaaagtagtatcatataggcaagctctccttataagtaaggctttcaatttttaaaacagacatcctgctttaacaatttgtaagatgactgtgcagtaataaaagtcctttgtatttctccaccgtgttttcattaaagaaaaatggagcttgtgggccacgatagaacaactttgtgcttttttccccttctgatcaagatcttgcatctttctatccatggaaattaaaataattggtatgaatttgcagttatttaaaaatcttgagtgcttcaaaaattattgttgcctgcaaaatttgccttggtcaataggctaatctgcacaattccactcacataaggagtcttttatgtgattttgaaggctcaggctagaagagtgagtctgagacttttgctgaatgaccagtttttgtttatataaacttctcccattgcagattgatactttggtaaactaataaaaatgaattcctaaaatgaaattttgaaaagatacaaaataaaagccccatttatttgattataacttgattaaattgcatcaaatactagaatttatagacagagtctcactctgttccccaggctggagtgcagcagcactgttttggctcactgcaacctctgcctcctgggttcaaatgactctcatgcctcagcctcccgagtaactgggattacaggtgtgtgccaccacgaccgtctaatttttgtaattttgataagagggttttgccatcttggccaggctggtcttgaactcctggcctcaattgatccgcccacctcggcctcccaaagtgctaggattacaggcataagccacagtgcccagcccccccaaatataaacatttctgaatgctttattttttatttctctgcttgtcatgaatcagtaacaaatcatggaccaggaccacaccttgagtagaatggctgagaatacatgtgcagatactaccgtctgttcttttaaaccccatctgagtagagtgggataactgaagactttacgttcttcatgtcttactttccctgtttggtacgtcgctgtagtgagtagccagtaccgacctaaagaattgtagaaactaaagcaaatgtgtgggaaaatggtagcttagttgctgtggtagcaattcttatgccttgtatttatttacattttctagtttaatgttttaacctgaatttcctggagtttgaaggatgtgctatggaaacttgggagacagtttgaagaaaaccaattagcccctcaacaagtattaacaggttggcaaggagctgtgtttgaatcttggctctgctactggcttgctgtatgaacttggcaaggattctctgtgaacttgtttccttatatataaatgaagatagaggtgcctcctctactaacctcagtggtgattgagaagtttcagtaacgttggtaataaatgttaaattctaaagtactacataaatataaagcattaagcaagtgtgcttctaagagtcaagccaattagaaaaa

SEQ ID NO: 144669 - DNA, 2432 bp, Artificial Sequence
  derived and/or modified sequence
agttttgctccgaaagacttaccgaggagggagcttgcggtgcgttctgggaaagttgctgggccagctcctttgtttccagtctgagcgttgcgttcggtttcccgagggtcttctgaggcaccgcggctgcgggcttctgagttcccggctctccgcagggaagcctcctcttcgtacctcgttttttggctcgtggggggtcctcccaccgctggccgacgcagccagcatgtccggggtgcgcgcagtgcggatcagcatcgaatcggcctgcgagaagcaggtccatgaggtgggcctggatggcaccgagacgtacctgcccccgctgtccatgtcgcaggagtggccgggcgccgggtccagcgcagaccaggacgacgaggaaggagtggtaaaatttcagccttccctttggccttgggactcagtgaggaacaatttgagaagtgccctgacagagatgtgtgttctctatgatgttctcagtattgttagggataaaaaatttatgactcttgatcctgtctctcaggatgcacttcctccaaaacagaatcctcagacgttgcaattgatatctaaaaagaagtcacttgctggagcagcacaaatcttattgaagggggcagaaagactgactaaatcagttaccgaaaaccaagaaaacaagctacaaagagacttcaattctgagcttttgcgattacggcaacactggaaacttcgaaaagttggagataaaattctcggagatctgagctacagaagtgcaggatctctctttcctcatcatggtacatttgaagtaataaagaatacagatctcgatctggataaaaagatacctgaagattactgtcctcttgatgtccaaattcctagtgatttagaggggtctgcatatatcaaggtttcaatacaaaaacaggctccagatataggtgacctcggcacagttaacctcttcaaacgacctttgcccaaatccaaaccaggttccccacattggcagacaaaattagaagcggcacagaatgttctcttatgtaaagaaatttttgcacagctctctcgggaagctgttcaaattaaatcacaagtccctcacattgtggtgaaaaaccagattatctctcagccctttccgagcttgcagttatctatttctttgtgccattcctcaaatgataagaaatcccaaaaatttgctactgagaagcaatgtccggaggaccacctttatgtcctagagcataatttgcatctactgattagagagtttcataaacagaccttgagttccatcatgatgcctcatccagcaagtgcaccttttggccacaagagaatgagactttcgggtcctcaagcttttgataaaaatgaaattaattcattacagtccagtgaagggcttctggaaaaaataattaaacaagcaaagcatatttttctaaggagtagagctgctgcaaccattgacagcttagcaagccgaattgaggatcctcagatacaggctcattggtcaaatatcaatgatgtttatgaatctagtgtgaaagttttaatcacatcacaaggctatgaacaaatatgcaagtccattcaactgcaattgaatattggagttgagcagattcgagttgtacatagagatggaagagtaattacactgtcttatcaggagcaggagctacaggattttcttctgtctcagatgtcacagcaccaggtacatgcagttcagcaactcgccaaggttatgggctggcaagtactgagcttcagtaatcatgtgggacttggacctatagagagcattggtaatgcatctgccatcacggtggcctccccaagtggtgactatgctatttcagttcgtaatggacctgaaagtggcagcaagattatggttcagtttcctcgtaaccaatgtaaagaccttccaaaaagtgatgttttacaagataacaaatggagtcatcttcgtgggccattcaaagaagttcagtggaataaaatggaaggtcgaaattttgtttataaaatggagctgcttatgtctgcacttagcccttgtctactatgattttttccagatgtttcctaaagaagtttccagaaactttgacttgaaatgtttgcagatcaactataagcacaaagaagagataacttccaaaagagtgctgtttttaaaaataataattaggaaatgtttatttagcactttcaaacttttcactttataaatgacaagtgctttgaaatgcagaagtttatgtacagttgtatatacagtatgacaagatgtaaaataatatgtttttcatgcagtttaaaatattactaacttaagggtttctatgtgctttttaaaatattccttctttgatgttgacatcaaataaagtatgtggttt

SEQ ID NO: 144670 - DNA, 2278 bp, Artificial Sequence
  derived and/or modified sequence
agttttgctccgaaagacttaccgaggagggagcttgcggtgcgttctgggaaagttgctgggccagctcctttgtttccagtctgagcgttgcgttcggtttcccgagggtcttctgaggcaccgcggctgcgggcttctgagttcccggctctccgcagggaagcctcctcttcgtacctcgttttttggctcgtggggggtcctcccaccgctggccgacgcagccagcatgtccggggtgcgcgcagtgcggatcagcatcgaatcggcctgcgagaagcaggtccatgaggtgggcctggatggcaccgagacgtacctgcccccgctgtccatgtcgcagaatctggcgcgtctggcccagcggatagacttcagccagggttcgggctccgaggaggaggaggcggcggggaccgagggcgacgcgcaggagtggccgggcgccgggtccagcgcagaccaggacgacgaggaaggagtggtaaaatttcagccttccctttggccttgggactcagtgaggaacaatttgagaagtgccctgacagagatgtgtgttctctatgatgttctcagtattgttagggataaaaaatttatgactcttgatcctgtctctcaggatgcacttcctccaaaacaggtatttgtggactttaattgaataataaaattttatttattaaatcccaggacccttttttggctttgtgcctgttgttccattttcctttcttgcaaaattaagtccagatgaagatttaaagactaactggtctaaaacaaagccatacaactgcatttcctttatttttttattatatacctatgatccttggaagagttaagtttcattaagaatgtaatacctttaaggccaggcgtggtggctcacgcctgtaatcccagcactttgggaggccaaggcgggcagatcacgaggtcaggagatcgagaccatcctggctaatgctgtgaaaccttgtctctattaaaaataacaaaaataagccaggcgtggtggtgggcacctgtagtcccagctactcagaaggctgaggcaggagaattgcttgagcctgggaggcgggggttgcagtgagctgagatcgcgccactgcactccagcctgggcgacagagcgagattccatcccaaaaaaaaaaaaaaaaagaatgtaatactttaaaggttaccaaatcttaacaaattcttatagcctgggtccttggtctgtgatatattacacaaaaatgtgatgatataatggctttggaatcaggtagacctggattcgaatcctgcctctgccttcattaactgtgtgaccttaaattaagcaagttattttctcttaagtccctgtttttccatctaatccttccttccctttttttttaagggatggattagaaaagttaggcgaaattatggagcatattgagagctgggtagaattgctgctatttcataaacagtgtattcaatttttgaacatttgaagatgaaagagaagtagcaggaagatgagttggtgaatagtctgaaatcattgaggctacttgggtccttaaggaaaacaagtgtcaagaccataaccaaattagtcatggagaagaagtaatgactgttagaacccatttgtaaataaaattaattgaatagaattactcacatagtaatagtttcagaatctagaaacattgtgctgggggactaatagagttccctaaatctgcattcttcattttatagagagaaaactaaagcttaaagagatttgtaatatgttcaagttgctgtcaagccagtagttagggagccaagactagaactccagcacctaactcatagccccactgccttttctactattctgtgcttttcccagaagggagtctccaggaatttcttaatatctccaggaactcttttatttacgttccctaatacaatcaaaagattattttgatatgtttatgaagctttttatgtgatttttgactctcatacagccagaaaactgtattaaactggttagtaaaatacacaaattatggtgattgtggatatttatatatgcatatgtgatacatagatagtgacttctgatcagttttccaaaaaattaggattcagtgaagtacatttaatattaacaatggcagggcacggtggcttatgcctgtaattccaacactttggggaaccaaagcaggaagccaggagtttgagactttcccaggcaacatagcaagaccctgtctctacc

SEQ ID NO: 144671 - DNA, 1956 bp, Artificial Sequence
  derived and/or modified sequence
atgagcggcgtgcgggccgtgcggatcagcatcgagagcgcctgcgaaaagcaggtgcatgaggtagggttagatggcaccgaaacatatctgcctcctctgagtatgtctcagaacctggctcgccttgcacaacgtattgatttttctcagggtagcggctccgaggaggaggaggccgcagggaccgaaggcgacgcacaggagtggccgggcgcaggctcctccgcagatcaggacgatgaggaaggcgttgtgaagtttcagccgagcctgtggccatgggatagcgtccggaataacttgagatccgcattgactgagatgtgcgtcctatacgacgttctctctattgtcagagataaaaagtttatgacactggacccagtttctcaagacgcccttcccccaaagcagaaccctcagacattgcaactaatctccaagaaaaaaagtctcgccggggccgctcagatactccttaagggcgctgagcgtttgactaagagcgtgactgagaaccaagagaataaacttcaacgagatttcaactccgagctgctgaggctgagacaacattggaaacttcgtaaagtgggagacaaaattctgggcgacttgtcttatcggagtgctggatccctatttccacaccatggtaccttcgaagtgatcaagaatacagatctggatctggataagaaaattccagaggactattgtcctctggacgtgcagattccttccgatctggaaggaagcgcctacattaaagtttctattcagaagcaagccccagatattggagacttagggactgtgaacctgtttaagcgccccttgcccaagtctaagccagggagccctcattggcaaacaaaattggaagccgcgcagaacgtcctgctgtgcaaggaaattttcgctcagctgtctcgggaagccgtgcagataaagagccaggtgccccatatcgtggtgaagaatcagatcatcagccaacccttcccctccctacagctttctattagcctgtgtcactcctctaacgacaagaaaagtcaaaagttcgccaccgagaaacagtgccctgaagatcatctttacgtgttggaacacaaccttcacctgctcatccgggaattccacaagcagactctctctagcataatgatgccccaccccgcctcagctccattcggccacaaaaggatgcggctcagtggccctcaggccttcgataaaaatgagattaactcactgcagtcttcagaagggctgctagaaaagattatcaaacaggccaaacatatcttcttacggagcagggctgcagcgaccatagactcattggcttccagaattgaagatcctcagattcaggcccactggtcaaacattaatgacgtgtacgaatcttcagtgaaagtgctgatcacatcccagggctatgagcagatatgcaaatctatccagttacagctgaatattggagtggagcaaattcgagtggtgcatcgggacggtagagttattacgctgagctatcaggaacaggagctgcaggatttcctgctctcgcagatgagccagcaccaggtacacgcggtgcagcagctcgcaaaggttatggggtggcaggtactgtcttttagcaaccatgtcgggcttggtccgatagaatcaatcggcaatgcttctgccatcaccgtcgcaagtccgagcggagactacgccataagcgtaagaaatgggcctgagtctgggtctaagatcatggtgcagtttcctaggaaccagtgtaaagatttgcccaaaagtgatgttctccaggacaacaagtggtcgcatctgaggggcccttttaaggaagtccagtggaacaagatggaggggcgcaacttcgtgtataaaatggagttgttaatgtccgcattgagcccgtgcctcctctag

SEQ ID NO: 144672 - DNA, 1866 bp, Artificial Sequence
  derived and/or modified sequence
atgagcggcgtgcgggccgtgcggatcagcatcgagagcgcctgcgagaagcaggttcacgaagtcggcctggatggcaccgagacataccttcccccgctgtcaatgtcccaagagtggcccggcgctgggtcctctgcggaccaggacgatgaggagggagtggtaaagtttcagccatcactttggccatgggacagcgtccgaaacaatcttcggtccgctctgacagaaatgtgcgtgctatacgacgtgctcagtattgttagagacaaaaagtttatgacactcgaccccgtgtcccaggacgcactcccacccaagcagaatccccagactcttcagttgatttctaagaagaagtctctggccggagccgcccagatcctgctgaagggcgcagagcgactcaccaaatctgtgactgagaatcaggaaaataaattgcagagggatttcaactctgaactgcttcggttaagacaacattggaagctgcgcaaggtgggtgataaaatactgggtgatttatcatatagatcggctggaagcctttttccccatcacgggacattcgaagtaataaaaaacaccgacctagacttagataagaagatacccgaagactattgccctttggacgtgcaaatcccatccgacctcgaaggtagtgcctatatcaaggtcagtattcagaagcaagcacccgatattggtgatctgggcactgtgaacctgttcaagcgccccttgcccaagtctaagccaggttcaccccattggcagaccaaacttgaagcggcacagaacgtgcttttgtgtaaagaaatttttgcgcagttaagtcgagaggctgtgcagatcaagagccaggtgcctcatatagtggtgaagaatcagattatttcccagccattccccagcctgcaactgagtatctccttgtgtcatagctccaacgataagaaatctcaaaaattcgcaaccgagaaacagtgccccgaagatcacctctacgtgctggaacataatctccatctattaatccgggagttccacaaacagactctgagcagcatcatgatgcctcatcccgcctcagctcccttcgggcacaaaagaatgagactctcaggcccccaggcattcgacaaaaacgagattaactcactccagtccagcgagggcctgcttgagaaaattattaaacaagcaaagcacatctttttacgttcacgcgctgctgcgactatagattctctcgcctccaggatcgaggacccccagattcaggcccactggagtaatatcaatgatgtgtatgagtctagcgttaaggtcctcatcaccagccaaggctatgaacaaatttgtaaatctattcagctccagctaaatattggcgtcgaacagattagagtcgtgcatagggatggaagagttataaccctttcctaccaagagcaggagctccaggattttttgttgagccagatgagtcagcaccaagtccacgccgtacaacagttagccaaggtgatgggttggcaggtgttgtcattttctaatcatgtgggacttgggcccattgaatctataggaaatgcttcagctattaccgtggcctcacctagcggggattatgctatttcagttagaaacggacctgagagcggatccaaaattatggtgcagttcccgaggaatcagtgcaaggaccttcccaagtccgatgtgcttcaggataataagtggtcccacctgcgtggcccattcaaggaggtgcaatggaataagatggaagggcggaactttgtgtacaagatggagttactgatgagcgctctgtctccctgcctgctgtag

SEQ ID NO: 144673 - DNA, 438 bp, Artificial Sequence
  derived and/or modified sequence
atgagcggcgtgcgggccgtgcggatcagcatcgagagcgcctgcgagaagcaggtgcacgaagtgggacttgatggaaccgagacatatctgcctccgctttcaatgtcccagaaccttgcccgcctggcccagcgcatcgacttttcccaaggctcggggagtgaggaagaggaggccgccggcacggaaggtgacgcccaggagtggccaggggcggggtctagtgcagaccaggatgacgaagagggggtcgtcaagttccagccctctctgtggccttgggatagtgtgaggaataatcttcgctccgcactgacggagatgtgcgtgttatatgatgtcttgtcaatcgtcagagataaaaaattcatgaccctggatcccgtttctcaggatgctctgccgccaaaacaggttttcgtcgactttaactag

SEQ ID NO: 144674 - DNA, 1956 bp, Artificial Sequence
  derived and/or modified sequence
atgagtggagtgagagcagtcaggatctctatcgagtcagcttgtgagaagcaggtgcacgaagttgggctggacggcaccgagacttacctgcctccattaagcatgtcacaaaatctcgctcgcttggcacagaggatcgatttttcacaaggcagcggttcggaagaggaggaggccgctggaaccgagggagacgcccaagaatggccgggtgccggatcttcagccgatcaggatgacgaagaaggagtggtcaaatttcaaccgagcctctggccgtgggattctgtcagaaacaatctgcgaagcgcccttactgagatgtgcgtgctgtatgatgtgttgtcaatcgttcgggacaagaagttcatgaccctcgaccctgtgagccaagacgcacttccccctaaacaaaacccccagactctgcagttgatctcaaaaaaaaagagcctggctggggctgctcagatcctgctgaaaggggctgagagactcacaaagtccgtgactgagaatcaggaaaacaaattgcagagggatttcaacagcgagctgcttcgcctccgacagcactggaaattgagaaaagtgggagacaagatactgggcgaccttagttatcgttcggcgggtagtctgtttccgcaccatggtacctttgaagtaatcaagaacactgatctcgacctagacaagaaaatcccggaagactattgcccactggatgtgcagatccccagtgacctggagggatcagcctacataaaagtgtccatccagaaacaagcacctgacatcggcgacctggggacggtaaatctgttcaaacgaccacttccaaagtctaaacccggttcccctcattggcagacaaaactggaggccgcacaaaatgtcttgctctgtaaagaaattttcgcccagctgtctagggaggccgtacaaataaaaagtcaagtgccacacatagtcgtaaaaaaccagatcatatcccagccattcccaagcctccagctgtcaatttcgttatgtcatagttctaatgataaaaagtcccagaagttcgccacagaaaagcaatgcccggaggatcacctgtatgtgcttgagcacaacctgcacttgctcataagggagtttcacaagcaaacactgagctcgatcatgatgcctcacccagccagcgcacccttcggccataagcgaatgagattgagtggccctcaggccttcgataaaaatgagatcaattcgttgcagtcatctgagggccttctggagaagattataaaacaggctaaacacatctttttgagaagccgcgctgccgctaccatagactctctggcatcacgaatagaggacccccagatccaagcccactggtccaacatcaacgacgtgtacgagtcctcagtgaaggtgctgatcacgtcccagggatatgagcaaatatgcaagtcaatccaactgcaacttaacattggggttgagcagatccgtgtggttcatcgagatggcagagtgattacactgtcgtaccaagagcaagaactccaggacttcctgctttcacagatgtctcagcaccaagtgcacgccgtccagcagttagccaaggtgatggggtggcaggtcctttccttctcaaatcacgtgggactggggccaattgagtctataggaaacgcctcagcaattacagtggccagcccaagcggggactacgcaatcagcgtacgcaacgggcctgagtctgggagcaagattatggtgcagtttccaagaaaccagtgtaaggacttaccaaaatctgatgtactgcaggacaacaaatggagtcatctgcgcggtccttttaaagaggtgcaatggaataagatggagggtaggaattttgtttacaaaatggagttgttgatgtcagcgctgtccccatgcctgctctag

SEQ ID NO: 144675 - DNA, 1866 bp, Artificial Sequence
  derived and/or modified sequence
atgtctggagtgcgggctgttagaatcagcattgaaagcgcctgcgagaaacaggtgcatgaagtgggcctggacggaacagaaacgtatctccctccgctgagtatgagccaggaatggcctggagccggttcgagtgcagaccaggacgacgaagaaggagtagtcaaattccagccttcactgtggccttgggactccgttcggaacaacctgagatccgccctcaccgagatgtgtgtcctgtacgatgttttatctattgtccgtgataagaagttcatgactttagacccagttagtcaggacgccctcccacctaagcaaaaccctcagaccctgcagcttatttctaaaaagaagagccttgcaggcgctgcacagattttacttaagggtgcagaacgtctgacaaagagcgtcacagagaaccaggaaaataagcttcaaagagacttcaactcagaactactaaggcttcgccagcattggaaactccgcaaagtcggtgataaaatattaggggacctttcttaccgttctgccggaagtctcttcccccaccacggaactttcgaggtaattaagaatactgacctggatctcgacaagaagattcccgaagactactgccctcttgacgtgcagattccatccgacctcgaggggagcgcttacattaaggtgtcaatccagaagcaagcgccagacattggggatctaggtacggtaaatctgtttaagaggccgctccccaaatctaaacctggttctccacattggcagactaagctcgaggctgcccaaaatgtgctattgtgcaaggagatctttgcccagctgagccgcgaagcagtccaaatcaagtcccaggttccccatatagtggtgaagaatcagattatatcacaaccattcccgtcgctgcagttgtctatctcactctgccactcttctaacgataaaaaatcccaaaaatttgccactgagaagcaatgccctgaggaccacttgtacgtcctcgaacataacttgcatttgctgattagagagtttcataagcagactctgtcatccatcatgatgcctcaccccgcatcagcacctttcggtcacaagcggatgcgcctgtcagggcctcaggcttttgacaagaatgagatcaattctctgcagtcctctgaggggctgttggagaagatcattaagcaggcaaagcacatctttctaaggtcacgggcagcagccacaatcgattccctagctagtcgaatcgaggaccctcaaattcaagctcactggtcaaatatcaacgatgtgtatgaaagctcagtgaaagtactgattaccagtcagggatatgagcagatatgcaagagtatccagctgcaattgaacattggggttgagcagattagggttgtacatcgggacggcagagtgatcacattgtcgtatcaggagcaagagcttcaggacttcctgctgtcccagatgtcccagcaccaagttcatgccgtgcagcagctggcgaaggtgatgggctggcaggtgttatctttcagcaatcacgtgggccttggaccgatcgagtccataggtaatgcctctgcaatcacggtggcatcccccagtggcgactacgctatatccgttaggaatggtccagaaagtggatcaaagataatggtccagtttccgagaaaccagtgtaaagatctgccaaagtcagatgtgctgcaggataataagtggagtcacctccgcggaccatttaaggaggtccagtggaataaaatggagggcaggaacttcgtttacaagatggagttacttatgagcgccctgagcccttgtctgctgtag

SEQ ID NO: 144676 - DNA, 438 bp, Artificial Sequence
  derived and/or modified sequence
atgtcgggggtgcgcgctgttaggattagcatcgagtctgcctgtgagaaacaggtgcacgaagttggtctcgatgggactgaaacttacctgccaccactgtctatgagccagaatctggcccgtctagcccagcgcattgattttagccagggttcgggctctgaggaggaggaagccgctggcacagaaggcgacgcccaggagtggcctggcgcaggctcatcagcagaccaagacgatgaggagggcgttgtcaagtttcagcccagcttgtggccttgggatagcgtgagaaacaacctgcggtcagcccttacggagatgtgcgtattgtacgacgtgctctctattgtaagggacaaaaaatttatgacgctggatccagtgtcccaggacgccctaccaccgaagcaggtgtttgtggacttcaattag

SEQ ID NO: 144677 - DNA, 1956 bp, Artificial Sequence
  derived and/or modified sequence
atgagcggcgtgagagccgtgagaatcagcatcgagagcgcctgcgagaagcaggtgcacgaggtgggcctggacggcaccgagacctacctgccccccctgagcatgagccagaacctggccagactggcccagagaatcgacttcagccagggcagcggcagcgaggaggaggaggccgccggcaccgagggcgacgcccaggagtggcccggcgccggcagcagcgccgaccaggacgacgaggagggcgtggtgaagttccagcccagcctgtggccctgggacagcgtgagaaacaacctgagaagcgccctgaccgagatgtgcgtgctgtacgacgtgctgagcatcgtgagagacaagaagttcatgaccctggaccccgtgagccaggacgccctgccccccaagcagaacccccagaccctgcagctgatcagcaagaagaagagcctggccggcgccgcccagatcctgctgaagggcgccgagagactgaccaagagcgtgaccgagaaccaggagaacaagctgcagagagacttcaacagcgagctgctgagactgagacagcactggaagctgagaaaggtgggcgacaagatcctgggcgacctgagctacagaagcgccggcagcctgttcccccaccacggcaccttcgaggtgatcaagaacaccgacctggacctggacaagaagatccccgaggactactgccccctggacgtgcagatccccagcgacctggagggcagcgcctacatcaaggtgagcatccagaagcaggcccccgacatcggcgacctgggcaccgtgaacctgttcaagagacccctgcccaagagcaagcccggcagcccccactggcagaccaagctggaggccgcccagaacgtgctgctgtgcaaggagatcttcgcccagctgagcagagaggccgtgcagatcaagagccaggtgccccacatcgtggtgaagaaccagatcatcagccagcccttccccagcctgcagctgagcatcagcctgtgccacagcagcaacgacaagaagagccagaagttcgccaccgagaagcagtgccccgaggaccacctgtacgtgctggagcacaacctgcacctgctgatcagagagttccacaagcagaccctgagcagcatcatgatgccccaccccgccagcgcccccttcggccacaagagaatgagactgagcggcccccaggccttcgacaagaacgagatcaacagcctgcagagcagcgagggcctgctggagaagatcatcaagcaggccaagcacatcttcctgagaagcagagccgccgccaccatcgacagcctggccagcagaatcgaggacccccagatccaggcccactggagcaacatcaacgacgtgtacgagagcagcgtgaaggtgctgatcaccagccagggctacgagcagatctgcaagagcatccagctgcagctgaacatcggcgtggagcagatcagagtggtgcacagagacggcagagtgatcaccctgagctaccaggagcaggagctgcaggacttcctgctgagccagatgagccagcaccaggtgcacgccgtgcagcagctggccaaggtgatgggctggcaggtgctgagcttcagcaaccacgtgggcctgggccccatcgagagcatcggcaacgccagcgccatcaccgtggccagccccagcggcgactacgccatcagcgtgagaaacggccccgagagcggcagcaagatcatggtgcagttccccagaaaccagtgcaaggacctgcccaagagcgacgtgctgcaggacaacaagtggagccacctgagaggccccttcaaggaggtgcagtggaacaagatggagggcagaaacttcgtgtacaagatggagctgctgatgagcgccctgagcccctgcctgctgtag

SEQ ID NO: 144678 - DNA, 1866 bp, Artificial Sequence
  derived and/or modified sequence
atgagcggcgtgagagccgtgagaatcagcatcgagagcgcctgcgagaagcaggtgcacgaggtgggcctggacggcaccgagacctacctgccccccctgagcatgagccaggagtggcccggcgccggcagcagcgccgaccaggacgacgaggagggcgtggtgaagttccagcccagcctgtggccctgggacagcgtgagaaacaacctgagaagcgccctgaccgagatgtgcgtgctgtacgacgtgctgagcatcgtgagagacaagaagttcatgaccctggaccccgtgagccaggacgccctgccccccaagcagaacccccagaccctgcagctgatcagcaagaagaagagcctggccggcgccgcccagatcctgctgaagggcgccgagagactgaccaagagcgtgaccgagaaccaggagaacaagctgcagagagacttcaacagcgagctgctgagactgagacagcactggaagctgagaaaggtgggcgacaagatcctgggcgacctgagctacagaagcgccggcagcctgttcccccaccacggcaccttcgaggtgatcaagaacaccgacctggacctggacaagaagatccccgaggactactgccccctggacgtgcagatccccagcgacctggagggcagcgcctacatcaaggtgagcatccagaagcaggcccccgacatcggcgacctgggcaccgtgaacctgttcaagagacccctgcccaagagcaagcccggcagcccccactggcagaccaagctggaggccgcccagaacgtgctgctgtgcaaggagatcttcgcccagctgagcagagaggccgtgcagatcaagagccaggtgccccacatcgtggtgaagaaccagatcatcagccagcccttccccagcctgcagctgagcatcagcctgtgccacagcagcaacgacaagaagagccagaagttcgccaccgagaagcagtgccccgaggaccacctgtacgtgctggagcacaacctgcacctgctgatcagagagttccacaagcagaccctgagcagcatcatgatgccccaccccgccagcgcccccttcggccacaagagaatgagactgagcggcccccaggccttcgacaagaacgagatcaacagcctgcagagcagcgagggcctgctggagaagatcatcaagcaggccaagcacatcttcctgagaagcagagccgccgccaccatcgacagcctggccagcagaatcgaggacccccagatccaggcccactggagcaacatcaacgacgtgtacgagagcagcgtgaaggtgctgatcaccagccagggctacgagcagatctgcaagagcatccagctgcagctgaacatcggcgtggagcagatcagagtggtgcacagagacggcagagtgatcaccctgagctaccaggagcaggagctgcaggacttcctgctgagccagatgagccagcaccaggtgcacgccgtgcagcagctggccaaggtgatgggctggcaggtgctgagcttcagcaaccacgtgggcctgggccccatcgagagcatcggcaacgccagcgccatcaccgtggccagccccagcggcgactacgccatcagcgtgagaaacggccccgagagcggcagcaagatcatggtgcagttccccagaaaccagtgcaaggacctgcccaagagcgacgtgctgcaggacaacaagtggagccacctgagaggccccttcaaggaggtgcagtggaacaagatggagggcagaaacttcgtgtacaagatggagctgctgatgagcgccctgagcccctgcctgctgtag

SEQ ID NO: 144679 - DNA, 438 bp, Artificial Sequence
  derived and/or modified sequence
atgagcggcgtgagagccgtgagaatcagcatcgagagcgcctgcgagaagcaggtgcacgaggtgggcctggacggcaccgagacctacctgccccccctgagcatgagccagaacctggccagactggcccagagaatcgacttcagccagggcagcggcagcgaggaggaggaggccgccggcaccgagggcgacgcccaggagtggcccggcgccggcagcagcgccgaccaggacgacgaggagggcgtggtgaagttccagcccagcctgtggccctgggacagcgtgagaaacaacctgagaagcgccctgaccgagatgtgcgtgctgtacgacgtgctgagcatcgtgagagacaagaagttcatgaccctggaccccgtgagccaggacgccctgccccccaagcaggtgttcgtggacttcaactag

SEQ ID NO: 144680 - protein, 162 aa, Artificial Sequence
  derived and/or modified sequence
MKGFTATLFLWTLIFPSCSGGGGGKAWPTHVVCSDSGLEVLYQSCDPLQDFGFSVEKCSKQLKSNINIRFGIILREDIKELFLDLALMSQGSSVLNFSYPICEAALPKFSFCGRRKGEQIYYAGPVNNPEFTIPQGEYQVLLELYTEKRSTVACANATIMCS

SEQ ID NO: 144681 - DNA, 489 bp, Artificial Sequence
  derived and/or modified sequence
atgaaagggttcaccgcgacgctgttcctctggacacttatatttccgtcctgttctgggggtgggggaggaaaagcatggcctactcatgtggtatgttccgactctggccttgaagtgttatatcagtcctgtgacccactgcaggacttcggcttctccgtcgagaagtgctccaagcagctgaaatctaacattaatatccgtttcgggatcatcctgcgagaagatatcaaggaactcttcctggatctggctctcatgtcgcaggggagctcggttctgaacttttcttacccgatatgcgaggcggcacttcccaaattttcattctgtggaagaagaaagggggaacaaatttattatgccggaccagtgaacaatcccgaattcacgattccacaaggagaataccaggtgctactggagttatataccgagaagcgaagcaccgttgcctgcgctaacgctaccatcatgtgttcctag

SEQ ID NO: 144682 - DNA, 489 bp, Artificial Sequence
  derived and/or modified sequence
atgaaaggttttactgccacgctttttctatggacactaatctttccttcttgcagcggaggaggcggcggaaaggcctggcccacccacgtcgtatgttccgacagcggtctggaagtcctttaccaatcctgtgatccgctccaggattttggctttagcgtcgagaagtgtagcaagcagcttaagtccaacatcaatatcagatttggcataatcctgagagaggacattaaggaactgttcctggatctagccctcatgtcccagggaagcagtgtccttaattttagctacccaatctgtgaagcagctctacccaaattctccttttgtgggagacgaaaaggtgaacaaatttactacgcaggacccgtcaataacccagagttcacaatcccccagggagagtaccaagtgctccttgagctctatactgaaaagaggtcaacagtggcctgcgcaaacgcaactattatgtgctcatag

SEQ ID NO: 144683 - DNA, 489 bp, Artificial Sequence
  derived and/or modified sequence
atgaaaggctttaccgcaaccctttttctatggactctgatttttcccagctgtagtggcggcggtgggggaaaagcctggccaacacacgttgtctgttctgactcaggtcttgaggtactttaccagtcttgcgaccccttacaggatttcggtttttctgtggagaaatgttccaaacaacttaaatccaatataaatatccgttttggtattattttgagagaagatatcaaagagctcttcctcgatctagccctaatgtctcaaggatctagcgttctcaacttcagctatcccatctgtgaggccgcactgcccaaatttagcttctgcgggagaagaaagggtgagcagatatactacgccggacccgtgaataaccccgaatttacaattccccagggcgaatatcaggtgctcctggaactatacactgaaaagcgttcaactgtagcctgtgcaaacgccaccattatgtgttcttag

SEQ ID NO: 144684 - DNA, 883 bp, Artificial Sequence
  derived and/or modified sequence
ggccggttatttttctgtgtgtcccatacaggcccccaccatgaagggtttcacagccactctcttcctctggactctgatttttcccagctgcagtggaggcggcggtgggaaagcctggcccacacacgtggtctgtagcgacagcggcttggaagtgctctaccagagttgcgatccattacaagattttggcttttctgttgaaaagtgttccaagcaattaaaatcaaatatcaacattagatttggaattattctgagagaggacatcaaagagctttttcttgacctagctctcatgtctcaaggctcatctgttttgaatttctcctatcccatctgtgaggcggctctgcccaagttttctttctgtggaagaaggaaaggagagcagatttactatgctgggcctgtcaataatcctgaatttactattcctcagggagaataccaggttttgctggaactgtacactgaaaaacggtccaccgtggcctgtgccaatgctactatcatgtgctcctgactgtggcctgtagcaaaaatcacagccagctgcatctcgtgggacctccaagctcctctgactgaacctactgtgggaggagaagcagctgatgacagagagaggctctacaaagaagcgcccccaaagagtgcagctgctaattttagtcccaggaccagacatccccagactccacagatgtaatgaagtccccgaatgtatctgtttctaaggagcctcttggcagtccttaagcagtcttgagggtccatcctttttctctaattggtcgcctcccaccagactcacctgcttttcaactttttaggagtgcttcctcacagttaccaagaataaagaaagctggccacc

SEQ ID NO: 144685 - DNA, 489 bp, Artificial Sequence
  derived and/or modified sequence
atgaagggcttcaccgccaccctgttcctgtggaccctgatcttccccagctgcagcggcggcggcggcggcaaggcctggcccacccacgtggtgtgcagcgacagcggcctggaggtgctgtaccagagctgcgaccccctgcaggacttcggcttcagcgtggagaagtgcagcaagcagctgaagagcaacatcaacatcagattcggcatcatcctgagagaggacatcaaggagctgttcctggacctggccctgatgagccagggcagcagcgtgctgaacttcagctaccccatctgcgaggccgccctgcccaagttcagcttctgcggcagaagaaagggcgagcagatctactacgccggccccgtgaacaaccccgagttcaccatcccccagggcgagtaccaggtgctgctggagctgtacaccgagaagagaagcaccgtggcctgcgccaacgccaccatcatgtgcagctag

SEQ ID NO: 144686 - DNA, 489 bp, Artificial Sequence
  derived and/or modified sequence
atgaagggcttcacagctacattatttctctggaccctgatcttcccatcctgttccggtggaggtggcggcaaagcatggccaacccacgtggtgtgttcagactctggcttggaggtgctctaccagtcatgtgatcctcttcaggactttgggttctcggtcgagaaatgctccaagcagctgaagtccaatattaatatccggttcggcattattttacgggaggatatcaaggagctcttcctggatctcgctttgatgtctcagggatctagtgtcctgaatttcagttatcctatatgcgaagctgctctgcccaaattttcgttttgtgggcggcgcaagggggagcaaatctactacgccggcccggtcaataaccctgagttcactatcccccagggagagtaccaggtgctgttggaactgtataccgaaaaaagatctacagtggcctgtgccaacgcaacgattatgtgcagttag

SEQ ID NO: 144687 - DNA, 489 bp, Artificial Sequence
  derived and/or modified sequence
atgaagggcttcaccgccaccctcttcctgtggaccctcatcttccccagctgcagcggcggcggcggcggcaaggcctggcccacccacgtggtgtgcagcgacagcggcctggaggtgctgtaccagagctgtgaccccctgcaggactttggcttctctgtggagaagtgcagcaagcagctgaagagcaacatcaacatccgcttcggcatcatcctgcgggaggacatcaaggagctgttcctggacctggccctgatgagccagggcagctctgtgctgaacttctcctaccccatctgtgaggccgccctgcccaagttctccttctgtggccgcaggaagggggagcagatctactatgccggccctgtgaacaaccctgagttcaccatcccccagggcgagtaccaggtgctgctggagctgtacacagagaagaggagcacagtggcctgtgccaatgccaccatcatgtgcagctag

SEQ ID NO: 144688 - DNA, 1208 bp, Artificial Sequence
  derived and/or modified sequence
tccagagaccacatctgcagctcccaaaacaaggtctgttctgcagctggacaattcactgctaaaatcccaaacctaagagcagagccaaagccagaggagaggaaagtgacaatagggccaaagcctcattccagattccaaatgtcattctgtagccctcgtgctatcaactgctgcctgctggctgcagccaggtccctgggtccatacacagcctgcatcaagagcctgcagagactcgggggctggagatgggaaacagatggtggcctgcgctttgtctttcccaagtttacagcctcacctgggggtggaggctgttctgaggggcccccaagaggtcccatacaggcccccaccatgaagggtttcacagccactctcttcctctggactctgatttttcccagctgcagtggaggcggcggtgggaaagcctggcccacacacgtggtctgtagcgacagcggcttggaagtgctctaccagagttgcgatccattacaagattttggcttttctgttgaaaagtgttccaagcaattaaaatcaaatatcaacattagatttggaattattctgagagaggacatcaaagagctttttcttgacctagctctcatgtctcaaggctcatctgttttgaatttctcctatcccatctgtgaggcggctctgcccaagttttctttctgtggaagaaggaaaggagagcagatttactatgctgggcctgtcaataatcctgaatttactattcctcagggagaataccaggttttgctggaactgtacactgaaaaacggtccaccgtggcctgtgccaatgctactatcatgtgctcctgactgtggcctgtagcaaaaatcacagccagctgcatctcgtgggacctccaagctcctctgactgaacctactgtgggaggagaagcagctgatgacagagagaggctctacaaagaagcgcccccaaagagtgcagctgctaattttagtcccaggaccagacatccccagactccacagatgtaatgaagtccccgaatgtatctgtttctaaggagcctcttggcagtccttaagcagtcttgagggtccatcctttttctctaattggtcgcctcccaccagactcacctgcttttcaactttttaggagtgcttcctcacagttaccaagaataaagaaagctggccaccat

SEQ ID NO: 144689 - DNA, 489 bp, Artificial Sequence
  derived and/or modified sequence
atgaagggcttcaccgccaccctgttcctgtggaccctgatcttccctagttgtagtgggggggggggcggtaaggcgtggccaacacatgtcgtatgctctgactccggcttggaggtcctctatcaatcttgtgatcccctgcaggatttcggcttctcagtggagaagtgtagtaagcagctgaagtctaatatcaatattagattcggtattattctgagggaagacatcaaagaacttttcttggacctggctcttatgtcacagggcagtagtgtcttgaatttttcgtaccccatttgtgaggccgccttacctaaattctcattctgcggccgacggaaaggcgaacagatttattatgccggccccgtgaataatccggaatttacgataccacagggcgagtatcaagtcctccttgaactttatactgaaaagaggtctacagttgcctgtgccaacgcgacaattatgtgttcttag

SEQ ID NO: 144690 - DNA, 489 bp, Artificial Sequence
  derived and/or modified sequence
atgaaggggtttactgctaccttgtttctgtggacattaatctttcctagctgttcgggaggaggtggcggcaaggcatggcccacccatgtagtatgctctgacagcggcctggaagtgctttaccagtcctgtgacccactccaggacttcggattttccgtcgagaagtgttccaagcaattgaaatctaacatcaacattcggtttggcatcattttacgagaggacatcaaggagctgtttctcgatctggctctgatgagtcaaggatcctccgtgctgaacttctcttaccccatatgtgaggcagctctgcctaagtttagcttctgtggacggagaaagggtgagcagatttactacgcagggcctgttaataaccccgagttcaccatcccgcagggagaataccaagtactgctggagctctatacagagaagcgttctacagtggcctgtgccaatgccacaattatgtgttcttag

SEQ ID NO: 144691 - DNA, 489 bp, Artificial Sequence
  derived and/or modified sequence
atgaagggcttcaccgccaccctgttcctgtggaccctgatcttcccttcttgcagtggcggcggcgggggaaaggcctggcccacccacgtggtctgcagcgatagcggactggaagtgctgtaccagagctgcgatcctttacaggacttcggtttttccgttgaaaagtgtagtaagcagctgaagtctaacatcaatatccggttcggtatcatcctgagggaggacattaaggaactgtttcttgacctggctctcatgagccagggcagtagcgtgttgaacttttcctatccaatttgcgaagctgcattgcctaaatttagtttctgcggaaggcgcaagggagaacaaatctactacgctggaccagtaaataaccccgaatttacaatcccccagggagaataccaggtgttgttggaactgtatactgaaaagagatccactgtcgcgtgcgccaatgccactatcatgtgcagttag

SEQ ID NO: 144692 - DNA, 489 bp, Artificial Sequence
  derived and/or modified sequence
atgaagggatttactgcaacgttattcctgtggacactgatcttccccagctgcagcggcggtgggggtggcaaagcctggccaacacacgttgtctgtagcgactcgggcctcgaagtgctgtatcagtcttgtgatccactgcaggatttcggtttttctgtcgagaagtgttccaagcagctaaagtctaacatcaacataaggttcgggatcatactgcgagaagacattaaagaactgttcctcgatttagccctaatgtcccagggatctagcgtccttaacttcagctatcccatatgtgaagctgcattgcctaaatttagcttctgtggcaggaggaaaggggagcagatctactacgccggaccagtcaataatccagagtttactataccgcagggtgaatatcaggtgctgctggagctgtatacggaaaaacggtcgaccgtggcatgcgctaacgctactattatgtgcagctag

SEQ ID NO: 144693 - DNA, 489 bp, Artificial Sequence
  derived and/or modified sequence
atgaaaggtttcacagcaaccctgttcctctggacccttattttcccatcttgttcaggtggaggtggcgggaaagcatggcccacccatgtggtatgtagtgactccggcctcgaggtcctgtatcagtcttgcgatcccctgcaggatttcgggttctcagtcgagaagtgcagcaagcagctgaaatctaacataaacattcggttcggaattattttgcgagaggacattaaggagctctttttggatttggccctgatgagccaaggttcatccgtactgaacttctcttatcctatatgcgaggctgctctacccaaattctcattttgcggacgacgaaaaggcgaacagatttattatgcaggtcctgttaacaaccccgaattcacaatcccgcaaggagagtaccaagtcttacttgaactatacactgagaagaggagtacagttgcatgcgcaaacgcaaccattatgtgttcttag

SEQ ID NO: 144694 - DNA, 489 bp, Artificial Sequence
  derived and/or modified sequence
atgaagggcttcaccgccacactattcctgtggaccctgatattcccatcttgctctggcggaggcggcggcaaagcttggccaacacatgttgtttgctcagattccggattggaggtgctctaccaaagttgcgatccgctccaagacttcggattttccgttgaaaagtgttccaaacagttgaaatctaatatcaacatcagatttgggattattctcagagaggatattaaggaactttttttggatttggctttgatgtcacagggctcatccgtacttaacttctcttacccgatatgcgaggctgctctacccaaattctcattttgcggacgacgaaaaggcgaacagatttattatgcaggtcctgttaacaaccccgaattcacaatcccgcaaggagagtaccaagtcttacttgaactatacactgagaagaggagtacagttgcatgcgcaaacgcaaccattatgtgttcttag

SEQ ID NO: 144695 - RNA, 489 nt, Artificial Sequence
  derived and/or modified sequence
augaaagguuuuacugccacgcuuuuucuauggacacuaaucuuuccuucuugcagcggaggaggcggcggaaaggccuggcccacccacgucguauguuccgacagcggucuggaaguccuuuaccaauccugugauccgcuccaggauuuuggcuuuagcgucgagaaguguagcaagcagcuuaaguccaacaucaauaucagauuuggcauaauccugagagaggacauuaaggaacuguuccuggaucuagcccucaugucccagggaagcaguguccuuaauuuuagcuacccaaucugugaagcagcucuacccaaauucuccuuuugugggagacgaaaaggugaacaaauuuacuacgcaggacccgucaauaacccagaguucacaaucccccagggagaguaccaagugcuccuugagcucuauacugaaaagaggucaacaguggccugcgcaaacgcaacuauuaugugcucauag

SEQ ID NO: 144696 - RNA, 489 nt, Artificial Sequence
  derived and/or modified sequence
augaaaggcuuuaccgcaacccuuuuucuauggacucugauuuuucccagcuguaguggcggcggugggggaaaagccuggccaacacacguugucuguucugacucaggucuugagguacuuuaccagucuugcgaccccuuacaggauuucgguuuuucuguggagaaauguuccaaacaacuuaaauccaauauaaauauccguuuugguauuauuuugagagaagauaucaaagagcucuuccucgaucuagcccuaaugucucaaggaucuagcguucucaacuucagcuaucccaucugugaggccgcacugcccaaauuuagcuucugcgggagaagaaagggugagcagauauacuacgccggacccgugaauaaccccgaauuuacaauuccccagggcgaauaucaggugcuccuggaacuauacacugaaaagcguucaacuguagccugugcaaacgccaccauuauguguucuuag

SEQ ID NO: 144697 - protein, 354 aa, Artificial Sequence
  derived and/or modified sequence
MGEQPIFSTRAHVFQIDPNTKKNWVPTSKHAVTVSYFYDSTRNVYRIISLDGSKAIINSTITPNMTFTKTSQKFGQWADSRANTVYGLGFSSEHHLSKFAEKFQEFKEAARLAKEKSQEKMELTSTPSQESAGGDLQSPLTPESINGTDDERTPDVTQNSEPRAEPTQNALPFSHSSAISKHWEAELATLKGNNAKLTAALLESTANVKQWKQQLAAYQEEAERLHKRVTELECVSSQANAVHTHKTELNQTIQELEETLKLKEEEIERLKQEIDNARELQEQRDSLTQKLQEVEIRNKDLEGQLSDLEQRLEKSQNEQEAFRNNLKTLLEILDGKIFELTELRDNLAKLLECS

SEQ ID NO: 144698 - protein, 177 aa, Artificial Sequence
  derived and/or modified sequence
MGEQPIFSTRAHVFQIDPNTKKNWVPTSKHAVTVSYFYDSTRNVYRIISLDGSKAIINSTITPNMTFTKTSQKFGQWADSRANTVYGLGFSSEHHLSKFAEKFQEFKEAARLAKEKSQEKMELTSTPSQESAGGDLQSPLTPESINGTDDERTPDVTQNSEPRAEPTQNALPFSHRK

SEQ ID NO: 144699 - protein, 180 aa, Artificial Sequence
  derived and/or modified sequence
MGSAISKHWEAELATLKGNNAKLTAALLESTANVKQWKQQLAAYQEEAERLHKRVTELECVSSQANAVHTHKTELNQTIQELEETLKLKEEEIERLKQEIDNARELQEQRDSLTQKLQEVEIRNKDLEGQLSDLEQRLEKSQNEQEAFRNNLKTLLEILDGKIFELTELRDNLAKLLECS

SEQ ID NO: 144700 - DNA, 1065 bp, Artificial Sequence
  derived and/or modified sequence
atgggggaacaaccaatctttagtacccgggcgcatgtatttcagatcgatccgaacacaaagaaaaattgggtcccgacttccaaacacgccgtaacggtttcttacttttacgactcaacacgcaatgtttaccggattataagcttggatggaagcaaggccatcattaattcgacgataaccccgaatatgacgttcaccaagacatcccagaaattcggacagtgggccgattcccgggctaacactgtttacggcttagggtttagctccgaacaccatctgtcaaagttcgccgagaaattccaggaatttaaagaggccgcaagattagccaaggagaaatcgcaagaaaaaatggagctgacaagcaccccttcccaggaaagtgctgggggggacctgcagtcacccttgacgccagaaagcatcaacgggaccgatgacgagcgcacccctgatgtaacccaaaatagtgaaccaagagccgagccaactcaaaacgctctcccctttagccacagctccgccataagtaagcactgggaggccgaacttgccactctcaagggaaataacgctaaactgactgcagccctgttggagagcactgctaatgttaaacagtggaagcagcagctggccgcctaccaggaggaggcggaaagacttcacaagcgggttacagagttggaatgcgtgagcagccaggctaatgcagtacacactcataaaaccgagctcaaccagacgatccaggagctggaagagactctcaaactaaaagaggaagaaatcgaacgtctgaaacaggagattgacaatgcccgagaattgcaggaacaacgcgattccttgacccagaaactgcaggaggtggagattaggaataaagacctggagggacaactctctgacttggagcagcgtctcgagaaatcccaaaacgaacaggaggctttccggaataacttgaagacactccttgagatcttagacggaaaaatctttgaacttaccgagttaagggacaatttggccaaactcctagagtgtagttag

SEQ ID NO: 144701 - DNA, 543 bp, Artificial Sequence
  derived and/or modified sequence
atgggctccgctatttctaaacactgggaagccgagctggcaaccttgaaaggcaacaacgcaaagctgacagctgctttgctcgagtcaacggccaatgttaaacagtggaaacagcaacttgctgcataccaagaagaggccgagcgtctccataaaagggtgaccgaacttgagtgtgtctcttcacaggccaatgccgtccatacacacaagactgaactgaaccagaccatccaggagttagaagagaccctgaagctcaaggaagaggagatcgagcgcctgaagcaagagattgataacgcacgcgaactacaggagcagcgagacagcttgactcagaagctgcaagaagtggaaatacgcaacaaggacctcgagggtcaattatctgacctggagcagaggttggagaagtcgcagaacgaacaggaagctttcaggaataacctcaagactctgctcgagatactcgatggaaagattttcgagttaaccgaactgagggataatctggctaagctgctggaatgcagctag

SEQ ID NO: 144702 - DNA, 5881 bp, Artificial Sequence
  derived and/or modified sequence
gcctcccgtcccttcccgcgagcagagggagggaccgccctcgctccccgttctctccgcccccttcccgccccccgcagcccactctgccgccgcgctagcttcacgccggcggcgctgaccgggaaagcagcaccctcttctctgccagccggccggccggcggaggcggaggcagcggcaggcttcaggccgccggggctggcgctgctctgcccggcggtagccggaggcgggcgctgatggaagtgtgaagaggcggcggcggggcccggggaatgtgaggcggcgcgtggcggcggcgcggagcgtgagagacgaggagtaggggtgggggcgctggagcggcggctgcgcttcggcttcgagcccagctctcctggccccaacgcgggcttagcctcccgccttggctcgggcaggcgcccgtcgacccttcggcccctttcgcccgccctggagctgggggcagggtgccagtggaagcgtggggcttggctctgtgattcattcattctccgccgacgggagcctcagacccgctgtgctctgaagagaggagggaagagggggcagccgcgaatgaagggccgggcaccagccgggctccattgtgctcggcggcggggggcgggaaggggctgagggaggtgggatcgggtcccctcctccagctctccggcgtgcgctgcgcccccagcctgctgccagcctggaaatggctccgtttattctcttcgggagaatgaatcgatcctgcctagccttctcttcgtcctccccacctcttctctgctccgagtcttaggaggagaaacatttaaaaagacagattccaatgtggagtgccgtgcaggttgcgagctgccgggtttgcacttcgaggagattttcctgtgtagtttttttcctaatgtgagcgcagggaagccgtggcattactgcttttgggatttttattcacgtgcacgtcgcgtttggttgctcgctccacccccggagacctggtgtggtggagaaatttgaacccgcagccttagctccgaaaaggccgagttacctggctctccctgagtgtcgaggaggacatgagtgaaatgaccagcgaactcattttttataggactcggtgaagccggattctgcatttccctacttgtagactcattttgtggaatagagttgatcgctgtctcctccgcaaagcattttaactcgaataagcaaatgccgcctctgtttgaacgttttggtatttacaagagagaaatcattttacctaagagaactaattgaattggcagcatccttgaaatacctccggacaaggatctgggggtgggggtggaaaagcaactgcgaaatagcagacggagaaattcctttggaagttattccgtagcataagagctgaaacttcagagcaagttttcattgggcaaaatgggggaacaacctatcttcagcactcgagctcatgtcttccaaattgacccaaacacaaagaagaactgggtacccaccagcaagcatgcagttactgtgtcttatttctatgacagcacaagaaatgtgtataggataatcagtttagatggctcaaaggcaataataaatagtaccatcaccccaaacatgacatttactaaaacatctcagaagtttggccagtgggctgatagccgggcaaacaccgtttatggattgggattctcctctgagcatcatctttcgaaatttgcagaaaagtttcaggaatttaaagaagctgctcgactagcaaaggaaaaatcacaagagaagatggaacttaccagtacaccttcacaggaatccgcaggcggggatcttcagtctcctttaacaccggaaagtatcaacgggacagatgatgaaagaacacctgatgtgacacagaactcagagccaagggctgaaccaactcagaatgcattgccattttcacatagttcagcaatcagcaaacattgggaggctgaactggctaccctcaaaggaaataatgccaaactcactgcagccctgctggagtccactgccaatgtgaaacaatggaaacagcaacttgctgcctatcaagaggaagcagaacgtctgcacaagcgggtgactgaacttgaatgtgttagtagccaagcaaatgcagtacatactcataagacagaattaaatcagacaatacaagaactggaagagacactgaaactgaaggaagaggaaatagaaaggttaaaacaagaaattgataatgccagagaactacaagaacagagggattctttgactcagaaactacaggaagtagaaattcggaacaaagacctggagggacaactgtctgacttagagcaacgtctggagaaaagtcagaatgaacaagaagcttttcgcaataacctgaagacactcttagaaattctggatggaaagatatttgaactaacagaattacgagataacttggccaagctactagaatgcagctaaggaaagtgaaatttcagtgccaattaattaaaagatacactgtctctcttcataggactgtttaggctctgcatcaagattgcacaaaaaaaaaaaaaaaaaaattgaatatcactcctccaggaggaggatcttttgaaattggaattgtatatttcactgtaaattttagaatccagcttgtagctagttggggaaaaaagatgaaaaacttgaactacaaattacctccatgtatattattggccatagttaactagaaagttataaatagacacttaatgcaatcttttttcctgatattagccaatgggagaattaacaatgtctaggtcacatcccctttttgtgttcaacacagtgaagattatctgctttttaaattaatttatttacgatatctagagctgtgttttgtgcaaaaacttagtgatgaaagcctgtcttttgttgtaatctgaataatttctcaggatatttttgcactgctgagaagcagtgccattaccaattaattcttgccaggagtgagagagagctgtatctttaattgaaatatactataactgggtgtatagagttcttcccttttttgtgctggaagatatttcactctggtgactactctggtacactctggtgttctctaatcttgtctgttgtatagtttacttttccatattgattccatgtatttatgagaagatattgtctcccattttattacacattttaaagccaactaacgaaggcagctgagtccctcagaaatttttctttttaagtttctaataaatttgacacacagtactgaaatacagcagcccgtcattgacaggctggtctagcaatgttaagtatatttacagaatatgcagttacatttatttatatattttgcaagaaatcttttctgaatgatcaatgcatttcaatttacgaataataatggttattggggaactgtttattatagataattttaaggtgtatagctattttaaagggggtccatttacatcaaacagctgatcagaggactctatctaaattgtgatcgtggcagatagagatggagtcatgtactctatctggctctacacatcaatcacatcttgattcaaacctcacaaggcaatattctgaattgttaactaggtatttcaaaacaggaattaaattcaataggctcttctcagtgaacaggttttaatgttgttttgatgtaattttaaaagacttttagcaaacatgcatttctttatatgatatatttcttttacgaagctattttaaaagtaagccaagtgctgtctagtctgcttataaagtaggaattgcatcagagtacatatattcttgctgtacaatgcctgtgatgttgaggagggttcttttttaaagtgtatgcttgagtaactgactctatggagtctataaatgcactgacttcttgtttgtaccccaaaatgatcgaattgttaagtacaaaattaagctaattaaccaatttgtaaccattttttcactcataaacagctactcaatactagacaattttgttttttatgtatgtgtatgtacgtaaatacatacatattaatttacattagagtgaaaaataaatggtttgtttctgaagttagtttcttaagtgagttttcaggtgtctctgaaaaatttataacaatcatgtattatatgtgctgtaacatcatgtacgttacctccatctattttaggatattttcctcacctatatattatagggagaataatttagatacacatgctcagagctgagatatttctctgataaatcaggtaacaaaatgtatttgattgatggaattttgaagtaaatgtgtttttatccatcagtttctgagtaacaaagagcaccaagttttaatttaaataggagatttaacactagggatcagggagtttagtatgaagagttaaaaaaatttaaaaaacagtgtaagctgttgaaatggcaagtgaattattttaatgatgtaataaaatatttttaaattttgacatagtgatcatttaatgaaaaaactcaccaaaatgtctccatttgaattgtattgataatgtgggacatatgtgtgattcaatatatacatatacccatatgtatatacagaaaattatttttaatactttcctactgataatgaaatttaaaattggaaattttgtgagtgtttttcttgtccaatagagcctaattgtttccttttttagtgatttaacaatctcttgagggctgcacctttaaattcccagattgtcaatagacatgtacagtatatgggataaggtggacacaagtgcacatataaataaaatcttcttaagacttttaactattcatttacagtaggagagtatgtagaaatcatcatccacaagtcataattaggttgtgtgcctactgtagttttttccatttctgtattatataaacatttgcatattaaaatttgatttttcccagagacaagtattatatactgtatctatatttaaatcaaactgtggtaatatatttctcagaaaataatgttggggactatagcctgaacatgtggacttgaagcgacatggaggaggaggttgatcccattgtgtataagttaatatgtgataactattgaatcttgtacaaaaacaaaaattgaaaaaaaaaaagaaaagcaaaaatacagtttttattttgaaatacatttgttctctggagaatgtactttatctttttttcctccagtcttttacagatatttaaaagcatttaaatgatgacagcatttacttaaatctttcaggtgctactggattttgcattagtgtgttatgttgtgaaatcctaactttgacataaaaggttttataagtattcccctgcctggaaaattagtttttgttctcctctctctctctttctcttttccactttctttctgcagactaaaacatgctcacgaagttgcatctctccttgtctctatagaagatctccagcaccatcatagatttgatgttctgctgtcattgaactgttgggaagcagttagaggaaaagctcactttttttttcaggtggaaataaaaggaacactcaaaattaagccaacaccaccactacctttaaaaactagtttatttgccctgttaaaattaaatgtattctttaacatgtgggctacagtctcccatgtttttatttaactgaagcatatacacttcggtcatttatctccttgtggtcctgattttgtcagtactggaatgggaggcaggtcggggaaagtttgtttgatggcagtggattcttattgttgttttaaccattgcattt

SEQ ID NO: 144703 - DNA, 642 bp, Artificial Sequence
  derived and/or modified sequence
gcaagttttcattgggcaaaatgggttcagcaatcagcaaacattgggaggctgaactggctaccctcaaaggaaataatgccaaactcactgcagccctgctggagtccactgccaatgtgaaacaatggaaacagcaacttgctgcctatcaagaggaagcagaacgtctgcacaagcgggtgactgaacttgaatgtgttagtagccaagcaaatgcagtacatactcataagacagaattaaatcagacaatacaagaactggaagagacactgaaactgaaggaagaggaaatagaaaggttaaaacaagaaattgataatgccagagaactacaagaacagagggattctttgactcagaaactacaggaagtagaaattcggaacaaagacctggagggacaactgtctgacttagagcaacgtctggagaaaagtcagaatgaacaagaagcttttcgcaataacctgaagacactcttagaaattctggatggaaagatatttgaactaacagaattacgagataacttggccaagctactagaatgcagctaaggaaagtgaaatttcagtgccaattaattaaaagatacactgtctctcttcataggactgtttaggctctgcatcaaga

SEQ ID NO: 144704 - DNA, 1065 bp, Artificial Sequence
  derived and/or modified sequence
atgggagagcagcccatcttcagcacccgggcccacgtgttccagattgaccccaacaccaagaagaactgggtgcccaccagcaagcatgctgtgacagtgtcctacttctatgacagcaccagaaatgtgtaccgcatcatcagcctggatggcagcaaggccatcatcaacagcaccatcacccccaacatgaccttcaccaagaccagccagaagtttggccagtgggccgacagccgggccaacacagtgtatggcctgggcttcagcagcgagcaccacctgagcaagtttgctgagaagttccaggagttcaaggaggccgcccggctggccaaggagaagagccaggagaagatggagctgaccagcacccccagccaggagagcgctggaggagacctgcagagccccctgaccccagagagcatcaatggaacagatgatgagaggaccccagatgtgacccagaacagcgagcccagggctgagcccacccagaatgccctgcccttcagccacagcagcgccatcagcaagcactgggaggccgagctggccaccctgaagggcaacaatgccaagctgacagctgccctgctggagagcacagccaacgtgaagcagtggaagcagcagctggccgcctaccaggaggaggccgagcggctgcacaagagggtgacagagctggagtgtgtgagcagccaggccaatgctgtgcacacccacaagacagagctgaaccagaccatccaggagctggaggagaccctgaagctgaaggaggaggagattgagcggctgaagcaggagattgacaatgcccgggagctgcaggagcagagggacagcctgacccagaagctgcaggaggtggagatccggaacaaggacctggagggccagctgagtgacctggagcagaggctggagaagagccagaatgagcaggaggccttcaggaacaacctgaagaccctgctggagatcctggatggcaagatctttgagctgacagagctgcgggacaacctggccaagctgctggagtgcagctag

SEQ ID NO: 144705 - DNA, 543 bp, Artificial Sequence
  derived and/or modified sequence
atgggcagcgccatcagcaagcactgggaggccgagctggccaccctgaagggcaacaatgccaagctgacagctgccctgctggagagcacagccaacgtgaagcagtggaagcagcagctggccgcctaccaggaggaggccgagcggctgcacaagagggtgacagagctggagtgtgtgagcagccaggccaatgctgtgcacacccacaagacagagctgaaccagaccatccaggagctggaggagaccctgaagctgaaggaggaggagattgagcggctgaagcaggagattgacaatgcccgggagctgcaggagcagagggacagcctgacccagaagctgcaggaggtggagatccggaacaaggacctggagggccagctgagtgacctggagcagaggctggagaagagccagaatgagcaggaggccttcaggaacaacctgaagaccctgctggagatcctggatggcaagatctttgagctgacagagctgcgggacaacctggccaagctgctggagtgcagctag

SEQ ID NO: 144706 - DNA, 1065 bp, Artificial Sequence
  derived and/or modified sequence
atgggcgagcagcccatcttcagcacccgggcccacgtgttccagatagaccctaacaccaagaaaaattgggtacctacttctaagcatgccgtcacagtcagttatttctacgacagtacccgcaacgtctatcgaatcatcagtctggacggatccaaggcgattatcaactcaactataactcctaatatgaccttcacaaagacctctcagaagttcggccagtgggccgattcaagagccaatacggtgtatggattgggattttctagcgaacaccacttgagcaagtttgccgagaagtttcaggaattcaaagaagctgctcggttagctaaggaaaaaagtcaggaaaagatggaactcacatccacaccttctcaggagtccgctggtggcgatcttcagtcacccctcactccagagagcatcaacgggaccgatgacgaaagaacccccgacgtcacacagaacagtgagccgagagctgaacccactcaaaacgctctcccttttagccactccagcgcgatttcaaaacactgggaagcagagttagccaccttaaagggcaataacgccaagctcacggccgctctcctggagtcgacggctaacgtcaagcagtggaaacagcagttggctgcgtatcaggaagaagccgagagactgcacaagagagtgaccgagttagaatgcgtgtcctcccaagccaatgccgtccacacacacaagaccgagctgaatcagactatccaggaactcgaggagacacttaagctgaaagaggaggaaatcgaaaggctaaagcaggagatcgataatgcccgcgagctgcaggagcagagggactccctcactcagaagctccaagaagtggagatcagaaataaggacctggaagggcaactgagcgatttggaacagcgcctggaaaaatcccagaatgaacaggaggccttccggaacaacctcaagacgctgctcgaaattctggatgggaaaatttttgaactcaccgagctgcgtgataatctggctaagcttttagagtgcagttag

SEQ ID NO: 144707 - DNA, 543 bp, Artificial Sequence
  derived and/or modified sequence
atgggcagcgccatcagcaagcactgggaggccgagctggccacccttaaaggcaataacgcaaaactcacagcagcactgctcgagagcactgctaatgtgaaacagtggaagcagcagctggctgcttatcaggaagaagcagagcgactccataagagggtcaccgagctggaatgcgtgtcatcccaggctaacgccgtgcacacacacaagacggaacttaatcagaccatccaagaactggaggaaacactgaagctcaaggaggaagagatagaaagactgaagcaagagatcgacaacgccagggagctgcaggaacagcgcgactccctgacccagaagttgcaagaggtggagattcgcaacaaggacttagaaggccagttgtccgatctcgagcagaggctggaaaagtctcaaaacgagcaggaggcgttcaggaataacttgaaaaccttgttggaaatcctggacgggaagatctttgagctgactgaactgagagacaacctcgctaagctgctggagtgttcatag

SEQ ID NO: 144708 - DNA, 1065 bp, Artificial Sequence
  derived and/or modified sequence
atgggagagcagccgattttctcgacaagagcacacgtgtttcagatagacccgaatacaaagaagaactgggtgcccaccagcaagcatgccgtcactgtgtcatacttctacgactcaacccggaacgtgtaccggattatttcactcgatggcagcaaggccattatcaattcgaccattacccctaacatgaccttcacgaagacatctcaaaagtttggtcagtgggcagacagtagagcgaacaccgtgtacggcctcggcttctcttctgagcatcacctttctaagtttgcggaaaaatttcaggagtttaaggaggctgccaggctggcaaaggagaaaagccaggagaaaatggaactgacaagcacccctagtcaagaatccgcgggaggcgacctgcagtctcctctgacaccagaatctattaacggcaccgacgatgaacgcacccccgacgtgacacagaacagcgagcctagagcagagccaactcagaatgctctgccgttctcacactcctcggctatttccaagcactgggaggcggagttggcaactctcaaaggcaacaatgctaagctaaccgctgcacttctggagagcacagcaaatgtgaaacagtggaaacagcaactggcggcatatcaggaagaagcagagaggttgcataaaagagtgaccgagctcgagtgcgtgtcttcccaggcgaacgctgtgcacacacacaaaacagaacttaaccagacaattcaagaattggaagagaccctgaagctgaaggaagaggagatcgagaggctcaagcaggaaatcgacaatgctcgcgaactgcaagaacagagggatagtctcacccaaaagctgcaggaggtcgagatccgaaataaggatctagaaggccaactgtcagatcttgaacagagactggagaagtcacaaaacgaacaggaggcttttcgaaataaccttaagaccctgttggaaattctcgacggcaagattttcgaactaaccgagttacgagataatcttgccaagttactggaatgctcatag

SEQ ID NO: 144709 - DNA, 543 bp, Artificial Sequence
  derived and/or modified sequence
atgggatctgccataagtaagcactgggaggccgagcttgccacactgaaaggaaacaacgcaaagctaaccgccgctttgctggagtctaccgcgaacgtgaagcagtggaaacagcaactagctgcataccaggaagaggccgagcgccttcacaaacgcgtcacagaactggagtgcgtctccagtcaggcaaatgccgtgcatactcacaagacagagttgaaccagacaatacaggaacttgaggaaacattaaaacttaaggaggaagagatcgaacggctgaagcaggagatcgacaacgctagggagctgcaggagcaaagagactcactaacacagaagctgcaagaggtagagatccgaaacaaggacttagaggggcagctgtccgacctagaacagagactggagaagagccagaatgagcaagaggcattccgcaataacttgaaaacactattagagatcctggatgggaagatctttgagctgaccgaattaagggacaatctggccaagctgctggagtgcagctag

SEQ ID NO: 144710 - DNA, 1065 bp, Artificial Sequence
  derived and/or modified sequence
atgggcgagcagcccatcttcagcaccagagcccacgtgttccagatcgaccccaacaccaagaagaactgggtgcccaccagcaagcacgccgtgaccgtgagctacttctacgacagcaccagaaacgtgtacagaatcatcagcctggacggcagcaaggccatcatcaacagcaccatcacccccaacatgaccttcaccaagaccagccagaagttcggccagtgggccgacagcagagccaacaccgtgtacggcctgggcttcagcagcgagcaccacctgagcaagttcgccgagaagttccaggagttcaaggaggccgccagactggccaaggagaagagccaggagaagatggagctgaccagcacccccagccaggagagcgccggcggcgacctgcagagccccctgacccccgagagcatcaacggcaccgacgacgagagaacccccgacgtgacccagaacagcgagcccagagccgagcccacccagaacgccctgcccttcagccacagcagcgccatcagcaagcactgggaggccgagctggccaccctgaagggcaacaacgccaagctgaccgccgccctgctggagagcaccgccaacgtgaagcagtggaagcagcagctggccgcctaccaggaggaggccgagagactgcacaagagagtgaccgagctggagtgcgtgagcagccaggccaacgccgtgcacacccacaagaccgagctgaaccagaccatccaggagctggaggagaccctgaagctgaaggaggaggagatcgagagactgaagcaggagatcgacaacgccagagagctgcaggagcagagagacagcctgacccagaagctgcaggaggtggagatcagaaacaaggacctggagggccagctgagcgacctggagcagagactggagaagagccagaacgagcaggaggccttcagaaacaacctgaagaccctgctggagatcctggacggcaagatcttcgagctgaccgagctgagagacaacctggccaagctgctggagtgcagctag

SEQ ID NO: 144711 - DNA, 543 bp, Artificial Sequence
  derived and/or modified sequence
atgggcagcgccatcagcaagcactgggaggccgagctggccaccctgaagggcaacaacgccaagctgaccgccgccctgctggagagcaccgccaacgtgaagcagtggaagcagcagctggccgcctaccaggaggaggccgagagactgcacaagagagtgaccgagctggagtgcgtgagcagccaggccaacgccgtgcacacccacaagaccgagctgaaccagaccatccaggagctggaggagaccctgaagctgaaggaggaggagatcgagagactgaagcaggagatcgacaacgccagagagctgcaggagcagagagacagcctgacccagaagctgcaggaggtggagatcagaaacaaggacctggagggccagctgagcgacctggagcagagactggagaagagccagaacgagcaggaggccttcagaaacaacctgaagaccctgctggagatcctggacggcaagatcttcgagctgaccgagctgagagacaacctggccaagctgctggagtgcagctag

SEQ ID NO: 144712 - protein, 2319 aa, Artificial Sequence
  derived and/or modified sequence
MLTMSVTLSPLRSQDLDPMATDASPMAINMTPTVEQGEGEEAMKDMDSDQQYEKPPPLHTGADWKIVLHLPEIETWLRMTSERVRDLTYSVQQDSDSKHVDVHLVQLKDICEDISDHVEQIHALLETEFSLKLLSYSVNVIVDIHAVQLLWHQLRVSVLVLRERILQGLQDANGNYTRQTDILQAFSEETKEGRLDSLTEVDDSGQLTIKCSQNYLSLDCGITAFELSDYSPSEDLLSGLGDMTSSQVKTKPFDSWSYSEMEKEFPELIRSVGLLTVAADSISTNGSEAVTEEVSQVSLSVDDKGGCEEDNASAVEEQPGLTLGVSSSSGEALTNAAQPSSETVQQESSSSSHHDAKNQQPVPCENATPKRTIRDCFNYNEDSPTQPTLPKRGLFLKEETFKNDLKGNGGKRQMVDLKPEMSRSTPSLVDPPDRSKLCLVLQSSYPNSPSAASQSYECLHKVGNGNLENTVKFHIKEISSSLGRLNDCYKEKSRLKKPHKTSEEVPPCRTPKRGTGSGKQAKNTKSSAVPNGELSYTSKAIEGPQTNSASTSSLEPCNQRSWNAKLQLQSETSSSPAFTQSSESSVGSDNIMSPVPLLSKHKSKKGQASSPSHVTRNGEVVEAWYGSDEYLALPSHLKQTEVLALKLENLTKLLPQKPRGETIQNIDDWELSEMNSDSEIYPTYHVKKKHTRLGRVSPSSSSDIASSLGESIESGPLSDILSDEESSMPLAGMKKYADEKSERASSSEKNESHSATKSALIQKLMQDIQHQDNYEAIWEKIEGFVNKLDEFIQWLNEAMETTENWTPPKAEMDDLKLYLETHLSFKLNVDSHCALKEAVEEEGHQLLELIASHKAGLKDMLRMIASQWKELQRQIKRQHSWILRALDTIKAEILATDVSVEDEEGTGSPKAEVQLCYLEAQRDAVEQMSLKLYSEQYTSSSKRKEEFADMSKVHSVGSNGLLDFDSEYQELWDWLIDMESLVMDSHDLMMSEEQQQHLYKRYSVEMSIRHLKKTELLSKVEALKKGGVLLPNDLLEKVDSINEKWELLGKTLGEKIQDTMAGHSGSSPRDLLSPESGSLVRQLEVRIKELKGWLRDTELFIFNSCLRQEKEGTMNTEKQLQYFKSLCREIKQRRRGVASILRLCQHLLDDRETCNLNADHQPMQLIIVNLERRWEAIVMQAVQWQTRLQKKMGKESETLNVIDPGLMDLNGMSEDALEWDEMDISNKLISLNEESNDLDQELQPVIPSLKLGETSNEDPGYDEEADNHGGSQYASNITAPSSPHIYQVYSLHNVELYEDNHMPFLKNNPKVTGMTQPNVLTKSLSKDSSFSSTKSLPDLLGGSNLVKPCACHGGDMSQNSGSESGIVSEGDTETTTNSEMCLLNAVDGSPSNLETEHLDPQMGDAVNVLKQKFTDEGESIKLPNSSQSSISPVGCVNGKVGDLNSITKHTPDCLGEELQGKHDVFTFYDYSYLQGSKLKLPMIMKQSQSEKAHVEDPLLRGFYFDKKSCKSKHQTTELQPDVPPHERILASASHEMDRISYKSGNIEKTFTGMQNAKQLSLLSHSSSIESLSPGGDLFGLGIFKNGSDSLQRSTSLESWLTSYKSNEDLFSCHSSGDISVSSGSVGELSKRTLDLLNRLENIQSPSEQKIKRSVSDITLQSSSQKMSFTGQMSLDIASSINEDSAASLTELSSSDELSLCSEDIVLHKNKIPESNASFRKRLTRSVADESDVNVSMIVNVSCTSACTDDEDDSDLLSSSTLTLTEEELCIKDEDDDSSIATDDEIYEDCTLMSGLDYIKNELQTWIRPKLSLTRDKKRCNVSDEMKGSKDISSSEMTNPSDTLNIETLLNGSVKRVSENNGNGKNSSHTHELGTKRENKKTIFKVNKDPYVADMENGNIEGIPERQKGKPNVTSKVSENLGSHGKEISESEHCKCKALMDSLDDSNTAGKEFVSQDVRHLPKKCPNHHHFENQSTASTPTEKSFSELALETRFNNRQDSDALKSSDDAPSMAGKSAGCCLALEQNGTEENASISNISCCNCEPDVFHQKDAEDCSVHNFVKEIIDMASTALKSKSQPENEVAAPTSLTQIKEKVLEHSHRPIQLRKGDFYSYLSLSSHDSDCGEVTNYIEEKSSTPLPLDTTDSGLDDKEDIECFFEACVEGDSDGEEPCFSSAPPNESAVPSEAAMPLQATACSSEFSDSSLSADDADTVALSSPSSQERAEVGKEVNGLPQTSSGCAENLEFTPSKLDSEKESSGKPGESGMPEEHNAASAKSKVQDLSLKANQPTDKAALHPSPKTLTCEENLLNLHEKRHRNMHR

SEQ ID NO: 144713 - protein, 108 aa, Artificial Sequence
  derived and/or modified sequence
MLTMSVTLSPLRSQDLDPMATDASPMAINMTPTVEQGEGEEAMKDMDSDQQYEKPPPLHTGADWKIVLHLPEIETWLRMTSERVRDLTYSVQQDSDSKHVDVHLVQLK

SEQ ID NO: 144714 - DNA, 6960 bp, Artificial Sequence
  derived and/or modified sequence
atgctgaccatgagcgtgaccctgagccccctgagaagccaggacctggaccccatggccaccgacgccagccccatggccatcaacatgacccccaccgtggagcagggcgagggcgaggaggccatgaaggacatggacagcgaccagcagtacgagaagcccccccccctgcacaccggcgccgactggaagatcgtgctgcacctgcccgagatcgagacctggctgagaatgaccagcgagagagtgagagacctgacctacagcgtgcagcaggacagcgacagcaagcacgtggacgtgcacctggtgcagctgaaggacatctgcgaggacatcagcgaccacgtggagcagatccacgccctgctggagaccgagttcagcctgaagctgctgagctacagcgtgaacgtgatcgtggacatccacgccgtgcagctgctgtggcaccagctgagagtgagcgtgctggtgctgagagagagaatcctgcagggcctgcaggacgccaacggcaactacaccagacagaccgacatcctgcaggccttcagcgaggagaccaaggagggcagactggacagcctgaccgaggtggacgacagcggccagctgaccatcaagtgcagccagaactacctgagcctggactgcggcatcaccgccttcgagctgagcgactacagccccagcgaggacctgctgagcggcctgggcgacatgaccagcagccaggtgaagaccaagcccttcgacagctggagctacagcgagatggagaaggagttccccgagctgatcagaagcgtgggcctgctgaccgtggccgccgacagcatcagcaccaacggcagcgaggccgtgaccgaggaggtgagccaggtgagcctgagcgtggacgacaagggcggctgcgaggaggacaacgccagcgccgtggaggagcagcccggcctgaccctgggcgtgagcagcagcagcggcgaggccctgaccaacgccgcccagcccagcagcgagaccgtgcagcaggagagcagcagcagcagccaccacgacgccaagaaccagcagcccgtgccctgcgagaacgccacccccaagagaaccatcagagactgcttcaactacaacgaggacagccccacccagcccaccctgcccaagagaggcctgttcctgaaggaggagaccttcaagaacgacctgaagggcaacggcggcaagagacagatggtggacctgaagcccgagatgagcagaagcacccccagcctggtggacccccccgacagaagcaagctgtgcctggtgctgcagagcagctaccccaacagccccagcgccgccagccagagctacgagtgcctgcacaaggtgggcaacggcaacctggagaacaccgtgaagttccacatcaaggagatcagcagcagcctgggcagactgaacgactgctacaaggagaagagcagactgaagaagccccacaagaccagcgaggaggtgcccccctgcagaacccccaagagaggcaccggcagcggcaagcaggccaagaacaccaagagcagcgccgtgcccaacggcgagctgagctacaccagcaaggccatcgagggcccccagaccaacagcgccagcaccagcagcctggagccctgcaaccagagaagctggaacgccaagctgcagctgcagagcgagaccagcagcagccccgccttcacccagagcagcgagagcagcgtgggcagcgacaacatcatgagccccgtgcccctgctgagcaagcacaagagcaagaagggccaggccagcagccccagccacgtgaccagaaacggcgaggtggtggaggcctggtacggcagcgacgagtacctggccctgcccagccacctgaagcagaccgaggtgctggccctgaagctggagaacctgaccaagctgctgccccagaagcccagaggcgagaccatccagaacatcgacgactgggagctgagcgagatgaacagcgacagcgagatctaccccacctaccacgtgaagaagaagcacaccagactgggcagagtgagccccagcagcagcagcgacatcgccagcagcctgggcgagagcatcgagagcggccccctgagcgacatcctgagcgacgaggagagcagcatgcccctggccggcatgaagaagtacgccgacgagaagagcgagagagccagcagcagcgagaagaacgagagccacagcgccaccaagagcgccctgatccagaagctgatgcaggacatccagcaccaggacaactacgaggccatctgggagaagatcgagggcttcgtgaacaagctggacgagttcatccagtggctgaacgaggccatggagaccaccgagaactggaccccccccaaggccgagatggacgacctgaagctgtacctggagacccacctgagcttcaagctgaacgtggacagccactgcgccctgaaggaggccgtggaggaggagggccaccagctgctggagctgatcgccagccacaaggccggcctgaaggacatgctgagaatgatcgccagccagtggaaggagctgcagagacagatcaagagacagcacagctggatcctgagagccctggacaccatcaaggccgagatcctggccaccgacgtgagcgtggaggacgaggagggcaccggcagccccaaggccgaggtgcagctgtgctacctggaggcccagagagacgccgtggagcagatgagcctgaagctgtacagcgagcagtacaccagcagcagcaagagaaaggaggagttcgccgacatgagcaaggtgcacagcgtgggcagcaacggcctgctggacttcgacagcgagtaccaggagctgtgggactggctgatcgacatggagagcctggtgatggacagccacgacctgatgatgagcgaggagcagcagcagcacctgtacaagagatacagcgtggagatgagcatcagacacctgaagaagaccgagctgctgagcaaggtggaggccctgaagaagggcggcgtgctgctgcccaacgacctgctggagaaggtggacagcatcaacgagaagtgggagctgctgggcaagaccctgggcgagaagatccaggacaccatggccggccacagcggcagcagccccagagacctgctgagccccgagagcggcagcctggtgagacagctggaggtgagaatcaaggagctgaagggctggctgagagacaccgagctgttcatcttcaacagctgcctgagacaggagaaggagggcaccatgaacaccgagaagcagctgcagtacttcaagagcctgtgcagagagatcaagcagagaagaagaggcgtggccagcatcctgagactgtgccagcacctgctggacgacagagagacctgcaacctgaacgccgaccaccagcccatgcagctgatcatcgtgaacctggagagaagatgggaggccatcgtgatgcaggccgtgcagtggcagaccagactgcagaagaagatgggcaaggagagcgagaccctgaacgtgatcgaccccggcctgatggacctgaacggcatgagcgaggacgccctggagtgggacgagatggacatcagcaacaagctgatcagcctgaacgaggagagcaacgacctggaccaggagctgcagcccgtgatccccagcctgaagctgggcgagaccagcaacgaggaccccggctacgacgaggaggccgacaaccacggcggcagccagtacgccagcaacatcaccgcccccagcagcccccacatctaccaggtgtacagcctgcacaacgtggagctgtacgaggacaaccacatgcccttcctgaagaacaaccccaaggtgaccggcatgacccagcccaacgtgctgaccaagagcctgagcaaggacagcagcttcagcagcaccaagagcctgcccgacctgctgggcggcagcaacctggtgaagccctgcgcctgccacggcggcgacatgagccagaacagcggcagcgagagcggcatcgtgagcgagggcgacaccgagaccaccaccaacagcgagatgtgcctgctgaacgccgtggacggcagccccagcaacctggagaccgagcacctggacccccagatgggcgacgccgtgaacgtgctgaagcagaagttcaccgacgagggcgagagcatcaagctgcccaacagcagccagagcagcatcagccccgtgggctgcgtgaacggcaaggtgggcgacctgaacagcatcaccaagcacacccccgactgcctgggcgaggagctgcagggcaagcacgacgtgttcaccttctacgactacagctacctgcagggcagcaagctgaagctgcccatgatcatgaagcagagccagagcgagaaggcccacgtggaggaccccctgctgagaggcttctacttcgacaagaagagctgcaagagcaagcaccagaccaccgagctgcagcccgacgtgcccccccacgagagaatcctggccagcgccagccacgagatggacagaatcagctacaagagcggcaacatcgagaagaccttcaccggcatgcagaacgccaagcagctgagcctgctgagccacagcagcagcatcgagagcctgagccccggcggcgacctgttcggcctgggcatcttcaagaacggcagcgacagcctgcagagaagcaccagcctggagagctggctgaccagctacaagagcaacgaggacctgttcagctgccacagcagcggcgacatcagcgtgagcagcggcagcgtgggcgagctgagcaagagaaccctggacctgctgaacagactggagaacatccagagccccagcgagcagaagatcaagagaagcgtgagcgacatcaccctgcagagcagcagccagaagatgagcttcaccggccagatgagcctggacatcgccagcagcatcaacgaggacagcgccgccagcctgaccgagctgagcagcagcgacgagctgagcctgtgcagcgaggacatcgtgctgcacaagaacaagatccccgagagcaacgccagcttcagaaagagactgaccagaagcgtggccgacgagagcgacgtgaacgtgagcatgatcgtgaacgtgagctgcaccagcgcctgcaccgacgacgaggacgacagcgacctgctgagcagcagcaccctgaccctgaccgaggaggagctgtgcatcaaggacgaggacgacgacagcagcatcgccaccgacgacgagatctacgaggactgcaccctgatgagcggcctggactacatcaagaacgagctgcagacctggatcagacccaagctgagcctgaccagagacaagaagagatgcaacgtgagcgacgagatgaagggcagcaaggacatcagcagcagcgagatgaccaaccccagcgacaccctgaacatcgagaccctgctgaacggcagcgtgaagagagtgagcgagaacaacggcaacggcaagaacagcagccacacccacgagctgggcaccaagagagagaacaagaagaccatcttcaaggtgaacaaggacccctacgtggccgacatggagaacggcaacatcgagggcatccccgagagacagaagggcaagcccaacgtgaccagcaaggtgagcgagaacctgggcagccacggcaaggagatcagcgagagcgagcactgcaagtgcaaggccctgatggacagcctggacgacagcaacaccgccggcaaggagttcgtgagccaggacgtgagacacctgcccaagaagtgccccaaccaccaccacttcgagaaccagagcaccgccagcacccccaccgagaagagcttcagcgagctggccctggagaccagattcaacaacagacaggacagcgacgccctgaagagcagcgacgacgcccccagcatggccggcaagagcgccggctgctgcctggccctggagcagaacggcaccgaggagaacgccagcatcagcaacatcagctgctgcaactgcgagcccgacgtgttccaccagaaggacgccgaggactgcagcgtgcacaacttcgtgaaggagatcatcgacatggccagcaccgccctgaagagcaagagccagcccgagaacgaggtggccgcccccaccagcctgacccagatcaaggagaaggtgctggagcacagccacagacccatccagctgagaaagggcgacttctacagctacctgagcctgagcagccacgacagcgactgcggcgaggtgaccaactacatcgaggagaagagcagcacccccctgcccctggacaccaccgacagcggcctggacgacaaggaggacatcgagtgcttcttcgaggcctgcgtggagggcgacagcgacggcgaggagccctgcttcagcagcgccccccccaacgagagcgccgtgcccagcgaggccgccatgcccctgcaggccaccgcctgcagcagcgagttcagcgacagcagcctgagcgccgacgacgccgacaccgtggccctgagcagccccagcagccaggagagagccgaggtgggcaaggaggtgaacggcctgccccagaccagcagcggctgcgccgagaacctggagttcacccccagcaagctggacagcgagaaggagagcagcggcaagcccggcgagagcggcatgcccgaggagcacaacgccgccagcgccaagagcaaggtgcaggacctgagcctgaaggccaaccagcccaccgacaaggccgccctgcaccccagccccaagaccctgacctgcgaggagaacctgctgaacctgcacgagaagagacacagaaacatgcacagatag

SEQ ID NO: 144715 - DNA, 8686 bp, Artificial Sequence
  derived and/or modified sequence
agtctttcccataatgagctgcatcatctgaactgatgtcacagcatcatgcagcaggtcaaacaaggcatctcctagtattgcatcctacagatgtgctgtaaacatcaaaagaagacggtgggatcaggagatgctgttttggaaagaagtgaggtttagacttctccatgttaaccatgagcgtgacactttcccccctgaggtcacaggacctggatcccatggctactgatgcttcacccatggccatcaacatgacacccactgtggagcagggtgagggagaagaggcaatgaaggacatggactctgaccagcagtatgaaaagccacccccactacacacaggggctgactggaagattgtcctccacttacctgaaattgagacctggctccggatgacctcagagagggtccgagacctaacctattcagtccagcaggattcggacagcaagcatgtggatgtacatctagttcaactaaaggacatttgtgaagatatttctgatcatgttgagcaaatccatgccctccttgaaacagagttctccctaaagctgctgtcttactctgtcaacgtgatagtggacatccacgcagtgcagctcctctggcaccagcttcgagtctcagtgctggttctgcgggagcgcattctgcaaggtctgcaggacgccaatggcaactacactaggcagacggacattctgcaagctttctctgaagagacaaaagagggccggcttgattctctaacagaagtggatgactcaggacaattaaccatcaaatgttctcaaaattacttgtctctggattgtggcattactgcattcgaactgtctgactacagtccaagtgaggatttgctcagtgggctaggtgacatgacctctagccaagtcaaaaccaaaccctttgactcttggagctacagtgagatggaaaaggagtttcctgagcttatccgaagtgttggtttacttacggtagctgctgactctatctctaccaatggcagtgaagcagttactgaggaggtatctcaagtatctctctcagtagacgacaaaggtggatgtgaggaagacaatgcttctgcagtcgaagagcaaccaggcttaacactgggggtgtcatcatcttcaggagaagctctgacaaatgctgctcaaccctcctctgagactgtgcagcaagaatccagttcctcctcccatcatgatgcaaagaatcagcagcctgttccttgtgaaaatgcaacccccaaacgaaccatcagagattgctttaattataacgaggactctcccacgcagcctacattgccaaaaagaggactttttcttaaagaggaaacttttaagaatgatctgaaaggcaatggtggaaagaggcaaatggttgatctaaagcctgagatgagcagaagcaccccttcgctagtagatcctcctgacagatccaaactttgcctggtattgcagtcttcttaccccaacagcccttctgctgccagccagtcttatgagtgtttacacaaggtggggaatgggaaccttgaaaacacagtcaaatttcacattaaagaaatttcttccagcctgggaaggcttaacgactgctataaagagaaatctcgacttaaaaagccacacaagacctcagaagaggtgcctccatgccgaacacctaaacgggggactggttcaggcaaacaagctaaaaatacaaagagctcagcagtgccaaatggagagctttcttatacttccaaggccatagaggggccacaaacaaattctgcttccacatcctcacttgagccttgtaatcagagaagttggaatgccaaattgcaattgcagtcagaaacatccagttcaccagcttttactcagagcagtgaatcctctgttggctcagacaacatcatgtctccggtgccacttctttcaaaacacaaaagcaaaaaaggtcaagcctcctctccaagtcacgtcactaggaatggtgaggttgtggaggcctggtatggctctgatgaatacctagcactgccctctcaccttaagcagacagaagtattggctttgaagttggaaaacctaacaaagcttctgcctcagaaacccagaggagaaaccatccagaatattgatgactgggaactgtctgaaatgaattcagattctgaaatctatccaacctatcatgtcaaaaagaagcatacaaggctaggcagggtgtctccaagctcatctagtgacatagcctcttcactaggggagagcattgaatctgggcccctgagtgacattctttctgatgaggagtccagtatgcctctcgctggcatgaaaaagtatgctgatgagaagtcagaaagagcttcatcctctgagaaaaatgagagccattctgccactaaatcagctttaattcagaaactgatgcaagatattcagcaccaagacaactatgaagccatatgggaaaaaatagaggggtttgtaaacaaactggatgaattcattcaatggttaaatgaagccatggaaactacagaaaattggactccccctaaagcagagatggatgaccttaaactgtatctggagacacacttgagttttaagttgaatgtagacagtcattgtgctctcaaggaagctgtggaggaggaaggacaccaacttcttgagcttattgcatctcacaaagcaggactgaaggacatgctgcggatgattgcaagtcaatggaaggagctgcagaggcaaatcaaacggcagcacagctggattctcagggctctggataccatcaaagccgagatactggctactgatgtgtctgtggaggatgaggaagggactggaagccccaaggctgaggttcaactatgctacctggaagcacaaagagatgctgttgagcagatgtccctcaagctgtacagcgagcagtataccagcagcagcaagcgaaaggaagagtttgctgatatgtcaaaagttcattcagtgggaagcaatgggcttctggactttgattcagaatatcaggagctctgggattggctgattgacatggagtcccttgtgatggacagccacgacctgatgatgtcagaggagcagcagcagcatctttacaagcgatacagtgtggaaatgtccatcagacacctgaaaaagacggagctgcttagtaaggttgaagctttgaagaaaggtggcgttttactaccaaatgatctccttgaaaaagtggattcaattaatgaaaaatgggaactgcttgggaaaaccctaggagagaagatccaggacacaatggcagggcacagtgggtcgagtccacgtgacctgctctctcctgaaagtggaagcctggtaaggcagctggaggtcaggatcaaagaactgaaaggatggctaagagatacagagcttttcatcttcaattcctgtctgagacaagaaaaggaaggaacaatgaatactgagaaacaactgcaatactttaagtccctctgtcgtgaaatcaagcaacgacgtcgaggagttgcctccattctgcgactatgccagcatcttttggatgaccgggagacttgcaatctgaatgcagaccaccagcccatgcagctgatcattgtaaatcttgaaagaaggtgggaagccattgtcatgcaagccgtccagtggcaaacacgtctacaaaagaagatgggaaaggaatctgagactttgaatgtgattgatcctggcttgatggacctaaatgggatgagtgaggatgccctggaatgggatgaaatggacataagtaacaagttaattagtttgaatgaggaatcaaatgaccttgatcaagaactccaacctgttatcccttccttgaagcttggagagacaagtaatgaggaccctggttatgacgaggaggctgataaccatgggggatctcagtatgcctcaaatattactgccccctctagtccacacatttaccaggtgtacagcctccacaatgttgaactctatgaggacaaccacatgccatttctgaaaaacaatccaaaggtcactggcatgacacagcctaatgttttaactaagagtctcagtaaagactcttcattttcatctaccaaatctttgccagatcttctaggtggttccaatttggtaaagccctgcgcatgtcatggaggagacatgagccagaattcaggcagtgagagtggaattgtcagtgaaggagacacagaaaccactaccaactctgaaatgtgcttgctcaatgcagtggatgggtccccaagtaaccttgaaactgaacatctggacccacaaatgggagatgcagttaacgtgttaaagcaaaaatttacagatgagggggaaagcattaagcttccaaatagctctcagtcgtccatttcaccagtgggttgtgtaaatggaaaagttggagatttaaacagtattaccaaacatacccctgactgtttgggagaagaattacaaggaaaacatgatgtgtttacattttatgattactcatacctccaaggctcaaaactcaaattaccaatgataatgaaacagtcacaaagcgaaaaagcgcatgtggaggatcccctgcttcgtggtttttattttgataaaaaatcatgcaaatctaaacatcagactacagagttacaaccagatgtacctccccatgaaaggattttggcaagtgcatctcatgaaatggatcgcatttcatataaaagtggcaatatagaaaagacattcactggcatgcagaatgccaaacagctctcccttttatctcatagttcatctattgagtccctttctccagggggtgatttatttggattgggcatctttaaaaatggcagtgacagcctccagcgaagcacttctttagaaagttggttgacttcctataaaagcaatgaagatctctttagctgtcacagctctggggatataagcgtgagcagtggctcagttggtgaactaagtaaaagaacattagatctcctgaatcgtttggagaatatccagagcccctcagagcaaaagataaaacgaagtgtttctgatatcactcttcaaagcagttcccaaaagatgtcctttactggccagatgtcattggacatagcatcttctatcaatgaagactcagcggcatctctaacagaacttagcagcagtgacgagctctctctttgctcagaggatattgtgttacacaagaacaagatcccggaatcgaatgcatcgttcaggaagcgtctgactcgttcagtggctgatgaaagcgatgtcaatgtcagcatgattgttaatgtctcttgcacctctgcttgcactgatgatgaagatgacagcgacctgctctccagctctacccttaccttgactgaagaagagctgtgcatcaaagatgaggatgacgactccagtattgcaacagatgatgaaatttatgaagactgcaccttgatgtcagggctagactacataaagaatgaattacagacctggattaggccaaaattgtctttgacaagagataagaaaaggtgcaatgtcagtgatgagatgaagggcagtaaagatataagtagcagtgagatgaccaatccctctgatactctgaatattgagacccttctaaatggctctgtaaaacgtgtctctgaaaataatggaaatggtaagaattcatctcatacccatgagttagggacaaagcgtgaaaataagaaaactattttcaaagttaataaagatccatatgtggctgacatggaaaatggcaatattgaaggtattccagaaaggcaaaagggaaaaccgaatgtgacttcaaaggtatcagaaaatcttggttcacatgggaaagagatttcagagagtgagcattgtaagtgtaaagcacttatggatagtttagatgattcaaatactgctggcaaggaatttgtttcccaagatgttagacatcttccaaagaaatgtccaaatcaccaccattttgaaaatcaaagcactgcctctactcccactgagaagtctttctcagaactggctttagaaaccaggtttaacaacagacaagactctgatgcactgaaatcatctgatgatgcaccgagtatggctggaaaatctgctggttgttgcctagcacttgaacaaaacggaacagaggaaaatgcttctatcagcaacatttcctgttgcaactgtgagccagatgttttccatcaaaaagatgccgaagattgttcagtacacaactttgttaaggaaatcattgacatggcttcgacagccctaaaaagtaaatctcaacctgaaaacgaggtggctgctcctacttcattaactcaaatcaaggagaaagtgttggagcattctcaccggcccatccagctgagaaaaggggacttttattcgtacttatctctctcatctcatgacagtgattgtggggaggtcaccaattacatagaagagaaaagcagcactccattgccactagacaccactgactcgggcttagatgacaaggaagatattgaatgcttttttgaggcctgtgttgagggtgactctgatggagaggagccttgtttctctagtgctcctccaaatgaatctgcagttcccagcgaagctgcaatgccactacaagcaacagcatgttcttctgagttcagtgatagttctctttcagctgatgatgcagatacagtggctctttcaagtccttcctctcaggaaagagctgaggttggaaaggaagtgaatggtttgccccaaacttccagtggctgtgcagaaaacttagagtttactccttcaaagcttgacagtgaaaaggaaagttccggaaaaccaggtgaatctggaatgccagaagaacataatgctgcttcagccaaatctaaagttcaagacctctccttgaaggcaaatcagccaacagacaaggccgcattgcatcccagccccaaaactttaacctgtgaagaaaatcttctaaaccttcatgaaaaacgacatagaaatatgcataggtagaatgtaccccctccccaagcatgaaaatcatctcactgaaagatacgcctggctgcaactcaggggtggcctcatcctcccgccctgggctggcctctggttccatcacgtttgtcactgccgtttattacattgacttctcccaagatgaatcttccttccaaatgtgttttctccacacaagccttgtgatctgaatgtgtgcgctggttctctttaggtgatcgtctttgaagttcagcaaagctgcttgttctcccatggattcctgtcccaagctacctctaccaaccctctctctccagctagacttttctctttgcctcctcccttcccttccactctttaaagttctgcagttcaccaactggtagtccattaaattctcctgtctagaatgacccccccaccagtacttgaccaatttcatgtatcaatctggatttttttttaacggtataatgactgtgtttattgaaagagttttacctaaaaagccaacatttgaattggttgcagcatagagaagaaacactggtccttctttcaaaattaagcaactattaaaagcgccattttatttatttcatttaaaaaataatctatgcagcatttcaagaaacaaccatatggtgttgtatattataaactggtgacattctactattgaattatgtacaacattttcattttttatgcttcttgaggtggtaatgagaaaaaagttttttaaaaaagtgtgccttgctgtatttcttataccatttattaaaaagctgctttcacggtaaaattatgttggtttgaaaggaggaaatagcaaggttaagatgtgtgaataatttctgtatatatgtataaccaagtacaaacattgatgtataatgacagtataaaatgctttcatgtttgtgatgtctagtgatgtggaaaatataagccttaaatccattagattgcatggtaattaaaattggcataataaacacagattattgggggaaaaggaaaattagtgatctcttctactatgttctttaccaaattgttgcatctggttctgaaaaagtatagcatgtagcagcttccaaacatattcatattgcttaagaggcttaacattacctaaactagagactagacgtaaagccttcagttttcaaaatctttctggtcactataaagatcttggaacagcaaatgattaaatgtcagttcccctaaaccaataaacatttatactagattttttatttccacttatcattaatgatttaatgttggatttcaggtaccttgtatgtcttaatttattttaaatatttattttgaatgagtttgatagaaagctagtagaaaagtacagaaaatttgactattatttatagatttcaggtatatttatatgtgtaaaagaaattgacaaagaaatatttcatctggcctttactgactcctgttaaatgcagttttaaatttatatcgtaacacctacttaagtgcctgacacagtaggtattcaataaaaatttactgaattaaaggattaaattagg

SEQ ID NO: 144716 - DNA, 6960 bp, Artificial Sequence
  derived and/or modified sequence
atgttgactatgtctgtgactctctccccattaagatctcaggacctagatcccatggctacggatgccagccccatggcaatcaatatgacgccaaccgtggagcagggtgaaggtgaagaagctatgaaggacatggactccgaccaacagtatgagaagcctcccccactacacacaggcgctgactggaaaattgtattacacctgccggaaattgagacatggctccgcatgactagtgagcgggttcgcgacctgacctattcagtgcagcaagactccgactctaagcatgtcgatgtacacctcgtccaactgaaagacatttgcgaagatatttcagatcacgtggaacagattcacgccttgctggagaccgaattctccctgaaactgctttcatactctgttaatgtaattgtggatatccacgctgtgcagctgctctggcaccagctacgggtgtcggtcttagtcctgcgggagcgaatacttcagggactgcaggacgcgaacgggaattacactcggcaaactgacatcctgcaggccttcagtgaggaaaccaaagaaggtcgcttagattcattgacagaggttgatgattcaggtcaactcacaattaagtgcagtcagaattatttatcattagattgtggcataaccgcctttgaactttccgactacagtccttcagaggatcttttgtcagggctgggagacatgacatcatcccaggtgaaaaccaaacctttcgattcatggagctactctgagatggaaaaagaatttccagagctgatccgatctgtagggcttctgactgttgccgcggacagcatcagcaccaatggttccgaggccgtgacggaggaggtgagccaagtcagcttgtccgtagacgataaaggaggttgcgaggaggacaatgcctcagctgtagaagagcagcctggactcactctgggagtgagctcttcatcaggggaagcccttactaacgccgcgcaaccatcatcagagaccgtccaacaggagagtagcagttcatctcatcatgatgccaagaatcagcagccagtgccatgcgagaatgccactcccaagcgtaccatccgggattgcttcaattataacgaagactctcccacacagcctaccctcccaaagcgcggcctgttcctgaaggaagaaacgttcaagaacgatcttaagggaaacgggggtaagaggcagatggtagacctcaaacctgagatgtccagatccacccccagcctggttgatccccctgataggtcaaagctgtgcttggtcctgcagagctcctatcctaactccccttcagcagcaagtcagtcatatgaatgtcttcataaggtaggcaacggaaatttagaaaataccgtgaagttccacatcaaggagattagctctagtctaggacggttaaacgattgctacaaggagaagagccgcttgaagaaaccccacaaaaccagtgaggaggtgccaccctgtagaacccccaagcgtggtacaggatctggtaagcaggctaagaatactaaatctagcgctgtgccaaatggtgaactgtcctatacctctaaggctattgaaggaccccagactaattccgcatcgacttctagcctcgagccctgcaaccagcggtcctggaatgcgaaacttcagcttcagtctgagacatcgtcttctcctgcatttacccagagttctgagagtagcgttggctctgataatattatgagccctgtgcctctgctgtccaaacacaagagcaaaaagggccaggcatcatccccatcccatgtgacgagaaacggagaggtggttgaggcttggtatggcagtgacgaatatttagctctccccagccacctgaaacagactgaagttctggcgttaaagctggagaatctgacaaagcttctgccccagaaacctagaggggaaacaatacaaaatatcgatgattgggagctgtctgaaatgaactccgactccgagatttaccccacctatcacgtcaagaaaaaacacactcggctgggcagggtgtccccatcatcttcgagcgacatcgcctcctccctgggtgaatcgatagagtccggcccgttgagcgacatcctttcggacgaggaaagttccatgccactcgcgggaatgaagaagtacgcagacgaaaagagcgaacgcgcctcttcttccgagaaaaatgagtctcattccgcaacaaaatctgccctgattcagaaactgatgcaggacattcagcatcaggacaattatgaggctatctgggagaaaattgaaggattcgtcaacaaacttgacgagtttattcagtggttgaacgaggctatggagactacggagaattggaccccaccaaaggcggagatggacgacctgaagctttacctggaaacacatttgagctttaaattgaacgttgatagtcactgcgccctaaaagaggctgtcgaagaggaaggtcaccaattactagagctcatcgcctcacataaggcaggtctgaaggacatgctgaggatgattgcctcacagtggaaggagctgcagcggcagataaagcggcagcattcctggattctgagggcactagacactattaaagccgaaattttggctacagacgtttcggtggaggacgaagaggggaccggaagtcccaaggcagaagttcaactgtgctatttagaagcccagagggatgcagtggaacagatgagccttaaactgtatagcgaacagtatacctccagttctaagagaaaggaagagttcgctgatatgtccaaagtacacagtgtaggctcgaacgggctgctcgacttcgactccgagtaccaggaactctgggattggttaattgacatggaatcacttgtgatggatagtcacgacctgatgatgagcgaggagcagcagcaacatctgtacaagcggtattctgtagaaatgtcgatccgccacttgaaaaagactgagctgctcagtaaagtggaggcactgaagaaggggggtgtcctacttcccaatgatctcctggaaaaagtggatagtatcaacgaaaaatgggagctgctgggaaaaacactcggcgaaaagatccaggacaccatggccggacactcaggctcaagcccaagggatctcttgtctccggagagtggaagcctagttagacaattggaggtccgcattaaggagctcaaagggtggctacgtgacacggaactgttcatattcaattcttgtctacggcaagagaaggagggtaccatgaatacagaaaagcaattgcagtacttcaaatccctctgtcgtgaaataaagcagcggcggcgtggggtcgcctctatcctgcggctgtgtcagcatctgcttgatgacagggagacatgcaatctcaacgcagatcaccagcctatgcagttaataattgtcaaccttgagcgacggtgggaagccatcgttatgcaggccgttcagtggcagacaaggctgcaaaaaaagatggggaaggaaagcgagaccctgaatgtcatcgatcctggcttaatggacttaaacggcatgtctgaagatgccttggagtgggatgagatggatatcagcaacaaactgatctccctgaacgaagagtcaaatgacttggaccaggagttgcagccggtaataccttccttaaagcttggtgaaacctctaatgaggacccggggtacgacgaagaggcagataaccacggcggctcccagtacgccagcaatataacagcgccctcttctcctcacatttaccaagtctattcactccacaacgtagagctgtacgaagataatcacatgccctttctgaaaaacaatccaaaagttactggaatgacacaaccgaatgtgctgaccaagtctttgtctaaggactcaagttttagttcaacgaaaagcctccctgacctgctgggcggctccaatctcgttaaaccttgtgcgtgtcatggtggcgacatgtctcagaattcaggaagcgagagtggcatagtgagtgagggagacaccgaaaccactaccaactctgagatgtgtcttctgaacgcagtcgacggatccccaagcaacctggagacggaacatctcgacccccaaatgggcgacgccgtgaacgtccttaaacagaagtttacagacgaaggcgagtccatcaaactgcccaactccagtcagtcttcaataagtcctgtggggtgcgtgaacggcaaggttggcgaccttaattccattacaaagcacactccagactgcctgggcgaggagcttcaggggaagcatgacgtgttcaccttctatgactacagctacctgcagggctccaaactaaagctgcctatgatcatgaagcagagtcagagcgaaaaagctcatgtcgaggaccctttgctgcgaggcttttatttcgataagaaaagctgcaagtccaagcaccaaaccaccgaactgcagccagatgtgcccccacatgaaaggatcctcgcctccgcctcccacgaaatggatcggatttcatataagtcaggaaacatcgagaaaactttcaccgggatgcaaaacgccaaacagctctccctcctgagccacagtagcagcatcgaatccctctccccaggaggggaccttttcggactcggaatctttaagaatgggagtgattctctacaacgctcaacctctttggagtcgtggctgaccagttacaagagtaatgaggaccttttcagctgccactcaagcggcgatatatccgttagctctggatccgtgggcgagctctcaaagcgtacccttgacttgctgaatcgcctagagaatatacagtctccatctgagcagaagattaaacggtcggtgagtgatatcaccctgcagtcctcaagccagaagatgtcttttactggacaaatgtctctagatatcgcatcttcgattaacgaggattcagcagccagcctgactgaactttctagcagtgacgagctcagcttatgttccgaggacatcgtgctccataagaataaaatcccggaatccaacgcttccttcaggaagcggctgactcggtccgtcgccgatgaatcagatgtcaacgtaagcatgattgtgaacgtatcctgtaccagtgcttgtacagatgacgaggacgatagcgacctgttgagcagctctacccttacactgaccgaagaggagctttgtataaaagatgaggatgacgactccagcatcgccacagacgacgagatctatgaagactgcaccttaatgtccgggctggactacattaagaatgaactgcaaacatggatccgcccaaagcttagtctgacgagggacaagaagcgctgcaacgtctcagacgagatgaaggggagcaaagacatctcttcctcagagatgacaaatcctagcgacacactgaatattgaaactttgctcaacggatcagtaaaaagggtgtctgagaacaacggaaacgggaaaaattcttcccacacacatgaattgggaactaagcgggagaacaaaaaaaccattttcaaggtgaacaaagacccctatgttgctgacatggagaatggaaacatagagggtatccccgagcggcagaaaggcaagcccaatgtcaccagcaaggtcagtgaaaacctaggatcgcatggcaaggagataagcgagtcagaacattgtaagtgcaaagcactgatggactccctcgatgactctaacacagctggcaaagagttcgtaagtcaagatgtaaggcaccttcccaagaagtgcccaaatcaccaccacttcgaaaaccagagtacagcctctacccccacagagaagagttttagcgagctggcactggaaacaaggtttaacaacaggcaggactccgacgctctgaagagcagcgacgatgccccatcaatggcaggcaagtcggctgggtgctgcctcgcgcttgaacagaacggcacggaagagaacgcgtcaattagcaacatcagttgctgtaattgcgaaccggacgtgttccatcagaaggatgccgaagactgttccgttcataattttgtcaaggagattattgacatggccagtaccgccttgaagtctaaaagtcagcctgagaacgaggttgcagcacctacaagtctcacccagataaaagaaaaagtcctcgagcactcacacaggccgatacagctgcgaaagggggacttctatagctacctctccctttcctcacacgattctgactgtggcgaagtcactaactacatcgaggagaagagtagtacccccctaccactcgacactacagactcgggccttgatgataaggaagacatagagtgcttttttgaagcctgtgtagagggagactctgatggggaggagccctgtttcagtagcgccccccccaacgaaagcgccgtgcctagcgaggccgcgatgcctttgcaggcgaccgcgtgctctagtgagttcagcgactcgagcttatccgcggacgacgccgatactgtggcccttagcagtccctcttcacaggagcgcgctgaagtcggaaaggaggtgaatggactgccgcagacatcaagcggatgtgctgaaaatctggaattcactccctccaagcttgatagcgaaaaggagagtagcgggaagccaggcgagtcagggatgcccgaagaacacaatgctgcctcagcaaagtccaaggtgcaagatttatcgcttaaggcgaaccagcccaccgacaaagccgctctacacccatccccaaaaaccctgacttgtgaggagaatctgctcaacctgcatgaaaaacgtcacagaaatatgcatagatag

SEQ ID NO: 144717 - DNA, 6960 bp, Artificial Sequence
  derived and/or modified sequence
atgctgaccatgtctgtgaccctgagccccctgcggagccaggacctggaccccatggccacagatgccagccccatggccatcaacatgacccccaccgtggagcagggcgagggggaggaggccatgaaggacatggacagcgaccagcagtatgagaagcccccacccctgcacactggagctgactggaagatcgtgctgcacctgcctgagattgagacctggctgaggatgaccagcgagcgggtgcgggacctgacctacagcgtgcagcaggacagcgacagcaagcacgtggatgtgcacctggtgcagctgaaggacatctgtgaggacatcagtgaccacgtggagcagatccacgccctgctggagacagagttcagcctgaagctgctgagctacagcgtgaatgtgattgtggacatccatgctgtgcagctgctgtggcaccagctgcgggtgtctgtgctggtgctgcgggagcgcatcctgcagggcctgcaggatgccaatggaaactacacccggcagacagacatcctgcaggccttcagcgaggagaccaaggagggccgcctggacagcctgacagaggtggatgacagcggccagctgaccatcaagtgcagccagaactacctgagcctggactgtggcatcacagcctttgagctgagtgactacagccccagcgaggacctgctgagcggcctgggggacatgaccagcagccaggtgaagaccaagccctttgacagctggagctacagcgagatggagaaggagttccctgagctgatccgctctgtgggcctgctgactgtggccgctgacagcatcagcaccaatggaagtgaagctgtgacagaggaggtgtcccaggtgtccctgtctgtggatgacaagggcggctgtgaagaagataatgccagcgctgtggaggagcagcccggcctgaccctgggcgtgagcagcagcagtggagaggccctgaccaatgctgcccagcccagcagcgagaccgtgcagcaggagagcagcagcagcagccaccatgatgccaagaaccagcagcctgtgccctgtgaaaatgccacccccaagaggaccatccgggactgcttcaactacaatgaagacagccccacccagcccaccctgcccaagaggggcctcttcctgaaggaggagaccttcaagaatgacctgaagggaaatggaggcaagaggcagatggtggacctgaagccagagatgagccgcagcacccccagcctggtggaccccccagacaggagcaagctgtgcctggtgctgcagagcagctaccccaacagccccagcgctgccagccagagctatgaatgtctgcacaaggtgggcaatggaaacctggagaacacagtgaagttccacatcaaggagatcagcagcagcctgggccgcctgaatgactgctacaaggagaagagccggctgaagaagccccacaagaccagcgaggaggtgcccccctgcaggacccccaagaggggcactggaagtggcaagcaggccaagaacaccaagagcagcgctgtgcccaatggagagctgagctacaccagcaaggccatcgagggcccccagaccaacagcgccagcaccagcagcctggagccctgcaaccagaggtcctggaatgccaagctgcagctgcagagcgagaccagcagcagccctgccttcacccagagcagcgagagctctgtgggcagtgacaacatcatgagccctgtgcccctgctgagcaagcacaagagcaagaagggccaggccagcagccccagccacgtgaccagaaatggagaggtggtggaggcctggtacggcagtgatgagtacctggccctgcccagccacctgaagcagacagaggtgctggccctgaagctggagaacctgaccaagctgctgccccagaagcccagaggagagaccatccagaacattgatgactgggagctgtctgagatgaacagcgacagcgagatctaccccacctaccacgtgaagaagaagcacacccggctgggccgggtgagccccagcagcagcagtgacatcgccagcagcctgggggagagcattgagagcggccccctgagtgacatcctgagtgatgaggagagctccatgcccctggccggcatgaagaagtatgcagatgagaagtctgagcgggccagcagcagcgagaagaatgaaagccacagcgccaccaagagcgccctgatccagaagctgatgcaggacatccagcaccaggacaactatgaggccatctgggagaagattgagggctttgtgaacaagctggatgagttcatccagtggctgaatgaggccatggagaccacagagaactggaccccacccaaggccgagatggatgacctgaagctgtacctggagacccacctgtccttcaagctgaatgtggacagccactgtgccctgaaggaggccgtggaggaggagggccaccagctgctggagctgattgccagccacaaggccggcctgaaggacatgctgaggatgattgccagccagtggaaggagctgcagaggcagatcaagaggcagcacagctggatcctgcgggccctggacaccatcaaggccgagatcctggccacagatgtgtctgtggaggatgaggagggcaccggcagccccaaggccgaggtgcagctgtgctacctggaggcccagagagatgctgtggagcagatgagcctgaagctgtacagcgagcagtacaccagcagcagcaagaggaaggaggagtttgctgacatgagcaaggtgcacagcgtgggcagcaatggcctgctggactttgacagcgagtaccaggagctgtgggactggctgattgacatggagagcctggtgatggacagccatgacctgatgatgtctgaggagcagcagcagcacctgtacaagcgctacagcgtggagatgagcatccgccacctgaagaagacagagctgctgagcaaggtggaggccctgaagaagggcggcgtgctgctgcccaatgacctgctggagaaggtggacagcatcaatgagaagtgggagctgctgggcaagaccctgggggagaagatccaggacaccatggccggccacagcggcagcagcccccgggacctgctgagccctgagagcggcagcctggtgcggcagctggaggtgcgcatcaaggagctgaagggctggctgcgggacacagagctgttcatcttcaacagctgcctgcggcaggagaaggagggcaccatgaacacagagaagcagctgcagtacttcaagagcctgtgccgggagatcaagcagaggcggcggggcgtggccagcatcctgcggctgtgccagcacctgctggatgaccgggagacctgcaacctgaatgctgaccaccagcccatgcagctgatcatcgtgaacctggagcggcgctgggaggccatcgtgatgcaggccgtgcagtggcagacccggctgcagaagaagatgggcaaggagagcgagaccctgaatgtcatcgaccccggcctgatggacctgaatggcatgtctgaagatgccctggagtgggatgagatggacatcagcaacaagctgatcagcctgaatgaggagagcaatgacctggaccaggagctgcagcccgtcatccccagcctgaagctgggggagaccagcaatgaagatcctggctatgatgaggaggccgacaaccacggcggcagccagtatgccagcaacatcacagcccccagcagcccccacatctaccaggtgtacagcctgcacaacgtggagctgtatgaggacaaccacatgcccttcctgaagaacaaccccaaggtgacaggcatgacccagcccaacgtgctgaccaagagcctgagcaaggacagcagcttcagcagcaccaagagcctgcctgacctgctgggcggcagcaacctggtgaagccctgtgcctgccacggcggggacatgagccagaacagcggcagcgagagcggcatcgtgtctgagggggacacagagaccaccaccaacagcgagatgtgcctgctgaatgctgtggatggcagccccagcaacctggagacagagcacctggacccccagatgggagatgctgtgaatgtgctgaagcagaagttcacagatgaaggagagagcatcaagctgcccaacagcagccagagcagcatcagccctgtgggctgtgtgaatggcaaggtgggggacctgaacagcatcaccaagcacaccccagactgcctgggggaggagctgcagggcaagcatgatgtgttcaccttctatgactacagctacctgcagggcagcaagctgaagctgcccatgatcatgaagcagagccagagcgagaaggcccacgtggaggaccccctgctgcggggcttctactttgacaagaagagctgcaagagcaagcaccagaccacagagctgcagccagatgtgccccctcatgagcgcatcctggccagcgccagccatgagatggaccgcatctcctacaagagcggcaacatcgagaagaccttcaccggcatgcagaatgccaagcagctgagcctgctgagccacagcagcagcattgagagcctgagccctggaggagacctgtttggcctgggcatcttcaagaatggaagtgacagcctgcagaggagcaccagcctggagagctggctgaccagctacaagagcaatgaagatctcttcagctgccacagcagcggggacatctctgtgagcagcggctctgtgggggagctgagcaagaggaccctggacctgctgaaccggctggagaacatccagagccccagcgagcagaagatcaagaggtctgtgtctgacatcaccctgcagagcagcagccagaagatgtccttcaccggccagatgagcctggacatcgccagcagcatcaatgaagacagcgctgccagcctgacagagctgagcagcagtgatgagctgagcctgtgcagcgaggacatcgtgctgcacaagaacaagatccctgagagcaatgccagcttcaggaagaggctgaccaggtctgtggctgatgaaagtgatgtgaatgtgtccatgattgtgaatgtgtcctgcaccagcgcctgcacagatgatgaagatgacagcgacctgctgagcagcagcaccctgaccctgacagaggaggagctgtgcatcaaggatgaagatgatgacagcagcatcgccacagatgatgagatctatgaggactgcaccctgatgagcggcctggactacatcaagaatgagctgcagacctggatccggcccaagctgagcctgacccgggacaagaagcgctgcaatgtgtctgatgagatgaagggcagcaaggacatcagcagcagcgagatgaccaaccccagcgacaccctgaacatcgagaccctgctgaatggatctgtgaagagggtgtctgagaacaatggaaatggcaagaacagcagccacacccatgagctgggcaccaagcgggagaacaagaagaccatcttcaaggtgaacaaggacccctacgtggccgacatggagaatggaaatattgagggcatccctgagcggcagaagggcaagcccaacgtgaccagcaaggtgtctgagaacctgggcagccacggcaaggagatcagcgagagcgagcactgcaagtgcaaggccctgatggacagcctggatgacagcaacacagctgggaaggagtttgtgtcccaggatgtgcgccacctgcccaagaagtgccccaaccaccaccactttgagaaccagagcacagccagcacccccacagagaagagcttcagcgagctggccctggagacccgcttcaacaaccggcaggacagtgatgccctgaagagcagtgatgatgcccccagcatggccggcaagtctgctggctgctgcctggccctggagcagaatggaacagaagaaaatgccagcatcagcaacatcagctgctgcaactgtgagccagatgtgttccaccagaaggatgctgaggactgcagcgtgcacaactttgtgaaggagatcatcgacatggccagcacagccctgaagagcaagagccagccagaaaatgaggtggccgcccccaccagcctgacccagatcaaggagaaggtgctggagcacagccaccggcccatccagctgaggaagggggacttctacagctacctgagcctgagcagccatgacagcgactgtggggaggtgaccaactacatcgaggagaagagcagcacccccctgcccctggacaccacagacagcggcctggatgacaaggaggacatcgagtgcttctttgaggcctgtgtggagggggacagtgatggagaggagccctgcttcagcagcgcccccccaaatgaatctgctgtgcccagcgaggccgccatgcccctgcaggccacagcctgcagcagcgagttcagtgacagcagcctgtctgcagatgatgctgacacagtggccctgagcagccccagcagccaggagcgggcagaggtgggcaaggaggtgaatggcctgccccagaccagcagcggctgtgccgagaacctggagttcacccccagcaagctggacagcgagaaggagagcagcggcaagccaggagagagcggcatgcctgaggagcacaatgctgccagcgccaagagcaaggtgcaggacctgagcctgaaggccaaccagcccacagacaaggccgccctgcaccccagccccaagaccctgacctgtgaggagaacctgctgaacctgcacgagaagaggcacaggaacatgcacaggtag

SEQ ID NO: 144718 - DNA, 6960 bp, Artificial Sequence
  derived and/or modified sequence
atgctgaccatgagcgtgaccctgagccccctgcggagccaggacctcgatcctatggcaactgatgcctcccctatggcgattaacatgacccccacagtggagcagggcgagggtgaagaggctatgaaagatatggattcagaccagcaatacgaaaagcccccgcccctccacacaggcgccgattggaagatcgttttgcaccttcccgaaatcgagacctggctgcggatgacaagtgagagagtgagggacctgacctacagtgtgcagcaagattcagactcaaagcatgtcgacgtgcacttggtgcaactcaaggacatctgtgaggacataagtgatcacgtcgaacagattcatgccctcctcgagaccgagttttctttaaaattactgagctatagtgttaacgtgatcgtagatatacacgctgtccaattattgtggcatcagctaagggtatctgtgctggtgttacgagagagaattttacaaggactccaagacgctaatgggaactacaccagacagacggatattctgcaggcgttctctgaggaaactaaggaagggaggctcgactcattaacagaagtggatgatagcggccagctgaccatcaaatgtagccagaactatctgtcacttgactgcggtataaccgcctttgaactgtccgactatagtccgtccgaggatctcctatctggattaggcgacatgactagctctcaagtcaagactaagccttttgattcatggtcttactccgagatggagaaagaattccccgagttgatccgcagcgtggggctccttacagtcgccgccgacagcattagcacaaacggttccgaggcggttactgaagaggtcagtcaggttagcctttctgtggacgataagggagggtgtgaggaggacaacgccagcgccgtcgaagagcagcctggccttaccctgggcgtgagcagctccagcggtgaagccctgaccaatgctgcccaaccatcttctgagacagtgcagcaggagtcttcttctagctcccaccatgacgcgaaaaaccagcagccagtgccttgtgaaaatgccacccctaaacgcacaatccgcgattgcttcaactacaatgaagactctcccacccagccaaccctccctaagcgggggctcttcttgaaagaggaaactttcaaaaacgatctaaagggaaacggtggaaagaggcagatggtggaccttaaacccgagatgtcgagatccacaccctctctggtggatcccccagatcgctctaagctctgcctcgtgctgcagagttcttaccccaacagcccgagtgctgctagtcagagctacgagtgtctgcacaaggtgggcaacggaaacctggagaatacagtgaagtttcacataaaagagatttcatcaagtctcggacgattgaacgattgttacaaggagaagtcacgcctgaagaagcctcataagacatcagaagaggtacctccctgtagaacacccaagcggggcacagggtcgggcaaacaagccaaaaacacaaaatcctccgccgtgcccaatggcgagttgtcatacacatcaaaagctatcgagggaccacagaccaactcagcctccactagcagcctcgagccgtgcaaccagcggagctggaacgctaaactgcagcttcagtcagagacatcatcgagccctgctttcacacaatctagtgagagtagtgtcggatctgacaacatcatgagtcccgtacctctcctcagtaagcataaatcaaagaaagggcaagcttccagtccctctcacgttacacggaacggggaggttgtggaggcctggtatggctctgatgaatatctggctttgcccagccacctgaagcaaacagaggtcctggctctgaaactggagaatctcacaaagctgttgccgcaaaagccacgcggtgagacaatccaaaatatcgacgattgggagctctctgagatgaattccgactcggagatatatccaacataccacgtgaaaaagaaacacacgaggcttggcagggtgtccccatcaagcagcagtgatatcgcttcctcgctaggagagagtatcgaatcagggcctctctcagacatcctgtcagacgaagagtcttcaatgccactcgccgggatgaaaaagtacgccgatgaaaagtccgagcgggcctcttcttcagaaaagaacgaaagccattcagccactaaaagcgctttgatccagaagctgatgcaggacattcagcaccaagataactacgaggccatttgggagaagatcgaggggtttgtgaataagctggacgagttcatacagtggttaaacgaagccatggaaacaactgagaattggacaccccctaaagctgaaatggacgacctgaaactctacttagaaacgcacctatcgtttaagctgaacgtggacagccattgtgctctgaaggaggctgtggaggaggaaggtcaccaactgctggaactgattgcttcccacaaggcaggacttaaggatatgctaagaatgatcgcatctcagtggaaggaattgcaaagacaaataaagcgacagcacagctggattcttcgcgccctggatacaatcaaagctgagatacttgccaccgacgttagcgtcgaggacgaggagggtactggctccccaaaggccgaagtccagctttgctatctggaggctcagcgcgatgccgttgaacagatgagccttaagctctacagcgagcagtacacaagcagtagtaagcgaaaggaggagttcgccgatatgtcgaaggtccatagcgtcgggtctaatggtctgctcgatttcgactctgagtaccaggaactgtgggactggcttattgacatggaatcactggttatggattctcacgaccttatgatgagcgaagagcaacagcaacacctgtacaagcgttattctgtcgaaatgagtattagacaccttaagaagacagagctgttaagtaaagtagaggctctgaaaaagggaggggtgctgctgcctaatgatctacttgagaaggtggacagtatcaacgagaagtgggagctcttgggaaagaccctgggtgagaagattcaggacactatggccgggcatagtggcagttctcctcgcgacctgttgtctccagagagcgggtcattggttcgtcagcttgaggtgaggatcaaggagctcaaaggatggcttagagacactgaattattcatatttaacagctgcctgaggcaggagaaagagggtaccatgaataccgagaagcagctgcaatattttaaatccttgtgtcgtgaaatcaagcagcgtcggcgaggcgtcgcgtccattcttcgcttgtgccagcacctgctggatgatcgagaaacatgtaaccttaatgcagatcatcaacccatgcagctgatcattgttaatctggagcgcagatgggaagccatagtgatgcaagccgtccagtggcaaaccaggcttcagaagaagatgggaaaagagagtgagaccctcaatgtgatcgatccggggctcatggatctgaatgggatgtctgaggacgcactggaatgggatgaaatggatattagcaacaagctcatcagcctgaacgaagagtccaacgacctggaccaggaactgcaaccggtgattccctctcttaaactgggcgaaaccagcaatgaagatcctggttatgacgaggaagccgacaaccacgggggttctcaatacgcttccaacattaccgcaccatccagcccgcatatctatcaagtttactctttgcataacgtggagttgtacgaggacaaccacatgcccttccttaagaataatccaaaggtcacaggaatgacccagcccaacgtgctcacgaaaagcttgagtaaggatagtagtttctccagcacgaaaagtcttcccgaccttctagggggctccaacttggtgaaaccctgcgcctgccacggcggtgacatgagtcaaaatagtggaagtgagagtggtattgtgtcggaaggagatacggagactacaactaacagtgagatgtgcttgctcaatgctgttgacggctcaccgtccaacctggagactgagcatctggatcctcaaatgggggacgccgtgaatgtactgaaacaaaaatttactgacgaaggggagagcatcaagctccctaattcctcacagagtagcatctccccagtgggttgcgtgaacggaaaagtgggcgatctcaacagcattaccaaacatacccctgattgtctcggcgaggaactccaggggaaacatgacgtgtttaccttttatgattactcctacttgcagggatccaagctaaagctacccatgataatgaaacagtcccagagcgagaaggctcacgtagaagatccattgctgagaggcttttatttcgataagaagtcctgcaagagcaaacaccaaaccacagaacttcagccagatgtgcccccacatgagcgtattctggcctccgcgtcccatgaaatggaccggatctcttacaaatcaggaaatatcgaaaaaacttttaccggcatgcagaacgccaaacaactctccctactgtcccacagttcctctatcgaaagtctctctcctggcggggatttgtttggcctgggcatatttaaaaatggctccgactctttgcagaggagcacttctttggaaagctggctgacctcttacaaatccaatgaagatctctttagctgccacagtagtggggatattagcgtctctagtggttccgtgggtgagctcagcaaacggactctggatctgctgaacagactggaaaacatccaatccccctcagaacagaaaattaaacgctctgtttctgatattactctgcagtcctcttcccagaaaatgtccttcaccggtcagatgtctctggacatagcctcctccatcaacgaggattcagcggcttctcttaccgagttgagttcctctgatgaactgtcattgtgctccgaggatatcgtattgcataagaacaaaatccctgagtcaaatgcctcattcaggaaacgcctgacaaggtcagtagctgacgagagcgatgtgaatgtgagtatgattgtcaacgtatcttgcacatccgcctgcacggatgatgaagatgacagcgatctcctctcaagctctacccttaccctgacagaggaggagctgtgcattaaagatgaagatgacgacagctcaatcgccacggacgatgagatttacgaggattgcaccctcatgtctggactggactacatcaagaacgaacttcagacctggatccggcccaagctctcgctcactcgcgacaaaaagagatgtaatgttagtgacgagatgaaaggctctaaggatatctcgtcaagcgagatgacaaatccttcagacaccctgaatatcgagacgctgctgaacggctctgtgaaaagagtgtctgaaaacaatggcaatggaaaaaattcctcacatacacacgaattgggcacaaaacgggagaacaaaaagaccattttcaaggttaataaggatccttacgtggccgacatggaaaacgggaacatcgaaggaatcccagaaagacagaagggaaagccaaacgttacaagtaaagtatctgaaaacctgggctcacatggtaaggaaatctcagagtctgagcactgcaaatgtaaagcactgatggatagcctcgatgattctaacaccgctggtaaagaatttgtttctcaggacgtgaggcacctacccaagaagtgtcccaaccatcaccattttgagaatcagtcaacagcttccacacccaccgagaagagcttctccgagctcgccctggaaacacggttcaacaataggcaggattccgatgcgcttaaatcatctgatgacgctccttctatggcaggaaaatcagcgggttgttgtttggcgctggagcaaaacgggaccgaagaaaacgcttcaatctctaatatcagttgctgtaattgcgagcccgatgtattccatcagaaggacgccgaagactgttcagtccacaattttgtaaaggaaatcattgacatggcatccacggctctcaaatctaaatcccagccagaaaacgaagtcgccgctcccacctccttaacgcagattaaggaaaaagttctggagcacagccatagacctatccagctgaggaagggcgatttctattcctacctgagtctaagcagccacgacagcgactgtggggaggtgacgaactatattgaggaaaaaagcagcacgccactgccactcgatacaaccgatagtggcctggacgacaaagaggacatagaatgcttctttgaagcatgtgtcgagggggactctgatggggaggaaccgtgctttagcagcgctcctcctaatgaaagtgcggtacccagcgaggccgcaatgccgcttcaggccactgcctgcagtagtgaattctccgatagtagcctgagcgccgacgatgccgacacggtcgctctaagctcaccgtccagccaggagcgtgctgaggtaggaaaggaggttaacggactgccccaaaccagcagcgggtgtgcagaaaatctggaatttacccctagtaaattagattctgagaaagaatctagcgggaagcctggggaaagtggtatgcccgaggagcacaatgcggcctcagcaaagtctaaggtgcaagatcttagcttgaaggcgaatcagcccactgacaaggctgcactccatccgtcccccaaaaccctgacctgtgaggagaatctcctgaacttgcatgaaaagaggcatcgtaacatgcacagatag

SEQ ID NO: 144719 - DNA, 6960 bp, Artificial Sequence
  derived and/or modified sequence
atgcttactatgtccgtgacgctttctccattgcggtcccaagacctggaccccatggcgacggatgctagtcctatggccattaatatgacgccaaccgtagagcagggagagggtgaggaggccatgaaggacatggattccgaccagcagtacgagaaaccgccaccattgcacactggtgcagattggaaaattgtactgcacttgcccgagattgaaacatggctacgaatgacgagcgaacgggtcagggatcttacatattctgttcagcaggatagcgacagtaagcacgttgatgtgcacctggtgcagctgaaagacatttgcgaagacatttcggatcatgtcgagcagatccatgccctcctggaaacagaattctctctcaaactgcttagttactccgttaacgttatcgtggatatccacgcggtgcaattgttgtggcaccagctgagagtgtcagttctcgtgctcagggagaggatcttgcagggccttcaggacgctaacggaaactacacccgacagaccgatattctgcaggctttttctgaggaaacgaaggaagggaggcttgactctctaactgaagtggacgactccggccaactaacgatcaaatgttcccagaactacttgtcactggactgcggaataaccgcctttgagctatccgactattctccttccgaagatctgctctccgggctcggggacatgaccagcagtcaggtgaagaccaagcctttcgactcctggtcatatagcgaaatggagaaagagtttcctgagctgatccgctcagtgggcctattgacggtcgccgcagattctatctccacaaatgggtctgaggccgtcacagaggaagttagtcaggtatctctctctgtggacgacaagggagggtgcgaagaggataacgccagcgccgtagaggagcagccaggcctcacactgggagtctctagctcttcaggtgaggccctaaccaatgccgcacaaccttcctcagagaccgtccaacaggaatcaagttcatcatctcaccacgacgctaaaaaccaacaaccggttccatgtgaaaacgccacaccaaagagaacaatccgggactgttttaactataatgaggacagcccaactcagccaacactccccaagcggggtctattcttaaaagaagagacattcaaaaatgacctcaaaggaaacggcggaaaaaggcagatggtcgatctgaagccagaaatgtcccgaagcaccccttccttagtggacccaccagaccgttctaagctttgcttggtcttgcagagctcataccccaactcaccaagcgctgctagccagtcctacgagtgtctgcacaaggtcggtaatggaaacttagagaataccgtgaagttccacattaaagagatttcaagctccctcgggcgtctcaatgactgttacaaggagaagtcccgcctgaagaaaccgcataagacaagcgaagaggttcctccctgtagaaccccaaagaggggcacaggaagcggcaaacaagcaaagaacaccaagagctccgccgttccaaacggagagctttcttacaccagtaaggctattgaagggccacagactaactcagctagcacctctagtctggagccctgcaaccagcgttcctggaacgctaaactgcagcttcagtcagaaacatccagcagccccgcttttacacagtccagtgagtcttccgttgggtctgacaacatcatgtccccggtgccgctgctgtccaagcacaagagtaagaagggccaggctagctctccgtctcatgttacaaggaacggtgaggtggtagaagcttggtatgggtccgacgaatacctcgcactaccgagccaccttaaacagactgaagtattggccctgaagctggagaatttgacaaagttgctccctcagaagcccaggggtgaaacaattcaaaacatcgatgactgggaactcagcgagatgaacagtgacagcgaaatatatccaacctaccacgtcaagaaaaaacacacaagactgggcagagtgtccccttcctccagctccgacatcgcatcttctctaggagagtccatagaatctgggcctctgtcggacatcctgtctgacgaagagagcagcatgccattggcaggtatgaagaaatacgcggatgaaaaatcagaacgggctagctcttccgagaaaaacgaatctcattccgccacaaagtccgccctgatacagaaactaatgcaagatatccaacatcaggacaactacgaagccatctgggaaaagatcgaggggtttgtaaataaattagacgagttcatccagtggttgaatgaggcaatggagactaccgagaactggaccccccctaaggccgagatggatgatctgaagttgtaccttgaaacccacctttccttcaaattgaacgtagactctcattgtgctttgaaagaagccgttgaggaggagggccatcaactcctggagctgatcgcatcacacaaggccggtctcaaagatatgctcaggatgattgccagtcagtggaaggaattacagcgccagattaaaaggcaacactcctggatactccgtgctttggatacaatcaaggcagagattttggccacggatgtctctgtggaggatgaagaaggaaccggatccccaaaggccgaggtgcagctttgttacctggaggcccagagagacgccgtcgaacagatgagtctgaaactatacagcgaacagtacacatcgtcctccaaacgtaaggaagagttcgccgatatgagcaaagtccatagtgtcggcagcaacggcctgctggatttcgactcagagtaccaggaattatgggattggctgattgatatggaaagcctggtgatggatagccatgatttgatgatgagcgaagagcagcagcagcatctgtacaaaaggtattccgtcgaaatgtccatcagacatcttaaaaagactgaacttttgagtaaggtagaagctttgaaaaaaggaggcgtgttgctccctaatgacctattggagaaagtcgattcaataaacgagaagtgggagctcctggggaagaccttgggagagaaaattcaggacacgatggccggtcattcaggaagctcaccacgagatctgcttagtccggaatccggctctctggtgcggcagttggaagtgagaattaaggaacttaaagggtggctgcgggatacagaactatttattttcaacagttgccttcgccaggaaaaggaaggaactatgaacactgagaaacaactgcagtacttcaagagcttgtgtagggagattaaacagcgccgtcggggagtcgccagtatcttgcgtctttgccagcacctgctggatgaccgagagacttgtaatcttaatgcagatcatcagcctatgcagctgatcatcgtgaatctggagcgcaggtgggaagccattgtaatgcaagccgtgcagtggcagacacgcctacagaaaaaaatgggtaaagagtcagagactttgaacgtcatcgatcccggacttatggatctgaacgggatgtctgaggatgctttggaatgggatgaaatggacatttctaacaagctcatctccctgaatgaggagagcaatgacctggatcaggagttgcagccagtgatcccatccctgaagctcggcgagaccagtaacgaagatcccggttacgatgaggaggctgataatcatggaggatcccagtacgcatctaatatcacggctccctcctccccgcatatataccaagtttactcattgcacaacgtcgaactatatgaagataaccatatgccctttttgaagaacaatccaaaagtcaccggcatgactcagcccaatgtactcacgaaaagcttgtcaaaggattcatccttcagcagtacgaagagtctgccggacttgctcgggggatcgaacttagtgaagccttgcgcctgccatggtggcgacatgagtcagaatagcggctccgaaagcggcatcgtatccgagggcgatactgagacaaccactaacagcgaaatgtgcctcctcaatgccgtcgatggatcaccctccaatctcgaaacagagcacctagacccacaaatgggcgatgccgtgaacgttttaaagcagaagtttactgatgagggggaatctattaagctcccgaactcctcccaaagctctatcagcccagtggggtgcgtgaacggcaaagtgggtgatctgaatagcattaccaagcacacacccgattgcctgggagaggaattgcaggggaagcacgacgtttttaccttttacgattactcctacctgcaggggtcaaagctgaagttgcctatgattatgaagcagtctcaaagcgagaaagcccatgtggaggatcccctgctccgcggattttacttcgacaagaagagctgtaaaagcaagcatcaaaccaccgagcttcagccagacgttccaccccatgaacggattctggcatccgctagccacgaaatggacaggataagctacaagagcggaaacatcgagaaaacctttactggcatgcagaacgccaagcagcttagcttgttgagccacagctcttctatcgaatcactcagtcccggtggcgaccttttcgggctcggaattttcaagaatgggtcagactccctgcagcgctcaacgagcctcgagtcctggctgacaagttataaatctaacgaggatttgttctcctgccactcctccggcgatatctcagtttccagcggctcagtgggagaattgagcaaaaggacactcgacctcctgaatcgcctggagaacattcagagccctagcgagcagaaaatcaagagaagtgtatcagacattaccctacagtcatccagccaaaagatgagcttcacgggtcaaatgagtcttgacattgcatctagtatcaatgaagattctgccgcttctttgaccgagctgtcatcatcagatgaactgtccctttgctctgaggatatcgtacttcacaagaataagatcccagagtcaaacgcgtcattccgaaagcggctaactcgttcagtggccgacgagagcgatgtgaatgtgtccatgatcgtgaacgtaagctgtacctcagcatgcacagatgacgaggacgacagtgacctgctctcttcatcaacgcttaccttgaccgaggaagagctgtgtataaaggacgaggacgatgactcttctatcgctaccgacgatgaaatatacgaggactgcacgctgatgagcggtctagattatatcaaaaacgagcttcaaacctggatacgtcccaaactcagtctgactcgcgacaagaagcggtgtaatgtgagtgacgagatgaaaggaagcaaagatatatccagctccgagatgaccaatcctagtgatacgttaaacattgagacactgctaaatgggtctgtgaagagggtgtcagaaaacaacgggaacggcaagaattcttcccatacacatgaactcggaactaaacgcgagaataagaagacgatattcaaggtgaacaaagatccttacgtagccgacatggaaaatggtaatatagagggcatccccgagcggcaaaaaggaaaaccgaacgtgaccagcaaggtgagtgagaatttaggttctcatgggaaggaaatctccgagtcagagcattgtaagtgcaaggctcttatggactcactcgacgactccaacaccgcagggaaagaattcgtaagccaggacgtgagacatttacctaaaaagtgccccaatcatcatcacttcgaaaaccagtccaccgccagtactccgaccgaaaaatctttctcggaactcgccttggagactcggttcaacaaccggcaggattctgacgcactcaagtcttctgacgatgcacccagcatggcgggtaagtccgcaggatgctgcctggctttagagcagaacggtacagaggaaaacgcatcaatctcaaatatctcctgctgtaactgtgaacctgatgtctttcaccagaaagatgcagaggattgctccgtgcacaactttgtgaaagagatcatagacatggccagcaccgccttgaagagtaaatcgcagcctgagaatgaagtcgcagcacctaccagcctgactcaaattaaagagaaagtattggagcatagtcaccggcctatacagctgcggaaaggcgacttttatagctacctctcactgtccagccatgattcagattgcggtgaagttactaattacattgaagaaaaatcctctactcccctgccactggatactacagattccggccttgatgacaaagaggacattgagtgcttttttgaagcttgcgtagaaggcgattccgacggcgaggagccatgcttttcgtctgccccacctaacgagtccgctgtgccttctgaggctgcaatgccactgcaggccaccgcctgtagttccgagttctcagactcctctctgtctgccgatgacgcagacaccgtcgcattgtcctccccgagtagccaggagcgtgccgaagtcgggaaagaagtgaacggcctgccgcagacaagttccggctgcgctgaaaacttagagtttaccccgagcaagctagatagcgagaaggagtccagtggcaagcctggcgagagtggcatgcctgaggagcacaatgctgccagcgcaaaatcaaaggtccaggatctgtctctcaaggccaatcagccaaccgataaagccgcactgcaccccagccctaaaactcttacatgcgaggagaatctcctcaacttgcacgagaaacgccataggaatatgcatagataa

SEQ ID NO: 144720 - DNA, 81 bp, Artificial Sequence
  derived and/or modified sequence
agttgaatagaaccaatccgaatgaaatggaatggaatggaacggaatggaattgaatggaatggaatggaatgcaatgga

SEQ ID NO: 144721 - protein, 323 aa, Artificial Sequence
  derived and/or modified sequence
MSVPEEEERLLPLTQRWPRASKFLLSGCAATVAELATFPLDLTKTRLQMQGEAALARLGDGARESAPYRGMVRTALGIIEEEGFLKLWQGVTPAIYRHVVYSGGRMVTYEHLREVVFGKSEDEHYPLWKSVIGGMMAGVIGQFLANPTDLVKVQMQMEGKRKLEGKPLRFRGVHHAFAKILAEGGIRGLWAGWVPNIQRAALVNMGDLTTYDTVKHYLVLNTPLEDNIMTHGLSSLCSGLVASILGTPADVIKSRIMNQPRDKQGRGLLYKSSTDCLIQAVQGEGFMSLYKGFLPSWLRMTPWSMVFWLTYEKIREMSGVSPF

SEQ ID NO: 144722 - protein, 237 aa, Artificial Sequence
  derived and/or modified sequence
MYLYLMKMPAAYQVYSGGRMVTYEHLREVVFGKSEDEHYPLWKSVIGGMMAGVIGQFLANPTDLVKVQMQMEGKRKLEGKPLRFRGVHHAFAKILAEGGIRGLWAGWVPNIQRAALVNMGDLTTYDTVKHYLVLNTPLEDNIMTHGLSSLCSGLVASILGTPADVIKSRIMNQPRDKQGRGLLYKSSTDCLIQAVQGEGFMSLYKGFLPSWLRMTPWSMVFWLTYEKIREMSGVSPF

SEQ ID NO: 144723 - DNA, 972 bp, Artificial Sequence
  derived and/or modified sequence
atgtccgttcctgaggaagaagaacggctgcttccactcacccagcgttggcctcgcgccagtaagtttttgctctccgggtgtgccgccacagttgctgaattagccacttttccactggatttaaccaagacccggctgcagatgcaaggtgaagcagccttggcacgtctgggagacggggctcgagaatccgcgccctaccgcggcatggtgcggacggcattgggcatcatcgaggaggaaggcttcctgaaactttggcagggggttaccccggctatctacaggcacgttgtgtactccgggggccggatggttacttatgagcatctgcgcgaggtggtctttggcaaatccgaagatgagcactaccctctgtggaagtccgttattggaggtatgatggctggtgtcattgggcagttcctcgcaaatcccaccgatttagtaaaggttcagatgcagatggaggggaagcggaagctcgagggaaagcctttgcgtttccgcggggtccaccatgcattcgccaaaatactggcggagggtgggatccggggactctgggcaggttgggtgccaaacattcagcgggctgctttggtcaacatgggggatcttacaacttacgacaccgtgaaacactatctggtgctgaatactccattagaggataatatcatgacacacggactcagcagcttatgttcagggctcgtcgcctccatcctgggtacccctgctgatgtgattaagagccgtataatgaaccagcccagggacaagcagggcaggggcctgctgtacaaaagctcaaccgactgtctgatccaagctgttcaaggggaaggattcatgagtctgtataagggctttttgccctcgtggctgcggatgacgccatggagtatggtattctggctgacatatgagaagatccgtgaaatgagtggcgtgagccccttctag

SEQ ID NO: 144724 - DNA, 714 bp, Artificial Sequence
  derived and/or modified sequence
atgtacttgtatctgatgaagatgccagcagcctaccaggtttacagtgggggcaggatggttacgtatgagcatctccgggaggtggtgtttgggaaaagcgaggacgaacactaccctttgtggaagagcgttatcggcggaatgatggccggggtcatcggccagtttctggccaatcctacagatctagtgaaagtgcagatgcagatggagggtaagagaaagctagaaggcaagccattgaggttccgcggagttcatcacgcgtttgcaaagattctggcagaaggagggattagaggcctgtgggccggatgggtgcccaacatccagagggcagccttggtgaatatgggagacttgactacatatgacactgtgaagcattacctggtcctgaacacacccctcgaagacaatatcatgacccacgggctttcttcgctgtgcagtggactggtggcatcaatcctgggcacaccagctgacgtaatcaagagccggatcatgaatcagccaagagataaacaaggcaggggcctactgtacaaatcatccaccgactgcctgatccaagccgtgcagggagagggctttatgagcctgtacaagggcttcctcccctcttggttaaggatgacaccctggagtatggtattctggctgacctacgaaaaaatcagggagatgtccggagtcagcccattctag

SEQ ID NO: 144725 - DNA, 972 bp, Artificial Sequence
  derived and/or modified sequence
atgtctgtgcctgaggaggaggagcggctgctgcccctgacccagcgctggccccgggccagcaagttcctgctgagcggctgtgccgccaccgtggccgagctggccaccttccccctggacctgaccaagacccggctgcagatgcagggcgaggccgccctggcccggctgggagatggagcccgggagagcgccccctaccggggcatggtgaggacagccctgggcatcatcgaggaggagggcttcctgaagctgtggcagggcgtgaccccagccatctaccgccacgtggtgtacagcggcggccgcatggtgacctatgagcacctgcgggaggtggtgtttgggaagtcagaagatgagcactaccccctgtggaagagcgtcatcggcggcatgatggccggggtcatcggccagttcctggccaaccccacagacctggtgaaggtgcagatgcagatggagggcaagaggaagctggagggcaagcccctgcgcttccggggcgtgcaccacgcctttgccaagatcctggccgagggcggcatccggggcctgtgggccggctgggtgcccaacatccagagagctgccctggtgaacatgggagacctgaccacctatgacacagtgaagcactacctggtgctgaacacccccctggaggacaacatcatgacccacggcctgagcagcctgtgcagcggcctggtggccagcatcctgggcaccccagcagatgtgatcaagagccgcatcatgaaccagccccgggacaagcagggccggggcctgctgtacaagagcagcacagactgcctgatccaggccgtgcagggcgagggcttcatgagcctgtacaagggcttcctgcccagctggctgaggatgaccccctggagcatggtgttctggctgacctatgagaagatccgggagatgtctggagtgagccccttctag

SEQ ID NO: 144726 - DNA, 714 bp, Artificial Sequence
  derived and/or modified sequence
atgtacctgtacctgatgaagatgcctgctgcctaccaggtgtacagcggcggccgcatggtgacctatgagcacctgcgggaggtggtgtttgggaagtcagaagatgagcactaccccctgtggaagagcgtcatcggcggcatgatggccggggtcatcggccagttcctggccaaccccacagacctggtgaaggtgcagatgcagatggagggcaagaggaagctggagggcaagcccctgcgcttccggggcgtgcaccacgcctttgccaagatcctggccgagggcggcatccggggcctgtgggccggctgggtgcccaacatccagagagctgccctggtgaacatgggagacctgaccacctatgacacagtgaagcactacctggtgctgaacacccccctggaggacaacatcatgacccacggcctgagcagcctgtgcagcggcctggtggccagcatcctgggcaccccagcagatgtgatcaagagccgcatcatgaaccagccccgggacaagcagggccggggcctgctgtacaagagcagcacagactgcctgatccaggccgtgcagggcgagggcttcatgagcctgtacaagggcttcctgcccagctggctgaggatgaccccctggagcatggtgttctggctgacctatgagaagatccgggagatgtctggagtgagccccttctag

SEQ ID NO: 144727 - DNA, 972 bp, Artificial Sequence
  derived and/or modified sequence
atgagcgtgcccgaggaggaggagcggctgctgcccctgacccagcggtggccaagggcgagtaagttcctgctcagcggctgtgccgctaccgtagccgagctggctacttttcctctggatctgacaaagacccgcctccagatgcagggcgaggcagctctcgcccgcctcggagacggggcccgggagagcgccccttacagaggcatggtgcgaactgccctgggcattatagaggaagaggggtttcttaagctttggcaaggtgtgacaccagccatctaccgccacgttgtgtactcaggaggacggatggtaacatacgaacatcttcgcgaggtagtgttcggaaaatctgaggacgagcattaccccctctggaaatctgtgattggcggaatgatggccggagtgattgggcagtttttggctaatcccacagatctagtaaaggtacaaatgcagatggaagggaagagaaaactggaggggaagcctctcaggttccgcggagtgcaccatgctttcgccaagatcctggccgagggagggatccggggactgtgggcaggttgggttcccaatattcagagagccgctcttgtgaatatgggagacctgacgacttacgacaccgtgaagcactacttagtgctcaacactccattagaagacaacatcatgacgcatggcctgtctagtctgtgttccgggcttgtcgcttctattttaggcacacctgccgacgtcattaaatcaagaatcatgaaccaaccacgcgacaaacagggtcgaggcctcctgtacaaatcaagtaccgactgtctgattcaggcagttcagggagaggggttcatgagcctctataaaggttttctaccctcttggcttaggatgaccccgtggagtatggtcttttggttgacatacgagaaaatccgcgaaatgtccggcgtaagccccttctag

SEQ ID NO: 144728 - DNA, 714 bp, Artificial Sequence
  derived and/or modified sequence
atgtacctgtacctgatgaagatgcccgccgcctaccaggtgtacagcggtggccgcatggtgacttacgaacacctacgcgaggtcgtctttggcaagtcagaggatgaacactatcccctttggaaaagtgtcattggagggatgatggccggagtaatcggacagtttttggcgaaccctaccgatcttgtgaaggtgcaaatgcaaatggagggaaagcgcaaactagagggcaagcctctgagatttagaggcgttcatcatgcgtttgccaaaatcctggccgaggggggaattaggggtttgtgggccggttgggtcccaaacatccaaagagcagctctggtcaatatgggggatctgaccacatatgatactgtgaaacattacctcgtgttgaatacccccctagaggacaatatcatgacccatggactcagcagcctgtgttccggactggtggccagtatcctgggcactccagctgatgtgatcaaatctcggatcatgaaccagccaagggataagcaagggagggggttgctgtacaagtcatcaactgactgtttaattcaggccgtccagggggagggatttatgtcattgtacaaaggcttccttccttcatggcttaggatgaccccctggagcatggtgttctggctgacttacgaaaaaattcgggagatgtccggtgtgagtccattctag

SEQ ID NO: 144729 - DNA, 972 bp, Artificial Sequence
  derived and/or modified sequence
atgtcagtccccgaagaagaggaaagattattacccctgacccagagatggccaagggcaagtaaattcctcctgtccggttgtgctgccaccgtggctgaattggccacatttccacttgatcttaccaaaacacgactgcagatgcagggagaggccgctctggccaggctgggcgacggcgctcgcgaatcggcaccctatcgcggaatggtgcggaccgcccttggtataattgaggaagaaggattcttgaagctatggcaaggtgtgaccccggctatatatcgccacgttgtatattctgggggtcgaatggtaacttatgagcacctgcgtgaagtcgtctttggtaaatctgaggatgaacactaccccctctggaagtccgtgatcggcggaatgatggccggagtgattggccagttccttgccaacccaactgacctggtcaaagtccagatgcaaatggagggaaagcgtaagttggaaggcaagccgctccggttccggggagtgcaccacgcattcgccaagatccttgctgaagggggaatccgaggcctgtgggccggttgggtgcctaatatccagcgggcagcactggtgaatatgggagacctgaccacctatgacacagtgaagcactacttagtgctgaataccccgctggaagataatattatgacacatggcctgtccagtctgtgcagtgggttggtggcgtctatcttagggacaccagccgacgtcattaagtcaagaatcatgaatcagcccagggacaagcagggacggggtctgttatataaaagctccacagactgtctgattcaggccgtccaaggcgaagggttcatgtccctgtataagggcttcttgcctagctggctcaggatgacgccttggagcatggtcttttggctgacctacgaaaagatccgagaaatgagcggcgtgagtccattttag

SEQ ID NO: 144730 - DNA, 714 bp, Artificial Sequence
  derived and/or modified sequence
atgtacctctaccttatgaagatgccagccgcataccaagtatactcaggaggcagaatggtgacttacgaacatcttcgggaagtcgtgttcggcaaaagcgaggacgagcattaccccctgtggaagtccgtcattgggggtatgatggccggagtgatcggccagttccttgccaatccgaccgatcttgttaaggtgcaaatgcagatggagggtaagagaaaattggaaggaaagcccttgagattccggggagtccaccacgctttcgccaaaattttggccgaaggcggaatccggggactctgggcagggtgggtgcctaatatacagagagcagccttagttaacatgggcgatcttacgacctacgatacagttaagcactatcttgttttgaacacacctctagaggacaacattatgacccatgggctgagtagcctgtgttctggactggttgcctcgattctcggaacaccagccgacgttatcaagagcagaatcatgaaccagcccagagacaagcagggcaggggactgctgtacaagtcgagtactgattgtcttatacaggctgtgcaaggagagggttttatgtctctatataaaggattcctgcccagctggctacgtatgactccgtggagtatggtgttttggcttacttacgaaaaaatccgcgagatgagcggtgtctcacccttctag

SEQ ID NO: 144731 - DNA, 2963 bp, Artificial Sequence
  derived and/or modified sequence
gactacattgcccagtaacctcctgggctccgctgtgtttttctattctggggtgtaaggggcagctggaccactccagctgggactgctaggaaggttgcgggtccacccggccgagccgaacgagggaaatggtcctcacccggccactcgccggttgaaaaggggccgccctggcagggaagcggccgccgcggcgcggtgcagcgcagcggcgagaaggagtgcgttatcgtcttgcgctactgctgaatgtccgtcccggaggaggaggagaggcttttgccgctgacccagagatggccccgagcgagcaaattcctactgtccggctgcgcggctaccgtggccgagctagcaacctttcccctggatctcacaaaaactcgactccaaatgcaaggagaagcagctcttgctcggttgggagacggtgcaagagaatctgccccctataggggaatggtgcgcacagctctagggatcattgaagaggaaggctttctaaagctttggcaaggagtgacacccgccatttacagacacgtagtgtattctggaggtcgaatggtcacatatgaacatctccgagaggttgtgtttggcaaaagtgaagatgagcattatcccctttggaaatcagtcattggagggatgatggctggtgttattggccagtttttagccaatccaactgacctagtgaaggttcagatgcaaatggaaggaaaaaggaaactggaaggaaaaccattgcgatttcgtggtgtacatcatgcatttgcaaaaatcttagctgaaggaggaatacgagggctttgggcaggctgggtacccaatatacaaagagcagcactggtgaatatgggagatttaaccacttatgatacagtgaaacactacttggtattgaatacaccacttgaggacaatatcatgactcacggtttatcaagtttatgttctggactggtagcttctattctgggaacaccagccgatgtcatcaaaagcagaataatgaatcaaccacgagataaacaaggaaggggacttttgtataaatcatcgactgactgcttgattcaggctgttcaaggtgaaggattcatgagtctatataaaggctttttaccatcttggctgagaatgaccccttggtcaatggtgttctggcttacttatgaaaaaatcagagagatgagtggagtcagtccattttaaacccctaaagatgcaacccttaaagatacagtgttcagtattattgaaatatgggcatctgcaacacataccccctattatttctacctctttaggaagacacctattccacagagactgatttatagggggcagcactttatttttttctggaaacccaagttctctttgactcctctttttgtccaaaagtgatctggtcggatctcacaaggccatccaatgagaccccgcacagcattttctaaagaagaatcgaagcctgaccactttcaccttgggcaagaaggtttggcctttgagttgctattctatgctgaagagcctgcttagaggaggagtaccaggagggagccagcatttcagatctgaagtagacgataggaatgtggaagaacacatacatagtgcttaagaaatacatttaacctgttatgtcagtatttatcaatgaagtttgataattcacttttctgtcattgttaaagcgtacatactgtaaattaaagggaggtgaatggaaattaatgaataaacattttgagtttccctagtgttgaaggaaggtgtactttttcttgtcagaaagataaaaaaaatcaagttgagatgatgtttgaatttcaagaaaagaggctgctttctgtcagtgccctctcattagatctgtgttaattagttagcactccactgcacatgctaatgacttcctctgacagccacacaccgaatcttgatgaaaaaagagaagagcatttgccttgttacatagtctgttacaagccagatatgttgctagctctcaagagttgtaatatattaagaactacaacttatttgattaaaactcagctgtatagatccttttataaagcaccttttgttaaacatcagcctttcattggtattttaaaagcaaggcagatagatatgaagtcagccaactctgacatgcgtcctttcttatctcccttacctgacactaggggctctagagaggcagagagagcactcacaaatcacactaaaactgccagcggcctgactcttactcagtttagcaaaaattcttgcctaaaaagtgataagtaaaaatctgtttatggtatacagttatgtctcgaatctttgaatcaaatccatgttcttattttagaaaggtaagagttcttcaaattcagctacataccaccggctctcccaacctcagacggtgggcatttctggatggatggctgcggttatggataaaggctgtaactgttaacacagaaaaacatgaaaagctcaggcccaagaaaggccttggagccagccaaacagaatttgttctaatggacatggatgatgttgaacagaaaaaagtttacaagtgctttgtggttgcactaatgtatactcactgccattttaagagggggaagtacattttaaaatatatttgaatgtcatgtactgatatgcagtagcttattgtttttctagttgcagagaatgtgaagtttaatctcttaaaatatttagatggtctactttttcattgaatttgtcaatatgtaattgcgttgtaaaatattatatatatatatatatatatatatatatatatatgcttaacttcccaagtgttctgcattgaaccacttagggaaaattttgtttgtttttatgttttgtaatttttaaaattaagtaaagactggatcaaaataattgcatccaacctggaccgtgaacaa

SEQ ID NO: 144732 - DNA, 1602 bp, Artificial Sequence
  derived and/or modified sequence
attctggggtgtaaggggcagctggaccactccagctgggactgctaggaaggttgcgggtccacccggccgagccgaacgagggaaatggtcctcacccggccactcgccggttgaaaaggggccgccctggcagggaagcggccgccgcggcgcggtgcagcgcagcggcgagaaggagtgcgttatcgtcttgcgctactgctgaatgtccgtcccggaggaggaggagaggcttttgccgctgacccagagatggccccgagcgagcaaattcctactgtccggctgcgcggctaccgtggccgagctagcaacctttcccctggatctcacaaaaactcgactccaaatgcaaggagaagcagctcttgctcggttgggagacggtgcaagagaatctgccccctataggggaatggtgcgcacagctctagggatcattgaagaggaaggctttctaaagctttggcaaggagtgacacccgccatttacagacacctaagattcatttcatacgtttgatgcttagctgaaaaattacaataaattctccaatgaaattatgtatctttatttaatgaaaatgcctgctgcgtaccaagtgtattctggaggtcgaatggtcacatatgaacatctccgagaggttgtgtttggcaaaagtgaagatgagcattatcccctttggaaatcagtcattggagggatgatggctggtgttattggccagtttttagccaatccaactgacctagtgaaggttcagatgcaaatggaaggaaaaaggaaactggaaggaaaaccattgcgatttcgtggtgtacatcatgcatttgcaaaaatcttagctgaaggaggaatacgagggctttgggcaggctgggtacccaatatacaaagagcagcactggtgaatatgggagatttaaccacttatgatacagtgaaacactacttggtattgaatacaccacttgaggacaatatcatgactcacggtttatcaagtttatgttctggactggtagcttctattctgggaacaccagccgatgtcatcaaaagcagaataatgaatcaaccacgagataaacaaggaaggggacttttgtataaatcatcgactgactgcttgattcaggctgttcaaggtgaaggattcatgagtctatataaaggctttttaccatcttggctgagaatgaccccttggtcaatggtgttctggcttacttatgaaaaaatcagagagatgagtggagtcagtccattttaaacccctaaagatgcaacccttaaagatacagtgttcagtattattgaaatatgggcatctgcaacacataccccctattatttctacctctttaggaagacacctattccacagagactgatttatagggggcagcactttatttttttctggaaacccaagttctctttgactcctctttttgtccaaaagtgatctggtcggatctcacaaggccatccaatgagaccccgcacagcattttctaaagaagaatcgaagcctgaccactttcaccttgggcaagaaggtttggcctttgagttgctattctatgctgaag

SEQ ID NO: 144733 - DNA, 972 bp, Artificial Sequence
  derived and/or modified sequence
atgagcgtgcccgaggaggaggagagactgctgcccctgacccagagatggcccagagccagcaagttcctgctgagcggctgcgccgccaccgtggccgagctggccaccttccccctggacctgaccaagaccagactgcagatgcagggcgaggccgccctggccagactgggcgacggcgccagagagagcgccccctacagaggcatggtgagaaccgccctgggcatcatcgaggaggagggcttcctgaagctgtggcagggcgtgacccccgccatctacagacacgtggtgtacagcggcggcagaatggtgacctacgagcacctgagagaggtggtgttcggcaagagcgaggacgagcactaccccctgtggaagagcgtgatcggcggcatgatggccggcgtgatcggccagttcctggccaaccccaccgacctggtgaaggtgcagatgcagatggagggcaagagaaagctggagggcaagcccctgagattcagaggcgtgcaccacgccttcgccaagatcctggccgagggcggcatcagaggcctgtgggccggctgggtgcccaacatccagagagccgccctggtgaacatgggcgacctgaccacctacgacaccgtgaagcactacctggtgctgaacacccccctggaggacaacatcatgacccacggcctgagcagcctgtgcagcggcctggtggccagcatcctgggcacccccgccgacgtgatcaagagcagaatcatgaaccagcccagagacaagcagggcagaggcctgctgtacaagagcagcaccgactgcctgatccaggccgtgcagggcgagggcttcatgagcctgtacaagggcttcctgcccagctggctgagaatgaccccctggagcatggtgttctggctgacctacgagaagatcagagagatgagcggcgtgagccccttctag

SEQ ID NO: 144734 - DNA, 714 bp, Artificial Sequence
  derived and/or modified sequence
atgtacctgtacctgatgaagatgcccgccgcctaccaggtgtacagcggcggcagaatggtgacctacgagcacctgagagaggtggtgttcggcaagagcgaggacgagcactaccccctgtggaagagcgtgatcggcggcatgatggccggcgtgatcggccagttcctggccaaccccaccgacctggtgaaggtgcagatgcagatggagggcaagagaaagctggagggcaagcccctgagattcagaggcgtgcaccacgccttcgccaagatcctggccgagggcggcatcagaggcctgtgggccggctgggtgcccaacatccagagagccgccctggtgaacatgggcgacctgaccacctacgacaccgtgaagcactacctggtgctgaacacccccctggaggacaacatcatgacccacggcctgagcagcctgtgcagcggcctggtggccagcatcctgggcacccccgccgacgtgatcaagagcagaatcatgaaccagcccagagacaagcagggcagaggcctgctgtacaagagcagcaccgactgcctgatccaggccgtgcagggcgagggcttcatgagcctgtacaagggcttcctgcccagctggctgagaatgaccccctggagcatggtgttctggctgacctacgagaagatcagagagatgagcggcgtgagccccttctag

SEQ ID NO: 144735 - protein, 252 aa, Artificial Sequence
  derived and/or modified sequence
MEAMWLLCVALAVLAWGFLWVWDSSERMKSREQGGRLGAESRTLLVIAHPDDEAMFFAPTVLGLARLRHWVYLLCFSAGNYYNQGETRKKELLQSCDVLGIPLSSVMIIDNRDFPDDPGMQWDTEHVARVLLQHIEVNGINLVVTFDAGGVSGHSNHIALYAAVRALHSEGKLPKGCSVLTLQSVNVLRKYISLLDLPLSLLHTQDVLFVLNSKEVAQAKKAMSCHRSQLLWFRRLYIIFSRYMRINSLSFL

SEQ ID NO: 144736 - protein, 244 aa, Artificial Sequence
  derived and/or modified sequence
MEAMWLLCVALAVLAWGFLWVWDSSERMKSREQGGRLGAESRTLLVIAHPDDEAMFFAPTVLGLARLRHWVYLLCFSAGNYYNQGETRKKELLQSCDVLGIPLSSVMIIDNRDFPDDPGMQWDTEHVARVLLQHIEVNGINLVVTFDAGGVSGHSNHIALYAAVRVLCAHASVCECAAQVHLPSGSALVSASYAGCPLRAQQQRSGTGQESHVLPPQPAPLVPPPLHYLLPVHENQLTELPLKP

SEQ ID NO: 144737 - DNA, 759 bp, Artificial Sequence
  derived and/or modified sequence
atggaggccatgtggctgctgtgcgtggccctggccgtgctggcctggggcttcctgtgggtgtgggacagcagcgagagaatgaagagcagagagcagggcggcagactgggcgccgagagcagaaccctgctggtgatcgcccaccccgacgacgaggccatgttcttcgcccccaccgtgctgggcctggccagactgagacactgggtgtacctgctgtgcttcagcgccggcaactactacaaccagggcgagaccagaaagaaggagctgctgcagagctgcgacgtgctgggcatccccctgagcagcgtgatgatcatcgacaacagagacttccccgacgaccccggcatgcagtgggacaccgagcacgtggccagagtgctgctgcagcacatcgaggtgaacggcatcaacctggtggtgaccttcgacgccggcggcgtgagcggccacagcaaccacatcgccctgtacgccgccgtgagagccctgcacagcgagggcaagctgcccaagggctgcagcgtgctgaccctgcagagcgtgaacgtgctgagaaagtacatcagcctgctggacctgcccctgagcctgctgcacacccaggacgtgctgttcgtgctgaacagcaaggaggtggcccaggccaagaaggccatgagctgccacagaagccagctgctgtggttcagaagactgtacatcatcttcagcagatacatgagaatcaacagcctgagcttcctgtag

SEQ ID NO: 144738 - DNA, 759 bp, Artificial Sequence
  derived and/or modified sequence
atggaagctatgtggcttctctgtgtcgctttggccgtcctggcctggggcttcttgtgggtgtgggattcttcagagcggatgaagtccagggaacaggggggccgcctgggggctgagtcccgcactctcctggtaattgcccacccagacgacgaggcaatgttttttgctccaacggtgctcggactcgctcgtctgcgccactgggtgtacctcctgtgcttctccgctggtaattactacaatcaaggggagactcggaagaaggaactcttacagtcctgcgatgttctgggtatccccttaagtagcgtaatgattattgacaatagagattttccagatgatcccggtatgcagtgggacactgagcatgtggccagagttctgctacagcatattgaagttaacgggatcaacttggtcgtcacatttgatgctgggggcgtatctggacacagcaatcacatagccttgtacgctgcggtcagagcgctgcactctgagggcaaactgcccaagggctgctctgtgctcaccctgcagtcagtgaatgtgttaagaaaatacattagtctgctggatctgccgctcagcttgctgcacacgcaggatgttctctttgtgctcaatagtaaggaagtcgcacaggcgaagaaagccatgtcttgccacaggtcccagcttttatggtttcgaaggttgtacataatcttttccaggtatatgcgaattaattcgttgtccttcctgtag

SEQ ID NO: 144739 - DNA, 759 bp, Artificial Sequence
  derived and/or modified sequence
atggaggccatgtggctgctgtgtgtggccctggccgtgctggcctggggcttcctgtgggtgtgggacagcagcgagaggatgaagagccgggagcagggcggccgcctgggcgctgagagcaggaccctgctggtgattgcccacccagatgatgaggccatgttctttgcccccaccgtgctgggcctggcccggctgcggcactgggtgtacctgctgtgcttctctgctggcaactactacaaccagggcgagaccaggaagaaggagctgctgcagagctgtgatgtgctgggcatccccctgagctctgtgatgatcatcgacaacagagacttcccagatgaccccggcatgcagtgggacacagagcacgtggcccgggtgctgctgcagcacatcgaggtgaatggcatcaacctggtggtgacctttgatgctgggggcgtgtctggccacagcaaccacatcgccctgtatgctgctgtgcgggccctgcacagcgagggcaagctgcccaagggctgcagcgtgctgaccctgcagagcgtgaatgtgctgaggaagtacatcagcctgctggacctgcccctgagcctgctgcacacccaggatgtgctgtttgtgctgaacagcaaggaggtggcccaggccaagaaggccatgagctgccacaggagccagctgctgtggttccggcggctgtacatcatcttcagccgctacatgaggatcaacagcctgtccttcctgtag

SEQ ID NO: 144740 - DNA, 759 bp, Artificial Sequence
  derived and/or modified sequence
atggaggccatgtggctgctgtgcgtggccctggccgtgctggcctggggctttctctgggtgtgggactctagtgagagaatgaagagccgagagcagggtggccgattgggcgcagagagcaggacacttctggtcatcgctcaccccgatgatgaagccatgttttttgcccctacagtcctgggattggcacggcttcgccactgggtgtacctgctatgtttttccgccggaaactactacaaccagggtgagacaaggaagaaagagttgctacagtcttgcgacgttcttggtattcctctgagctcagtgatgatcatagacaatagagactttcctgatgaccccggtatgcagtgggacactgaacacgtggcgcgtgtgctcctccaacacatagaggtgaatggcatcaacctagtggtgaccttcgacgctgggggcgttagcggacacagtaaccacatcgctttatatgcagcagtgcgcgctcttcattcggagggcaagctcccgaaggggtgttctgttttgaccttgcagagcgtgaacgtgctgcgcaaatatataagccttctcgatctacctctctcgctgctgcatacccaggatgtgcttttcgtccttaatagcaaagaggtcgctcaggctaagaaggccatgagttgtcaccggagccagttgctttggttcagacgcttgtacatcatcttttcaagatatatgagaattaattccctttcctttctctag

SEQ ID NO: 144741 - DNA, 759 bp, Artificial Sequence
  derived and/or modified sequence
atggaggcgatgtggctgctgtgcgttgctctcgcggtgctcgcctggggatttctctgggtctgggacagctcagagcgcatgaagtcacgcgagcagggagggaggttaggtgctgagagcagaacattgctagtcatcgcacaccctgatgatgaagctatgtttttcgccccaactgtgctcggcttagctagactgcgacactgggtttatctgctctgcttttccgctggcaactactacaatcaaggagagaccagaaaaaaagaactgctgcaatcttgtgacgtgttgggaatccctctatcttctgtcatgatcattgacaaccgggactttcccgatgacccaggaatgcagtgggacacagagcacgtggcgcgagtgctgctgcagcacattgaagtgaatggtatcaacctggtggtcacatttgacgctggaggcgtgagcggccacagcaaccatattgcactttacgcggctgtgcgggcactccactccgagggaaaactcccgaagggctgctcagtgctaactctccaatcggtaaacgtactaaggaagtacatctcactcctagatctccctctgagcctcctgcacactcaggacgtgctctttgtccttaactctaaggaagttgcccaggcaaaaaaggctatgtcctgtcacaggagccagctgttgtggttccgcagattgtatatcatcttttccaggtatatgcggatcaactccctgtcgtttctctag

SEQ ID NO: 144742 - DNA, 1137 bp, Artificial Sequence
  derived and/or modified sequence
agtgctgcttacccatcatggaagcaatgtggctcctgtgtgtggcgttggcggtcttggcatggggcttcctctgggtttgggactcctcagaacgaatgaagagtcgggagcagggaggacggctgggagccgaaagccggaccctgctggtcatagcgcaccctgacgatgaagccatgttttttgctcccacagtgctaggcttggcccgcctaaggcactgggtgtacctgctttgcttctctgcaggaaattactacaatcaaggagagactcgtaagaaagaacttttgcagagctgtgatgttttggggattccactctccagtgtaatgattattgacaacagggatttcccagatgacccaggcatgcagtgggacacagagcacgtggccagagtcctccttcagcacatagaagtgaatggcatcaatctggtggtgactttcgatgcagggggagtaagtggccacagcaatcacattgctctgtatgcagctgtgagggccctgcactcagaagggaagttacctaaagggtgctctgtgctcacgcttcagtctgtgaatgtgctgcgcaagtacatctcccttctggatctgcccttgtctctgcttcatacgcaggatgtcctcttcgtgctcaacagcaaagaagtggcacaggccaagaaagccatgtcctgccaccgcagccagctcctctggttccgccgcctctacattatcttctcccggtacatgagaatcaactcactgagcttcctctgaagccttgaagggttttcagatccaaggaacaaaggggaaaatagacaaaggagtgcagaggacctggcctggcactggcttatttacctgagctcaaggagatccccgctggagcagcctctgcaaaagggagcccatgtaggccaggggctgtccaaactccagcttcttcccctgggaaaaaacccaaagaaccaaaaacaaaccaccccaaggataataatagctacactgctagcttctcaagttcttgtgaaaaacaatttacataatgacacagtagatgtggaacacctagcccagtgcctgggcaggtccctattatcataaatgaacataaaagtgctctaaaaacactcca

SEQ ID NO: 144743 - protein, 489 aa, Artificial Sequence
  derived and/or modified sequence
MAAAAARVVLSSAARRRLWGFSESLLIRGAAGRSLYFGENRLRSTQAATQVVLNVPETRVTCLESGLRVASEDSGLSTCTVGLWIDAGSRYENEKNNGTAHFLEHMAFKGTKKRSQLDLELEIENMGAHLNAYTSREQTVYYAKAFSKDLPRAVEILADIIQNSTLGEAEIERERGVILREMQEVETNLQEVVFDYLHATAYQNTALGRTILGPTENIKSISRKDLVDYITTHYKGPRIVLAAAGGVSHDELLDLAKFHFGDSLCTHKGEIPALPPCKFTGSEIRVRDDKMPLAHLAIAVEAVGWAHPDTICLMVANTLIGNWDRSFGGGMNLSSKLAQLTCHGNLCHSFQSFNTSYTDTGLWGLYMVCESSTVADMLHVVQKEWMRLCTSVTESEVARARNLLKTNMLLQLDGSTPICEDIGRQMLCYNRRIPIPELEARIDAVNAETIREVCTKYIYNRSPAIAAVGPIKQLPDFKQIRSNMCWLRD

SEQ ID NO: 144744 - DNA, 1470 bp, Artificial Sequence
  derived and/or modified sequence
atggccgccgccgccgccagagtggtgctgagcagcgccgccagaagaagactgtggggcttcagcgagagcctgctgatcagaggcgccgccggcagaagcctgtacttcggcgagaacagactgagaagcacccaggccgccacccaggtggtgctgaacgtgcccgagaccagagtgacctgcctggagagcggcctgagagtggccagcgaggacagcggcctgagcacctgcaccgtgggcctgtggatcgacgccggcagcagatacgagaacgagaagaacaacggcaccgcccacttcctggagcacatggccttcaagggcaccaagaagagaagccagctggacctggagctggagatcgagaacatgggcgcccacctgaacgcctacaccagcagagagcagaccgtgtactacgccaaggccttcagcaaggacctgcccagagccgtggagatcctggccgacatcatccagaacagcaccctgggcgaggccgagatcgagagagagagaggcgtgatcctgagagagatgcaggaggtggagaccaacctgcaggaggtggtgttcgactacctgcacgccaccgcctaccagaacaccgccctgggcagaaccatcctgggccccaccgagaacatcaagagcatcagcagaaaggacctggtggactacatcaccacccactacaagggccccagaatcgtgctggccgccgccggcggcgtgagccacgacgagctgctggacctggccaagttccacttcggcgacagcctgtgcacccacaagggcgagatccccgccctgcccccctgcaagttcaccggcagcgagatcagagtgagagacgacaagatgcccctggcccacctggccatcgccgtggaggccgtgggctgggcccaccccgacaccatctgcctgatggtggccaacaccctgatcggcaactgggacagaagcttcggcggcggcatgaacctgagcagcaagctggcccagctgacctgccacggcaacctgtgccacagcttccagagcttcaacaccagctacaccgacaccggcctgtggggcctgtacatggtgtgcgagagcagcaccgtggccgacatgctgcacgtggtgcagaaggagtggatgagactgtgcaccagcgtgaccgagagcgaggtggccagagccagaaacctgctgaagaccaacatgctgctgcagctggacggcagcacccccatctgcgaggacatcggcagacagatgctgtgctacaacagaagaatccccatccccgagctggaggccagaatcgacgccgtgaacgccgagaccatcagagaggtgtgcaccaagtacatctacaacagaagccccgccatcgccgccgtgggccccatcaagcagctgcccgacttcaagcagatcagaagcaacatgtgctggctgagagactag

SEQ ID NO: 144745 - DNA, 1470 bp, Artificial Sequence
  derived and/or modified sequence
atggctgcagccgccgcccgagtagtactctcgtcagctgcccgccgccgcttgtggggattctccgaatctttattaataagaggggctgcgggaagatcactctatttcggagagaatagactcagaagtacacaggcagctactcaggttgtactgaacgtaccagagacccgtgtgacctgcctggagagtgggttgcgagttgcaagtgaagacagtggcctgtcgacttgcactgtcggactgtggatcgatgcaggctcccgctacgaaaacgagaagaacaacggaacagcacacttcctagaacacatggcgttcaaaggtacaaaaaagcggagccagctggacctggaactagagatcgaaaatatgggggcccatctgaatgcatatacctcacgtgagcagaccgtatactatgcaaaggccttctcgaaagacctacccagggcagtggagatccttgctgacattatacaaaactctactctgggggaagcggaaatcgaacgggagcgaggcgtgatcctcagggagatgcaggaggtcgagactaacctccaggaagtggtatttgattatctccatgctacggcatatcagaacacagccctcggcaggaccattctaggaccaaccgaaaacatcaaatctattagccgcaaagatctggtggattatattactacccactacaaagggccaagaatcgtgctcgcggccgccggtggggtgagtcacgatgaactactggacctggccaagtttcacttcggagattcactatgcacccataagggagagattcccgcattgccgccatgcaaattcaccggttccgagattcgcgtgcgggacgacaaaatgcccctcgctcatctagccatcgccgtcgaggctgtgggttgggcccacccggatacaatttgccttatggtggccaatactctcatcggaaactgggatcggagtttcggaggtggtatgaacttgtccagcaagcttgcccaacttacctgtcatggaaatctctgtcacagcttccaatctttcaatacttcctacactgacactggcctgtggggtctttatatggtctgtgaatccagtacagtagccgacatgttgcatgttgtgcagaaggaatggatgcgactgtgcacctccgtgaccgaatcagaggttgccagagccagaaacttgctgaagacaaacatgctgctgcaattggacggttcaactcccatctgtgaggatattgggcgccaaatgctatgttacaatcgaaggattccgatcccagaacttgaggctagaattgacgctgtaaacgcggaaacaataagggaagtgtgcacaaaatatatctataaccgcagccccgctattgcagctgtgggaccgattaaacagctgcctgacttcaagcagattcggtccaacatgtgttggctccgggactag

SEQ ID NO: 144746 - DNA, 1470 bp, Artificial Sequence
  derived and/or modified sequence
atggctgctgctgctgcccgggtggtgctgagcagcgctgcccggcggcggctgtggggcttcagcgagagcctgctgatcagaggagctgctggccgcagcctgtactttggagaaaatcggctgcggagcacccaggccgccacccaggtggtgctgaatgtgcctgagaccagggtgacctgcctggagagcggcctgcgggtggccagcgaggacagcggcctgagcacctgcaccgtgggcctgtggattgatgctggcagccgctatgaaaatgagaagaacaatggaacagcccacttcctggagcacatggccttcaagggcaccaagaagaggagccagctggacctggagctggagattgagaacatgggcgcccacctgaatgcctacaccagccgggagcagacagtgtactatgccaaggccttcagcaaggacctgcccagggctgtggagatcctggccgacatcatccagaacagcaccctgggggaggccgagattgagcgggagcggggcgtcatcctgcgggagatgcaggaggtggagaccaacctgcaggaggtggtgtttgactacctgcacgccacagcctaccagaacacagccctgggccgcaccatcctgggccccacagagaacatcaagagcatcagcaggaaggacctggtggactacatcaccacccactacaagggccccagaattgtgctggccgccgccggcggcgtgtcccatgatgagctgctggacctggccaagttccactttggagacagcctgtgcacccacaagggggagatcccagccctgcccccctgcaagttcaccggcagcgagatccgggtgagagatgacaagatgcccctggcccacctggccatcgctgtggaggccgtgggctgggcccacccagacaccatctgcctgatggtggccaacaccctcatcggcaactgggacaggagctttggaggcggcatgaacctgagcagcaagctggcccagctgacctgccacggcaacctgtgccacagcttccagagcttcaacaccagctacacagacaccggcctgtggggcctgtacatggtgtgtgagagcagcacagtggccgacatgctgcacgtggtgcagaaggagtggatgaggctgtgcacctctgtgacagaaagtgaggtggcccgggccaggaacctgctgaagaccaacatgctgctgcagctggatggcagcacccccatctgtgaggacatcggccggcagatgctgtgctacaacagacgcatccccatccctgagctggaggccagaattgatgctgtgaatgctgagaccatccgggaggtgtgcaccaagtacatctacaacagaagccctgccatcgctgctgtgggccccatcaagcagctgcctgacttcaagcagatccgcagcaacatgtgctggctgcgggactag

SEQ ID NO: 144747 - DNA, 1470 bp, Artificial Sequence
  derived and/or modified sequence
atggccgccgccgccgcccgggtggtgctgagcagcgccgcccggcgtcgtctctggggcttcagcgaatccctgctcatacgaggcgccgctggcagatccctgtactttggagagaaccgcctccgtagcacccaggcggccactcaagtcgtgctcaacgtccctgagacacgggttacctgtcttgagtccggcttaagggtggctagcgaggactccggtcttagtacttgcacagtcggcttgtggatagacgcaggttcacggtatgaaaacgagaagaataatggcacagctcattttctggagcacatggcttttaagggaacaaagaaaaggtctcagctcgacttggaattggagatcgagaacatgggagcacatcttaatgcttatacaagtcgggagcagactgtatactacgccaaggctttttccaaagacctaccaagagctgtggaaattctcgccgacatcatccagaacagcaccttgggagaggccgaaatcgagagggagcggggggtgattctccgcgagatgcaagaggttgaaactaatttacaggaggtcgtctttgactatctgcacgctactgcgtaccaaaataccgcactgggccggacaatcttaggccccacagaaaacattaagagcattagtcggaaggaccttgtggattatatcaccacacattataaagggccccggatcgtgttggcggcggccggcggagttagccatgacgagctgctcgatctggccaaattccactttggcgactctttatgtacccacaagggcgaaattccagctctcccaccttgtaagttcactgggtctgaaattcgcgttagggatgacaagatgccccttgctcacttagccatcgccgttgaggccgtgggatgggcacatcctgatactatctgccttatggtggctaacacactgataggtaactgggatcgttcatttgggggaggaatgaatttatcatcgaaactagctcagctgacgtgccatgggaacctctgccatagttttcagtcttttaacacttcgtacacagatacaggcctctgggggctgtatatggtgtgcgagagctccaccgttgccgacatgctgcatgtggttcagaaggagtggatgcgactttgcacttccgtcaccgaatctgaggtcgcccgggcaagaaatcttctgaaaacaaacatgttgctccaacttgacggttcaacacctatctgcgaggatatcgggcgccaaatgttgtgttataacagacgtattccaatacccgaactggaagctcgaatcgacgccgtcaacgccgagactattcgggaagtctgtacaaagtacatatacaataggagtcctgctatcgccgccgtggggcccattaaacagttgccagactttaagcagatccgatccaacatgtgctggcttagagactag

SEQ ID NO: 144748 - DNA, 2472 bp, Artificial Sequence
  derived and/or modified sequence
aagcacatccttcatcctctaccttccttctagcagaaatggcggctgcggcggctcgagtggtgttgtcatccgcggcgcggcggcggctctggggtttcagcgagagtcttctaatccgaggcgctgcgggacggtcattatattttggagagaacagattaagaagtacacaggctgctacccaagttgttctgaatgttcctgaaacaagagtaacatgtttagaaagtggactcagagtagcttcggaagactctgggctctcaacatgcacagttggactctggattgatgctggaagtagatacgaaaatgagaagaacaatggaacagcacactttctggagcatatggctttcaagggcaccaagaagagatcccagttagatctggaacttgagattgaaaatatgggtgctcatctcaatgcctatacctccagagagcagactgtatactatgccaaagcattctctaaagacttgccaagagctgtagaaattcttgctgatataatacaaaacagcacattgggagaagcagagattgaacgtgagcgtggagtaatccttagagagatgcaggaagttgaaaccaatttacaagaagttgtttttgattatcttcatgccacagcttatcaaaatactgcacttggacggacaattttgggaccaactgaaaatatcaaatctataagtcgtaaggacttagtggattatataaccacacattataaggggccaagaatagtgcttgctgctgctggaggtgtttcccatgatgaattgcttgacttagcaaagtttcatttcggtgactctttatgcacacacaaaggagaaataccagctctgcctccctgcaaattcacaggaagtgagattcgtgtgagggatgacaagatgcctttggcgcaccttgcaatagctgttgaagctgttggttgggcacatccagatacaatctgtctcatggttgcaaacacgctgattggcaactgggatcgctcttttgggggaggaatgaatttatctagcaagctggcccagctcacttgtcatggcaatctttgccatagctttcagtctttcaacacttcctacacagatacaggattatggggactgtatatggtttgtgaatcatccactgttgcagacatgctacatgttgttcaaaaagaatggatgcgactctgtacaagtgtcacagaaagtgaggttgcacgagccagaaatcttctgaaaacaaacatgttgttgcagcttgatggttcaactccaatttgtgaagatattggtaggcaaatgttatgctataatagaaggattcccatccctgagcttgaagcaagaattgatgctgtgaatgctgagacaattcgagaagtatgtaccaaatacatttataataggagtccagctattgctgctgttggtcccattaagcaactaccagattttaaacagatacgcagtaacatgtgttggcttcgtgattaaaatgctcctaatcaagattgtttgaacacatgtatttataaaacagagctagagaaaaataaaaatgaacatgtatatacatttggaaatttgaattaaatactgtatcatactttcaaaggataaaaagactacccctctgaaggttgttttgtattaatggtcagtctttgttctctgagaaattatgttggaagcagcatactttcaaattattaccatgagtataattttaagaatgaaaatgtttacagtattttcagttttattataaaaatgcacacacaacaaagattgtcatttcttggctctacttgcattcagcacttgttcttgagcagctttctttgcttttaccatctcgacaagttcctaggaagggagaaaggtgtgatttaagaagttgcgatttaaaaacagacattttaatctagtgtttggtgtaaagaattcaagcaactaagatagatagtactaaatatactgatttcattatctgccagggcctagaaagtttctaaggttgctcatttcttcctcataatattgaccccataactactggttttgaaataagcactatattattaaccacttaatagacataaaatatgagctatatcacccaagctacaatttaaaatacaacaatctataaacgcttaagtctgcaaccttgtatcgtttcatgcagtccttctttgtcctgccaggcaccgcttctgctattttttcccatctttcaggtgtatttactgggtatgttttcaaagcttgttccaaaagcttctgttcttctgttgtccaaggggtgaagtctgtatatggacctgattaagaaaaatttttatttgaaaactgtctttgaacatgttctcagacaagtcttgtggtccacaagtattcgctaagtgcccatttcaatctgggatgtgtcattttgaaaataaacttgtagagatga

SEQ ID NO: 144749 - DNA, 1470 bp, Artificial Sequence
  derived and/or modified sequence
atggcagcggctgcagccagagtggtgctctcttcggccgcacgcaggcgactatggggattcagcgaaagtcttcttatccggggtgcggcaggtcgctccctttactttggtgagaaccggctaagaagcacccaggcagctacacaggtggtgctgaatgtgcctgagaccagggtaacttgcctggaatccggtctgcgggtggcgtccgaagatagtggtttgtccacgtgcaccgtagggctttggattgatgccggatccaggtatgaaaatgagaagaacaatggcaccgcccatttcctggagcacatggcgtttaagggcaccaaaaagaggagtcagctggacctggagctagaaatcgagaatatgggcgctcatctgaatgcatataccagccgtgaacagacagtgtactacgcaaaagcattctctaaagacttgcccagggcagttgagatcctggcagacatcattcagaatagcacgctgggagaggccgaaattgagagggagagaggcgttattcttcgcgagatgcaagaggtcgaaacaaatctccaagaggtggtctttgactatcttcatgcgacagcgtatcagaatacagctctgggtcggactattctaggacctactgaaaatataaaatccatcagcagaaaggatctggtagactacatcacaacgcactacaaagggcctagaatagtgcttgctgctgcagggggtgtctcacacgacgaactactggatctggcaaagtttcacttcggggactctctctgtactcacaaaggagaaattcctgctctacccccatgcaagttcacagggtcagaaatacgggtcagggacgataaaatgccactggcccatctggctatcgctgtcgaagctgtaggctgggcccaccccgataccatatgtcttatggtcgcgaacacactcattggaaactgggataggagttttggagggggaatgaacctatcttcaaagttggctcagctgacatgtcacgggaatctctgtcatagctttcagagcttcaacaccagttacactgacaccggtctgtggggactgtacatggtgtgtgaaagctctacagtcgctgatatgttgcatgtcgtgcagaaagagtggatgagactgtgcacctcagtgactgagtcagaggtggcacgggctaggaatttactcaagactaatatgctcctccaactggacggaagcacacctatctgcgaggacatcggcaggcagatgctctgctacaatcgacgcataccaatccccgagctggaggccaggatcgacgccgtgaatgccgaaacaatccgggaggtgtgcactaagtatatttataaccggtctcctgcaatagctgccgtggggcctatcaagcagcttccagattttaagcagatacggagcaatatgtgttggctccgcgattag

SEQ ID NO: 144750 - protein, 174 aa, Artificial Sequence
  derived and/or modified sequence
MAAAAELSLLEKSLGLSKGNKYSAQGERQIPVLQTNNGPSLTGLTTIAAHLVKQANKEYLLGSTAEEKAIVQQWLEYRVTQVDGHSSKNDIHTLLKDLNSYLEDKVYLTGYNFTLADILLYYGLHRFIVDLTVQEKEKYLNVSRWFCHIQHYPGIRQHLSSVVFIKNRLYTNSH

SEQ ID NO: 144751 - DNA, 525 bp, Artificial Sequence
  derived and/or modified sequence
atggccgcagccgctgaactgtctcttctggagaaatccttgggcctgtcaaaaggcaataaatattccgctcagggagaacgccagatcccagtgctccagacgaacaacggcccttctcttactggactgacaacgattgccgcccacttggtgaagcaggccaataaagagtacctgctggggagcaccgccgaagagaaagccatcgtgcagcagtggctcgagtacagagtaacacaggtggatggacactcaagcaaaaacgacattcataccctgttgaaggatctgaattcttacctggaggataaggtgtacttaactggctacaatttcacactggctgacatactcttgtactacggactgcaccgctttatcgtggacctcaccgtgcaggagaaggaaaaatacctcaacgtctccagatggttctgccatatccagcattatcctggtatcaggcagcatctgtcctccgttgtgtttattaaaaaccgattgtatacaaattcccactag

SEQ ID NO: 144752 - DNA, 525 bp, Artificial Sequence
  derived and/or modified sequence
atggctgctgctgctgagctgagcctgctggagaagagcctgggcctgagcaagggcaacaagtacagcgcccagggcgagcggcagatccctgtgctgcagaccaacaacggccccagcctgaccggcctgaccaccatcgccgcccacctggtgaagcaggccaacaaggagtacctgctgggcagcacagctgaggagaaggccatcgtgcagcagtggctggagtacagagtgacccaggtggatggccacagcagcaagaatgacatccacaccctgctgaaggacctgaacagctacctggaggacaaggtgtacctgaccggctacaacttcaccctggccgacatcctgctgtactacggcctgcaccgcttcatcgtggacctgactgtgcaggagaaggagaagtacctgaatgtgagccgctggttctgccacatccagcactacccaggcatccggcagcacctgagctctgtggtgttcatcaagaacagactctacaccaacagccactag

SEQ ID NO: 144753 - DNA, 525 bp, Artificial Sequence
  derived and/or modified sequence
atggccgccgccgccgagctgagcctgctggagaagagcctgggcctttcaaaaggaaacaagtatagcgctcagggagaaagacagatccctgtgctgcagactaacaacgggccttccttgacaggcctgaccaccatcgccgcgcatctcgtcaagcaagctaataaagagtatttgctgggtagcacagctgaagagaaagcaatcgtgcagcaatggctcgagtaccgcgtgacccaggtagatggtcatagctccaagaatgacatacacactttgttgaaggatttgaattcctatcttgaagataaggtttacttgaccggctacaatttcactctggctgatatccttctttattatgggctgcatcgttttatcgtcgatcttacagtgcaggagaaagagaagtatctgaatgtcagccggtggttctgccatattcaacattaccccgggatccggcagcacctctcttcagttgtttttattaagaataggctgtacaccaacagccactag

SEQ ID NO: 144754 - DNA, 525 bp, Artificial Sequence
  derived and/or modified sequence
atggccgctgccgctgaactgtcactcttggagaagtccctggggttgagtaaaggcaataaatactctgcccagggcgagagacagataccggtgctccagaccaacaacggcccttccctgaccgggctgacaactatagctgcccatctggtcaagcaggccaataaggaataccttctgggtagtacagccgaggagaaagcgatcgtgcaacagtggctggagtatagggtaacccaggttgatggacacagctcgaagaatgacatccacacactgcttaaagacctgaatagttatctggaagacaaggtatatctcacaggctacaacttcaccttggctgacattttactgtactacggactgcacaggttcatcgttgacttaacagtacaggagaaggagaaatacttgaacgttagcagatggttttgtcacatccagcattaccctggaatccgtcagcatctttcgtcagtggtgttcattaagaaccgtctgtacaccaatagccactag

SEQ ID NO: 144755 - DNA, 525 bp, Artificial Sequence
  derived and/or modified sequence
atggccgccgccgccgagctgagcctgctggagaagagcctgggcctgagcaagggcaacaagtacagcgcccagggcgagagacagatccccgtgctgcagaccaacaacggccccagcctgaccggcctgaccaccatcgccgcccacctggtgaagcaggccaacaaggagtacctgctgggcagcaccgccgaggagaaggccatcgtgcagcagtggctggagtacagagtgacccaggtggacggccacagcagcaagaacgacatccacaccctgctgaaggacctgaacagctacctggaggacaaggtgtacctgaccggctacaacttcaccctggccgacatcctgctgtactacggcctgcacagattcatcgtggacctgaccgtgcaggagaaggagaagtacctgaacgtgagcagatggttctgccacatccagcactaccccggcatcagacagcacctgagcagcgtggtgttcatcaagaacagactgtacaccaacagccactag

SEQ ID NO: 144756 - DNA, 1077 bp, Artificial Sequence
  derived and/or modified sequence
aatgcgggaggttcttgttctgcaggtctcgcgtctgccaggagctacggccggaagatggcggcggccgcagagttgtcgctactggagaagtccctgggactgagtaaggggaataaatacagtgctcagggcgagcgacagattccagttcttcagacaaacaatggtccaagtctaacaggattgactactatagcagctcatctagtcaagcaagccaacaaagaatatttgctggggagtactgcagaagaaaaagcaatcgttcagcagtggttagaatacagggtcactcaagtagatgggcactccagtaaaaatgacatccacacactgttgaaggatcttaattcatatcttgaagataaagtctaccttacagggtataactttacattagcagatatactattgtactatggacttcatcgctttatagttgacctgacagttcaagaaaaggagaaatatcttaatgtgtctcgctggttttgtcacattcagcattatccaggcatcaggcaacatctgtctagtgttgtcttcatcaagaacagactatatactaattcccactagaagctgtccatgccatacagaagatctattaaaaatgttttaaatggaaaatgtactctagaccacaggactaatgtaaattaatatacagtcattcattatttgttgaagttgatagaatttttgaagtgtaaacttgtgtctgaatgttttatttgttctttagctgaagttttgcaatttttatgtcaaaattcaattgctattaaacaagttgagatccagttataaattaaccttgtttttagtagatgacatttatttcaataaaagttgcaaatcgggcttaatcttaaaattggtggtcatttcaatggttgacatatttggctatttattaacctctctttcatattctaaaattcattttccccttatggatatttatggtagtttgttaagaactgataaattgtgccaaggaagccaaaagggaagacagatggatttgttttaaaatatttatgtgagctagtaaatgtggttgaaaaaata

SEQ ID NO: 144757 - protein, 575 aa, Artificial Sequence
  derived and/or modified sequence
MSAATHSPMMQVASGNGDRDPLPPGWEIKIDPQTGWPFFVDHNSRTTTWNDPRVPSEGPKETPSSANGPSREGSRLPPAREGHPVYPQLRPGYIPIPVLHEGAENRQVHPFHVYPQPGMQRFRTEAAAAAPQRSQSPLRGMPETTQPDKQCGQVAAAAAAQPPASHGPERSQSPAASDCSSSSSSASLPSSGRSSLGSHQLPRGYISIPVIHEQNVTRPAAQPSFHQAQKTHYPAQQGEYQTHQPVYHKIQGDDWEPRPLRAASPFRSSVQGASSREGSPARSSTPLHSPSPIRVHTVVDRPQQPMTHRETAPVSQPENKPESKPGPVGPELPPGHIPIQVIRKEVDSKPVSQKPPPPSEKVEVKVPPAPVPCPPPSPGPSAVPSSPKSVATEERAAPSTAPAEATPPKPGEAEAPPKHPGVLKVEAILEKVQGLEQAVDNFEGKKTDKKYLMIEEYLTKELLALDSVDPEGRADVRQARRDGVRKVQTILEKLEQKAIDVPGQVQVYELQPSNLEADQPLQAIMEMGAVAADKGKKNAGNAEDPHTETQQPEATAAATSNPSSMTDTPGNPAAP

SEQ ID NO: 144758 - DNA, 1728 bp, Artificial Sequence
  derived and/or modified sequence
atgtcggctgccacacatagtccgatgatgcaggtcgccagcggaaacggcgatagagaccctttaccacccggttgggaaatcaaaattgatcctcagacagggtggccattctttgtcgaccataatagccgaaccactacctggaatgatccgagggtcccgtccgaggggcccaaagaaacaccctcctcggcgaatgggccatctcgcgaaggcagccgtcttccgcctgcacgtgagggacatcccgtttacccacagctcagaccagggtatatccccataccagtcctccacgagggggccgaaaaccggcaggtccatccttttcacgtgtatccgcaacccggaatgcaaagatttaggaccgaagccgctgccgcggctccgcagagaagtcaatcccccctaaggggtatgcccgaaactacccagccagataagcaatgtggacaggtagccgctgcggcagctgcccagccccctgcttcccacggccccgaacgcagtcagagtcccgccgcaagcgattgctctagttctagcagcagcgccagcttaccttccagcggcagaagcagtctcggctcacaccagctgccacgaggctatatctctatccctgttatccacgaacagaatgttacacgtccggccgcccaacctagctttcatcaagcccagaagacgcactaccccgcgcagcaaggggagtatcagactcatcagcccgtgtaccataagattcagggcgacgattgggaacctaggcctttgcgtgcagcctcgccgtttcggagctcagtgcagggagcttcatcacgggagggtagtccagcgagaagttccacacccctccattccccgtccccaattcgtgtccataccgtagtggaccggccacaacagcccatgacccaccgcgagacagctccagtatcccagccagagaacaagcccgagtctaagccgggacctgtgggacctgaactgcctccgggtcacatcccaatacaagtaattaggaaggaggtggatagtaaacctgtctctcagaagcctccacctccttcggaaaaggtggaggtcaaggtgccccccgcgccagtgccctgtcctccgccaagccctggaccatctgccgtgccatcaagccctaaatctgtggctacagaagagagagccgctccttcaactgcacctgcagaggcaactccgcctaagcccggcgaggccgaggcccctcccaagcatccgggcgttctgaaggtggaggcaatactagaaaaagtgcagggtctggaacaggccgtggacaattttgagggtaagaagacagataaaaaatatctcatgattgaggagtatcttaccaaggaactgcttgctctggactctgtcgatccagaggggagagccgatgtacgccaggccagacgggatggcgtgcgcaaggtacaaactattttagagaaacttgaacagaaggccattgatgtgccaggacaggttcaggtctatgagctgcaaccctcgaaccttgaagccgaccagccactgcaggccattatggagatgggtgcggtggccgctgacaaaggcaagaagaacgcaggcaatgcagaggacccacacaccgagacgcaacagccggaggccacagctgccgccacttctaatccctcttcaatgactgacacaccaggaaatcccgccgccccctag

SEQ ID NO: 144759 - DNA, 1728 bp, Artificial Sequence
  derived and/or modified sequence
atgtctgctgccacccacagccccatgatgcaggtggccagcggaaatggagaccgggaccccctgcccccaggctgggagatcaagattgacccccagacaggctggcccttctttgtggaccacaacagcaggaccaccacctggaatgacccccgggtgcccagcgagggccccaaggagacccccagcagcgccaacggccccagccgggagggcagccggctgcccccagcccgggagggccaccctgtgtacccccagctgcggcccggctacatccccatccctgtgctgcacgagggcgctgagaaccggcaggtgcaccccttccacgtgtacccccagcccggcatgcagcgcttcagaacagaggccgctgctgctgccccccagaggagccagagccccctgcggggcatgcctgagaccacccagcctgacaagcagtgtggccaggtggccgctgctgctgctgcccagcccccagccagccacggccctgagaggagccagagccctgctgccagtgactgcagcagcagcagcagcagcgccagcctgcccagcagcggccgcagcagcctgggcagccaccagctgccccggggctacatcagcatccctgtgatccacgagcagaatgtgaccaggcctgctgcccagcccagcttccaccaggcccagaagacccactacccagcccagcagggcgagtaccagacccaccagcctgtgtaccacaagatccagggagatgactgggagccccggcccctgcgggccgccagccccttccgcagctctgtgcagggcgccagcagccgggagggcagccctgcccggagcagcacccccctgcacagccccagccccatccgggtgcacacagtggtggaccggccccagcagcccatgacccaccgggagacagcccctgtgtcccagcctgagaacaagccagagagcaagccaggccctgtgggccctgagctgcccccaggccacatccccatccaggtgatcaggaaggaggtggacagcaagcctgtgtcccagaagcccccacctccttctgagaaggtggaggtgaaggtgcccccagcccctgtgccctgccccccacccagccctggccccagcgctgtgcccagcagccccaagtctgtggccacagaggagcgggccgcccccagcacagccccagctgaggccaccccacccaagccaggagaggccgaggccccacccaagcaccctggggtgctgaaggtggaggccatcctggagaaggtgcagggcctggagcaggccgtggacaactttgagggcaagaagacagacaagaagtacctgatgattgaggagtacctgaccaaggagctgctggccctggacagcgtggaccctgagggccgggcagatgtgcggcaggccaggagagatggagtgaggaaggtgcagaccatcctggagaagctggagcagaaggccattgatgtgcccggccaggtgcaggtgtatgagctgcagcccagcaacctggaggccgaccagcccctgcaggccatcatggagatgggcgctgtggccgctgacaagggcaagaagaatgctggaaatgctgaggacccccacacagagacccagcagcctgaggccacagctgctgccaccagcaaccccagctccatgacagacaccccaggcaacccagctgccccctag

SEQ ID NO: 144760 - DNA, 1728 bp, Artificial Sequence
  derived and/or modified sequence
atgagcgccgccacccacagccccatgatgcaggtggccagcggcaacggagatagggatcctctccctccagggtgggaaatcaagatcgatcctcagaccggttggccctttttcgttgatcacaactcccggacgactacctggaacgaccccagagtaccgagtgaagggcccaaagagaccccctcttccgctaatggtccctcccgcgaaggaagtagactcccccctgcaagggagggtcaccctgtgtatcctcagctgcggcctggctatatccccatcccagtcctacacgagggagctgagaacagacaggttcatccctttcacgtgtatccgcagcctggaatgcaacgattccgtacagaggcagcagccgcagcaccacaacgcagccaaagccctttacgcggcatgcctgagacaacacagccagacaagcagtgcggccaggtcgctgctgccgctgcagcccagccccctgcaagtcacggcccagagcgctcccagagccccgcggcatccgactgtagctcatccagcagctccgcttctctgcccagcagcggccgcagttccctaggctcacaccagctaccccggggatacattagcatccccgtgattcatgaacaaaacgttacccggccggctgcacagccaagcttccatcaagctcagaaaactcattatccggcacagcaaggagaataccagacccatcagcctgtttaccacaagatccagggggatgattgggagccccgtccgctgagagccgcctcaccctttcgcagtagtgtccagggggcttcttcacgagaggggtcaccagcccgtagttccacccctctgcacagtccaagccctatacgcgttcacaccgtggtcgaccgcccccagcagccgatgacacacagggagacagcccccgtatcccaacctgagaacaaaccggagtctaagcctggccctgttgggcccgagcttcctcccggacacattccaatccaggttatcagaaaagaagtggactcaaaaccagtctctcagaaacccccacccccctccgaaaaggtggaagtgaaggtcccacctgctcccgtaccttgccctccaccttctcccggaccatcagctgtcccttccagcccaaagtcagttgcgacagaggagagagcggcaccgagcaccgctccggcagaagccacccccccgaaacctggcgaggccgaggctccgcccaaacatcccggagtactaaaggtggaggccatcctggagaaggtgcagggcttggagcaggccgtggacaacttcgaggggaagaagactgacaagaaatacctaatgatcgaggaatatctgactaaagagctcttggcccttgatagcgtggaccccgagggacgcgcggacgtaagacaggctaggagggacggtgtcaggaaggtccagacgatccttgaaaagctggagcagaaggctatcgacgtgcccgggcaggttcaggtttacgagcttcagccgtctaatcttgaagcagatcagccattgcaagcaataatggaaatgggcgctgtagcagcagataagggcaaaaaaaatgccggtaatgcagaggacccccacacagagacgcaacagcccgaggcaacagccgctgcaacaagcaatccatctagtatgacagacacccctggtaaccctgctgccccgtag

SEQ ID NO: 144761 - DNA, 1728 bp, Artificial Sequence
  derived and/or modified sequence
atgtcggccgcaacacattccccaatgatgcaggttgctagcggaaatggtgaccgtgatcccctccctccaggctgggagattaagatagatcctcagacggggtggcccttctttgtggatcacaattcaaggaccacaacctggaatgatcctagagttccttcagaaggacctaaagagaccccttcatccgctaatggcccatcaagagaaggctccaggctgccccctgcaagagaaggacatccagtgtaccctcagctgaggcccggttatattccaattccagtactccacgagggagccgagaaccgtcaggtccatccctttcatgtgtacccccaaccgggtatgcagagattccgaacagaggccgcagccgcagctccgcagcgatcccagtcccctctgagggggatgccagaaaccacccagcccgacaagcagtgcgggcaggtggccgcagcagcggcagcacagccgccagcgagtcacggtccagagcggagtcaaagccccgctgccagcgattgtagcagctcctcttcttctgcctcgcttccttcatcaggccgaagttcattaggaagccaccagctccctagaggctacataagcatcccagttatacatgagcaaaacgttacaagacccgctgcacagccctcgttccaccaagcacagaagactcactatccagcacagcagggtgaatatcagactcatcaaccagtgtaccataagattcagggcgacgactgggagcctcgcccactccgcgcagcttctcctttccgctcatccgtacagggggcaagcagtcgggagggatcgccggcaagaagcagtaccccactacatagtccttcgcccattagagtgcataccgtggtggatagacctcagcagcctatgactcacagagagaccgcacctgtttcccagccggaaaacaaaccggagtctaagcccggacccgtcggaccagagctgccacctggtcatatcccaatacaagtgattagaaaggaggtggactcaaagcccgttagccaaaagccacctccaccgagcgagaaggtcgaggtgaaggtaccacctgcaccggtgccgtgccccccacccagccccggtccctccgctgtgccttccagcccaaaatctgtagccacggaagagcgcgcagcaccgtcaaccgcgcctgccgaagcaacccctccaaagcccggagaggccgaggctccccctaaacatccgggtgtactcaaagtagaagccatactggagaaagtgcaagggctggagcaggcggtcgacaacttcgaaggaaagaagactgacaaaaagtacctcatgatcgaggagtacctcaccaaggagctgcttgcactcgacagtgtcgacccggaagggagagccgacgttcgccaggccaggcgggacggcgttcggaaggttcagacaatattggagaagctggaacagaaggccattgatgtgcctggacaggtgcaggtctacgagctccaaccgagcaaccttgaggcagatcaaccgctccaggccatcatggagatgggcgctgttgccgctgacaaaggcaagaagaacgccggaaatgccgaggacccccatacagaaacccagcaacccgaggccaccgccgcagcaacatccaacccaagctctatgacagatactccgggtaaccccgcagcaccttag

SEQ ID NO: 144762 - DNA, 2571 bp, Artificial Sequence
  derived and/or modified sequence
gcggagctccgcatccaaccccgggccgcggccaacttctctggactggaccagaagtttctagccggccagttgctacctccctttatctcctccttcccctctggcagcgaggaggctatttccagacacttccacccctctctggccacgtcacccccgcctttaattcataaaggtgcccggcgccggcttcccggacacgtcggcggcggagaggggcccacggcggcggcccggccagagactcggcgcccggagccagcgccccgcacccgcgccccagcgggcagaccccaacccagcatgagcgccgccacccactcgcccatgatgcaggtggcgtccggcaacggtgaccgcgaccctttgccccccggatgggagatcaagatcgacccgcagaccggctggcccttcttcgtggaccacaacagccgcaccactacgtggaacgacccgcgcgtgccctctgagggccccaaggagactccatcctctgccaatggcccttcccgggagggctctaggctgccgcctgctagggaaggccaccctgtgtacccccagctccgaccaggctacattcccattcctgtgctccatgaaggcgctgagaaccggcaggtgcaccctttccatgtctatccccagcctgggatgcagcgattccgaactgaggcggcagcagcggctcctcagaggtcccagtcacctctgcggggcatgccagaaaccactcagccagataaacagtgtggacaggtggcagcggcggcggcagcccagcccccagcctcccacggacctgagcggtcccagtctccagctgcctctgactgctcatcctcatcctcctcggccagcctgccttcctccggcaggagcagcctgggcagtcaccagctcccgcgggggtacatctccattccggtgatacacgagcagaacgttacccggccagcagcccagccctccttccaccaagcccagaagacgcactacccagcgcagcagggggagtaccagacccaccagcctgtgtaccacaagatccagggggatgactgggagccccggcccctgcgggcggcatccccgttcaggtcatctgtccagggtgcatcgagccgggagggctcaccagccaggagcagcacgccactccactccccctcgcccatccgtgtgcacaccgtggtcgacaggcctcagcagcccatgacccatcgagaaactgcacctgtttcccagcctgaaaacaaaccagaaagtaagccaggcccagttggaccagaactccctcctggacacatcccaattcaagtgatccgcaaagaggtggattctaaacctgtttcccagaagcccccacctccctctgagaaggtagaggtgaaagttccccctgctccagttccttgtcctcctcccagccctggcccttctgctgtcccctcttcccccaagagtgtggctacagaagagagggcagcccccagcactgcccctgcagaagctacacctccaaaaccaggagaagccgaggctcccccaaaacatccaggagtgctgaaagtggaagccatcctggagaaggtacaggggctggagcaggctgtagacaactttgaaggcaagaagactgacaaaaagtacctgatgatcgaagagtatttgaccaaagagctgctggccctggattcagtggaccccgagggacgagccgatgtgcgtcaggccaggagagacggtgtcaggaaggttcagaccatcttggaaaaacttgaacagaaagccattgatgtcccaggtcaagtccaggtctatgaactccagcccagcaaccttgaagcagatcagccactgcaggcaatcatggagatgggtgccgtggcagcagacaagggcaagaaaaatgctggaaatgcagaagatccccacacagaaacccagcagccagaagccacagcagcagcgacttcaaaccccagcagcatgacagacacccctggtaacccagcagcaccgtagcctctgccctgtaaaaatcagactcggaaccgatgtgtgctttagggaattttaagttgcatgcatttcagagactttaagtcagttggtttttattagctgcttggtatgcagtaacttgggtggaggcaaaacactaataaaagggctaaaaaggaaaatgatgcttttcttctatattcttactctgtacaaataaagaagttgcttgttgtttgagaagtttaaccccgttgcttgttgttctgcagccctgtctacttgggcacccccaccacctgttagctgtggttgtgcactgtcttttgtagctctggactggaggggtagatggggagtcaattacccatcacataaatatgaaacatttatcagaaatgttgccattttaatgagatgattttcttcatctcataattaaaatacctgactttagagagagtaaaatgtgccaggagccataggaatatctgtatgttggatgactttaatgctacattttaaaaaaagaaaataaagtaataatataactcaaaa

SEQ ID NO: 144763 - DNA, 1728 bp, Artificial Sequence
  derived and/or modified sequence
atgagcgccgccacccacagccccatgatgcaggtggccagcggcaacggcgacagagaccccctgccccccggctgggagatcaagatcgacccccagaccggctggcccttcttcgtggaccacaacagcagaaccaccacctggaacgaccccagagtgcccagcgagggccccaaggagacccccagcagcgccaacggccccagcagagagggcagcagactgccccccgccagagagggccaccccgtgtacccccagctgagacccggctacatccccatccccgtgctgcacgagggcgccgagaacagacaggtgcaccccttccacgtgtacccccagcccggcatgcagagattcagaaccgaggccgccgccgccgccccccagagaagccagagccccctgagaggcatgcccgagaccacccagcccgacaagcagtgcggccaggtggccgccgccgccgccgcccagccccccgccagccacggccccgagagaagccagagccccgccgccagcgactgcagcagcagcagcagcagcgccagcctgcccagcagcggcagaagcagcctgggcagccaccagctgcccagaggctacatcagcatccccgtgatccacgagcagaacgtgaccagacccgccgcccagcccagcttccaccaggcccagaagacccactaccccgcccagcagggcgagtaccagacccaccagcccgtgtaccacaagatccagggcgacgactgggagcccagacccctgagagccgccagccccttcagaagcagcgtgcagggcgccagcagcagagagggcagccccgccagaagcagcacccccctgcacagccccagccccatcagagtgcacaccgtggtggacagaccccagcagcccatgacccacagagagaccgcccccgtgagccagcccgagaacaagcccgagagcaagcccggccccgtgggccccgagctgccccccggccacatccccatccaggtgatcagaaaggaggtggacagcaagcccgtgagccagaagccccccccccccagcgagaaggtggaggtgaaggtgccccccgcccccgtgccctgccccccccccagccccggccccagcgccgtgcccagcagccccaagagcgtggccaccgaggagagagccgcccccagcaccgcccccgccgaggccaccccccccaagcccggcgaggccgaggccccccccaagcaccccggcgtgctgaaggtggaggccatcctggagaaggtgcagggcctggagcaggccgtggacaacttcgagggcaagaagaccgacaagaagtacctgatgatcgaggagtacctgaccaaggagctgctggccctggacagcgtggaccccgagggcagagccgacgtgagacaggccagaagagacggcgtgagaaaggtgcagaccatcctggagaagctggagcagaaggccatcgacgtgcccggccaggtgcaggtgtacgagctgcagcccagcaacctggaggccgaccagcccctgcaggccatcatggagatgggcgccgtggccgccgacaagggcaagaagaacgccggcaacgccgaggacccccacaccgagacccagcagcccgaggccaccgccgccgccaccagcaaccccagcagcatgaccgacacccccggcaaccccgccgccccctag

SEQ ID NO: 144764 - protein, 219 aa, Artificial Sequence
  derived and/or modified sequence
MASAGDTQAGPRDAADQNFDYMFKLLLIGNSSVGKTSFLFRYADDSFTPAFVSTVGIDFKVKTVYRHDKRIKLQIWDTAGQERYRTITTAYYRGAMGFLLMYDIANQESFAAVQDWATQIKTYSWDNAQVILVGNKCDLEDERVVPAEDGRRLADDLGFEFFEASAKENINVKQVFERLVDVICEKMNESLEPSSSSGSNGKGPAVGDAPAPQPSSCSC

SEQ ID NO: 144765 - DNA, 4272 bp, Artificial Sequence
  derived and/or modified sequence
ccttcctccgccttctgggcggagcccgcgcgggatccgggtggctgcaggctgctggcttctgcggctgcggggtcggggtcgcggccagggccaagccgcagcgagttcacaggcggaacccctgcaggcggcgccccctacgcgaggtcacccctgggaaggagcgcagcccacccggcccctccgcatccgagcaggacgcccgtctcctctccctgaggatttcaggtctccctgtcccaggaggcttgtgccaagatggcatcagctggagacacccaggcaggcccacgggatgcagcagatcagaacttcgactatatgttcaaactgctactgataggcaacagcagtgtgggcaagacttccttcctgttccgatacgcggacgactccttcactcccgccttcgtcagtactgtgggcatcgatttcaaggtcaagaccgtctaccgccatgacaagaggatcaagctgcagatctgggacacagcgggccaggagcgctaccgcaccatcaccacggcctactaccggggagccatgggcttcctgctcatgtatgacatcgccaatcaggaatcctttgccgctgtgcaggactgggccacgcaaatcaagacctactcctgggacaacgcccaggtcatcctggtggggaacaagtgtgacctggaggacgaacgtgttgtgcctgctgaggatggccggaggctcgccgacgaccttggtttcgagttctttgaagccagtgccaaggagaacatcaatgtgaagcaggtcttcgagcgcctggtggatgtcatctgcgagaagatgaacgagtccctggaacccagctccagctcaggcagcaacgggaaaggcccggccgtgggggatgctccagccccccagcccagcagctgcagctgctagagatggcccccaaccccccacccacccctctcctgcctcggcagggactgtgatcgaggcgtgagccacagtggttatctccaagctcagggcaatcccttccctcctgtcaactgctccccgactcctgcatggctcattccttcacaatgtcgccgtggctgccaggttcctcaggcagccccggtgggaggctgcggaccatggggactcagctctgcatggcaggcagaggcccagggacactgacgtgcatgagcttgctgctttccagggtgtgttgagggtggccatgggtgacacgtcccactctttctgatggaggggcatccgtggtgccttctagcttagaaccattttccaggtctcttctgggttgggcaggactgatattcccaagctggtggaagatggttcatcttcctcgcacagtgtgggttcttggagttcatccagggaaggcggcgcctctttctcaggtcctgcaggctggtctctgagcctgcccccacgaactttctggattccaaggtgggatggtgatccctttgacccctgcagaccctctacttgcgaaaagcagcattgaagcagccttttcccattgtagaagggacagggagtcagatcccctcaaccccccggcttcagggaccccagaagtgccttccaagcttcccccaagatccacatcacccacgaccctgccactgtttttgctgtgttcaccacatctctgatcctgaagtgaattctggaactatggaccacattagactgggcagagattcgcccaacccctagcactccggctctgggctttcggccagaagttaattaacctcagagccaggagcctggggctggggcctccctcccaggccctgtttagctgtttagctggttgtgttttaagcaagttcttgcccaatcatgcatcctgctagaaaaggaaatgaagcaacgttcccagccaccgcaggcagttgtcggcgactttctgatgtaagcacctgggctccgacttgaggggggcccttcaagacccaatgtccatttcccaatccttgtcatcggcagggcccagggatgtgacaatttttgctaatggaggagtcacttctttttttttttttttctttttgagatggtctggctctgtcacccaggctggagtgcagtggtgcaatcatagctcaccacagcctcaaactaggggtcacttctaagggatgctgggggttgggcggaaggggtgaggaggtaggattgagtaacttgctgtcactgcttgtactttgtagacagcctgagagtggcaggaccttatgtgaatgggggggatggactgtgatcagtgccggggagtctctgaagctggggtccccacctccaggggcttctgctcagaggttacgtgtgcagtttgaagatgtacatcttgacctccggtttagaggcactttctgcccatcagattccaaactctaggggcgcagcaccttttctttgctcccaaacaccaaccaacaccccttcacaggaccagcactgttaggatggctaagtggatgttttatgttcccacgtccctgactctgtttcagaggttgtgtctgctctcccagcccctgaagccaaaatgacttcctgcagctttcatgagctcagcctcttccctggggtatgtgtgagggggaaagcctggttcaagtttagatttatttctagggagccctggtttcttcataccagaggctacccttagaactttggagtggggtatctttttttcatttgtttttttgatacagagtctcgctctattgcccaggctggagtgcggtggcacaatctcagcttactgcaacctccacctccagggttcaagcgattctcctgcctcagcctcccgagtagctggcattacaggcacctgccaccacacccggctaaattttgtatttttagtagagaaggggtttcaccatgttggtgaggcttgtctcaaactgacttcaagtgatccacttgcttcggcctcccaaagtgctgggattacaggcgtgagccatcacgcccagccgagggtatcttttataccaacaaattagatgactgaggtgtaatggacaaatcctatgcacaaagtgagggtatctgaatatgtgggcgggagtcaaaaatttttagctactttaacactaaagtcaaactaaagtagcttcaaaaagacttctcaagatgcagtatggcctgctgaggtttttttgttttttttttttttaagacagagagtcgctcgtcgcccaggccgcagtgcagtagcatgatctcagctcactgcaacctccacctcccgggttcaagcgattctcctgtctcagcctcctaagtagctgggactacaggcacctgccaccacgcccatctaagttttgcatttttagtagcgacggtttcaccttgttggccaggctggttttgttggccaattgtctctaaactgctgtcaaaaaaaggaatggatcagattgtcttgaatagggcagagctaacctgtaatcacctgtgtgatgagaaacagctttgactgcattttactcctgacctggcctaagctttctgtttacataagatttttcaagaattcaacttcaagtagcagccgagagagctgcctcaggattctctcaaaaactgggaataatatgggaacatttgtttcttctaaaaataaggcaaatgttacattgaatgatttggggggtgaggtttaattggaaatggtctctggggactgaaaactgatgtttttgcagattacctcagggaaacggaggtttgttgagtttacagacacattaaaccaaaggccgtgggaaaacccctctccagctccaggggattggtcaggaccacccactaaccagtgccttccttcttaacattcacttttagcagcttgtgtttattttacatgggcagttttgatgggaaattgccatgaccacaggggtttggagttctgctttttttttttcttcttctttttcgggggactgggggactcctcccaagatcacattttagcatctttctctcctactccatttagaaaaataagtaacaggtgaaatgtggtctcagtgttaacgggataattctgctaccggctcctccctgatgattctgaaatacactactgaacgagctctggctggtcctttctatcctggatgtggttcttctgtgtagcaattccttgatgtccagtttggaaagatgtactcttctcaacaagaaaaacttaaatccgtcgtgcccaaatatagttgtgcttttatttcc

SEQ ID NO: 144766 - DNA, 660 bp, Artificial Sequence
  derived and/or modified sequence
atggcctctgcaggtgacacccaggccggaccgcgggatgctgctgaccagaatttcgattatatgtttaagctgctgctcattgggaacagttccgtcgggaaaacttccttccttttcaggtacgccgacgactccttcacccccgcctttgtgtccacggttggaatcgattttaaggttaaaacagtttaccgccacgacaagagaataaagttacagatttgggacaccgccgggcaggagcgctatcggactatcaccaccgcctattatagaggtgcaatgggcttcctgctcatgtacgatattgcaaatcaggaaagcttcgccgctgtgcaggattgggccacccagattaagacatatagttgggataatgctcaggtcatcctcgtggggaacaagtgtgacctggaggacgagcgggttgtgcctgctgaggacggccggcggctggcagacgacctgggttttgagttcttcgaagctagcgccaaagagaacattaacgttaagcaagtatttgaaagactagtggatgtgatttgtgagaagatgaacgagtcgctggagccaagttcctcatccggtagcaatgggaagggccccgctgtcggggatgcccctgctcctcaaccatcttcatgcagctgctag

SEQ ID NO: 144767 - DNA, 660 bp, Artificial Sequence
  derived and/or modified sequence
atggccagcgctggggacacccaggccggccccagagatgctgctgaccagaactttgactacatgttcaagctgctgctgattggcaacagctctgtgggcaagaccagcttcctgttccgctatgcagatgacagcttcaccccagcctttgtgtccacagtgggcatcgacttcaaggtgaagacagtgtacagacatgacaagaggatcaagctgcagatctgggacacagctggccaggagcgctaccgcaccatcaccacagcctactacagaggagccatgggcttcctgctgatgtatgacatcgccaaccaggagagctttgctgctgtgcaggactgggccacccagatcaagacctacagctgggacaatgcccaggtgatcctggtgggcaacaagtgtgacctggaggatgagcgggtggtgcctgcagaagatggaagaaggctggctgatgacctgggctttgagttctttgaggccagcgccaaggagaacatcaacgtgaagcaggtgtttgagcggctggtggatgtgatctgtgagaagatgaatgaaagcctggagcccagcagcagcagcggcagcaatggcaagggccctgctgtgggagatgccccagccccccagcccagcagctgcagctgctag

SEQ ID NO: 144768 - DNA, 660 bp, Artificial Sequence
  derived and/or modified sequence
atggccagcgccggcgacacccaggccggcccccgggacgccgccgaccagaactttgactatatgttcaagctgttgctcataggaaatagtagcgtgggcaagaccagctttctgtttaggtacgctgatgattctttcacacctgcattcgtcagcaccgtcggtattgactttaaggtgaagacagtctatcgtcacgacaaacggattaagctgcagatatgggacaccgccggtcaggaacgatacaggactattactaccgcctactataggggagcgatgggttttctgctcatgtacgacattgcaaaccaggagtcctttgcagccgtgcaggactgggctactcagataaagacctattcctgggataacgcccaggttatacttgtggggaataagtgtgatttagaagacgagcgcgttgtgccagccgaagacggtcgccggttggcagatgatctcgggttcgagttcttcgaagcatcagccaaggaaaacataaatgtgaagcaagtgtttgagagattagtggacgtgatctgtgagaagatgaatgagtcgctcgaaccctcaagtagctccgggagcaacggcaaaggacccgcggttggcgatgcgcccgccccacagcccagctcttgtagttgctag

SEQ ID NO: 144769 - DNA, 660 bp, Artificial Sequence
  derived and/or modified sequence
atggcgtcggctggtgacacacaggcaggcccaagagacgcagcggaccaaaattttgattacatgttcaaactcctgttaattggcaatagtagtgtcgggaaaacatctttccttttcaggtatgctgacgactcgttcactccagccttcgtctctaccgtaggaatcgacttcaaagtgaaaacagtgtacagacacgataagcgaatcaaactgcagatttgggacaccgccggacaggaacgttaccgcactataactaccgcctattaccggggagctatggggtttctgctgatgtacgacatcgccaaccaagaaagtttcgctgctgtgcaggactgggctacgcagataaagacttacagctgggataatgcccaggtcatcctagtcggaaacaagtgcgatctagaagacgaacgtgtcgtgccagcagaagacggcagacgtctggcagatgacttgggtttcgaatttttcgaagccagcgcaaaggagaacatcaacgtgaaacaggtcttcgagcgactggtcgacgtgatatgtgaaaagatgaacgagtccctggagccgagttcatccagtggcagtaatggaaagggacctgccgtgggggatgcacccgcaccccagccctcttcctgctcctgctag

SEQ ID NO: 144770 - DNA, 660 bp, Artificial Sequence
  derived and/or modified sequence
atggccagcgccggcgacacccaggccggccccagagacgccgccgaccagaacttcgactacatgttcaagctgctgctgatcggcaacagcagcgtgggcaagaccagcttcctgttcagatacgccgacgacagcttcacccccgccttcgtgagcaccgtgggcatcgacttcaaggtgaagaccgtgtacagacacgacaagagaatcaagctgcagatctgggacaccgccggccaggagagatacagaaccatcaccaccgcctactacagaggcgccatgggcttcctgctgatgtacgacatcgccaaccaggagagcttcgccgccgtgcaggactgggccacccagatcaagacctacagctgggacaacgcccaggtgatcctggtgggcaacaagtgcgacctggaggacgagagagtggtgcccgccgaggacggcagaagactggccgacgacctgggcttcgagttcttcgaggccagcgccaaggagaacatcaacgtgaagcaggtgttcgagagactggtggacgtgatctgcgagaagatgaacgagagcctggagcccagcagcagcagcggcagcaacggcaagggccccgccgtgggcgacgcccccgccccccagcccagcagctgcagctgctag

SEQ ID NO: 144771 - protein, 669 aa, Artificial Sequence
  derived and/or modified sequence
MATERSRSAMDSPVPASMFAPEPSSPGAARAAAAAARLHGGFDSDCSEDGEALNGEPELDLTSKLVLVSPTSEQYDSLLRQMWERMDEGCGETIYVIGQGSDGTEYGLSEADMEASYATVKSMAEQIEADVILLRERQEAGGRVRDYLVRKRVGDNDFLEVRVAVVGNVDAGKSTLLGVLTHGELDNGRGFARQKLFRHKHEIESGRTSSVGNDILGFDSEGNVVNKPDSHGGSLEWTKICEKSTKVITFIDLAGHEKYLKTTVFGMTGHLPDFCMLMVGSNAGIVGMTKEHLGLALALNVPVFVVVTKIDMCPANILQETLKLLQRLLKSPGCRKIPVLVQSKDDVIVTASNFSSERMCPIFQISNVTGENLDLLKMFLNLLSPRTSYREEEPAEFQIDDTYSVPGVGTVVSGTTLRGLIKLNDTLLLGPDPLGNFLSIAVKSIHRKRMPVKEVRGGQTASFALKKIKRSSIRKGMVMVSPRLNPQASWEFEAEILVLHHPTTISPRYQAMVHCGSIRQTATILSMDKDCLRTGDKATVHFRFIKTPEYLHIDQRLVFREGRTKAVGTITKLLQTTNNSPMNSKPQQIKMQSTKKGPLTKRDEGGPSGGPAVGAPPPGDEASSVGAGQPAASSNLQPQPKPSSGGRRRGGQRHKVKSQGACVTPASGC

SEQ ID NO: 144772 - DNA, 2010 bp, Artificial Sequence
  derived and/or modified sequence
atggctaccgaacgcagccggtctgccatggacagtcctgtgccggcatctatgttcgcccccgaaccatcctctcccggggctgctagagcggccgccgcagcagcaaggctgcacggagggttcgacagcgactgttctgaggacggggaggcgctaaacggcgaacccgagcttgatctgacctccaaactagtattggtctcccctacgagcgaacaatacgatagccttctacgccagatgtgggaaagaatggatgaggggtgcggggagacgatctacgtgatagggcagggttcagacgggactgaatacggactttcggaggcggacatggaagcatcttacgctacggtcaagtctatggcagagcagattgaggccgacgtgattctcctgagggagcggcaagaggctggggggagagttagggactatttggttaggaaaagagtgggggataatgactttttggaggttcgggttgctgtggtgggcaacgtggatgccggcaaatcaaccctgcttggggtcctcacccatggagagctcgataacgggcgaggatttgcacgacagaaacttttccggcacaagcacgagatcgaatctggccgcacctcgtctgtcggtaacgatatcctaggttttgatagcgagggcaacgtcgtgaacaagccagacagccatggcggatctctcgagtggacaaaaatatgtgaaaagagcaccaaggtgattactttcatcgacttagcgggccacgagaagtatctaaagactacggtgtttggtatgactggacacctgcccgacttctgtatgcttatggtgggtagcaacgcgggaatcgtgggtatgacaaaggagcacctcgggctggctctggcgctgaatgtccctgtttttgtcgttgtgactaagatcgacatgtgccccgctaacattttgcaagaaacactgaaactcctgcagaggctgctcaaatcacctgggtgtaggaaaatcccagtgctggtgcagagcaaagacgacgttatcgtcactgcatctaacttttcatcagagaggatgtgccccattttccagatcagcaacgttacgggcgaaaatctagatctgctgaagatgttcctcaatcttctgtcaccccgaacttcatatcgggaggaagaacccgccgaatttcagattgacgatacgtactctgtcccaggcgttggtacagtcgtgtctggaacaaccctgcgcgggttaatcaaactcaacgacaccctccttctcgggccagaccctttgggaaacttcctcagtatcgccgtgaaaagtatccacagaaaaagaatgcccgtgaaagaagtcaggggcgggcagaccgcctcctttgcccttaaaaaaattaaaagatcttctatccggaagggaatggtgatggtctcaccccgcctaaatccccaggcgtcttgggaatttgaggcagagattctggttctgcaccaccctaccacaatctcaccaaggtaccaggctatggttcactgcggtagcatccgtcagaccgcaactatcttgagtatggacaaggactgcctgagaacaggcgacaaggcaactgtgcattttaggttcattaagacgcccgaatacctgcatatcgaccaaaggctggtctttagggagggccggacaaaggccgtaggcacaatcaccaaactcctccagacgacaaacaattccccgatgaatagtaaaccacagcagataaaaatgcaaagtacgaagaagggccccctgaccaagcgggacgagggcggaccctccggaggcccagcggtcggggctccacctcccggcgatgaagcctctagtgtcggtgctgggcaaccagctgcttccagtaatctccagccccagccaaaaccatctagcggcggacgacgcagaggaggacaacggcacaaagtcaagtcgcagggtgcttgcgtaacaccagcttctggctgctag

SEQ ID NO: 144773 - DNA, 2010 bp, Artificial Sequence
  derived and/or modified sequence
atggccacagagaggagccgcagcgccatggacagccctgtgcctgcctccatgtttgcccctgagcccagcagccctggggccgcccgggctgctgctgctgctgcccggctgcatggaggctttgacagcgactgcagtgaagatggagaggccctgaatggagagcctgagctggacctgaccagcaagctggtgctggtgagccccaccagcgagcagtatgacagcctgctgcggcagatgtgggagaggatggatgagggctgtggggagaccatctacgtgattggccagggcagtgatggaacagaatatggcctgtctgaggccgacatggaggccagctatgccaccgtgaagtccatggccgagcagattgaagcagatgtgatcctgctgcgggagcggcaggaggccggcggccgggtgcgggactacctggtgaggaagagggtgggggacaatgacttcctggaggtgcgggtggccgtggtgggcaatgtggatgctgggaagagcaccctgctgggcgtgctgacccacggggagctggacaatggccggggctttgcccggcagaagctgttccgccacaagcatgaaattgaaagtggccgcaccagctctgtgggcaatgacatcctgggctttgacagcgagggcaatgtggtgaacaagccagacagccatggaggcagcctggagtggaccaagatctgtgagaagagcaccaaggtgatcaccttcatcgacctggccggccacgagaagtacctgaagaccaccgtgtttggcatgacaggccacctgcctgacttctgcatgctgatggtgggcagcaatgccggcatcgtgggcatgaccaaggagcacctgggcctggccctggccctgaatgtgcctgtgtttgtggtggtgaccaagattgacatgtgcccagccaacatcctgcaggagaccctgaagctgctgcagaggctgctgaagagccctggctgcaggaagatccctgtgctggtgcagagcaaggatgatgtgattgtgacagccagcaacttcagcagcgagaggatgtgccccatcttccagatcagcaatgtgactggagagaacctggacctgctgaagatgttcctgaacctgctgagccccaggaccagctaccgggaggaggagcctgctgagttccagattgatgacacctacagcgtgcctggggtgggcaccgtggtgtctggcaccaccctgcggggcctcatcaagctgaatgacaccctgctgctgggccctgaccccctgggcaacttcctgagcattgctgtgaagagcatccacaggaagaggatgcctgtgaaggaggtgcggggcggccagacagccagctttgccctgaagaagatcaagaggagcagcatcaggaagggcatggtgatggtgagcccccggctgaacccccaggcctcctgggagtttgaggccgagatcctggtgctgcaccaccccaccaccatcagcccccgctaccaggccatggtgcactgcggcagcatccggcagacagccaccatcctgtccatggacaaggactgcctgaggactggagacaaggccaccgtgcacttccgcttcatcaagaccccagagtacctgcacatcgaccagaggctggtgttccgggagggccgcaccaaggctgtgggcaccatcaccaagctgctgcagaccaccaacaacagccccatgaacagcaagccccagcagatcaagatgcagagcaccaagaagggccccctgaccaagagagatgaaggaggccccagcggcggccctgctgtgggcgcccctcctcctggagatgaggccagctctgtgggcgccggccagcctgctgccagcagcaacctgcagccccagcccaagcccagcagcggcggcagaagaagaggaggccagaggcacaaggtgaagagccagggcgcctgtgtgaccccagccagcggctgctag

SEQ ID NO: 144774 - DNA, 2010 bp, Artificial Sequence
  derived and/or modified sequence
atggccaccgagcggagccggagcgccatggacagccccgtgcccgctagcatgtttgcacccgagccatcatcacccggcgccgccagggccgcggcggcagctgccagactgcatggcggctttgacagcgattgctcagaagatggcgaagccctaaatggcgaacccgaactcgatctcacgtcaaagttggtgctggtttctccaacttccgagcagtacgactcacttcttcgacagatgtgggaacggatggatgaaggatgtggcgaaacaatatatgtaattggacaggggtcagacgggactgaatatggcctctcagaggcagacatggaggcctcgtacgcaactgtgaagtcaatggccgagcagatcgaggcagacgttatcttactgagagaacgtcaggaagctggtgggagagtgcgagattatttggtgaggaagagggtgggggacaacgacttcttggaggtcagagtcgccgtcgtgggcaacgttgacgcaggtaaatcaactttgctaggggtcctcacccacggcgagctggataacggccggggcttcgcaaggcaaaagctgtttagacataaacatgagatcgaaagcggccggacttcatccgtcggcaacgacattcttggttttgactcagagggtaatgtggttaataagcctgactctcacggaggatcacttgaatggacaaaaatatgtgagaagtcaaccaaagtcatcaccttcatcgatctcgcaggccatgagaaatacctaaaaactaccgtatttgggatgaccgggcatcttcctgatttttgcatgctcatggtgggctctaacgctggaatcgttggtatgacaaaggagcacttgggtttggcactggcattgaatgtgcctgtgttcgttgtggtgactaagatagacatgtgcccagccaacatccttcaggaaactcttaaactcctgcagcgattacttaagtcgcccgggtgccgcaagataccggtacttgtgcagtccaaggacgatgttatcgttacagcgtccaacttcagcagtgagaggatgtgtcccatcttccagataagcaatgtgacgggcgaaaatctggatctgcttaaaatgtttttgaaccttttgagccctaggactagttacagggaagaagaaccggctgaatttcaaattgatgatacctacagtgtaccgggcgtggggaccgtggtgagtggtaccacattacgggggcttataaagctgaacgacaccctgctactggggccggaccctttagggaacttcttgtcaattgcagtcaaatcaattcatcggaaaagaatgcccgttaaggaagtacgcgggggacagactgcgagctttgctttaaagaaaataaaacgcagctctatcagaaagggaatggtaatggtcagtccaagactgaatcctcaggcatcatgggagtttgaagccgagatcctcgttttacaccatccgactaccatctccccccggtatcaggcaatggtgcactgcggctctatacgtcagacagctacgattctgtctatggataaggactgccttcggaccggggataaggctaccgtgcacttcagattcattaagacaccggagtatctccacattgatcagaggctggtcttcagggagggtcgtacgaaagccgtaggaaccattacgaaacttctccagactaccaacaattctcctatgaacagtaagcctcagcagattaagatgcagagtaccaagaagggcccactgacaaaacgagacgagggcggcccttcaggaggacctgctgtcggcgctccacctccaggggatgaagcctctagtgtcggtgctggtcaaccagccgcgagcagtaatcttcagccccagcctaaaccatcaagcggggggcgaaggagaggagggcaaagacacaaggtcaagtcccagggcgcctgtgtgacaccagcatcagggtgctag

SEQ ID NO: 144775 - DNA, 2010 bp, Artificial Sequence
  derived and/or modified sequence
atggcgaccgaacggagtcgatcggcaatggactcccctgtgcccgcttccatgttcgcaccagaaccaagctccccaggggctgctagggctgccgcagcagccgctcgcttgcatggaggttttgacagcgactgcagcgaagatggggaggctctgaacggggaacccgagctggacttaactagcaagcttgtactggttagtcccaccagcgagcaatacgattccctattgcgccagatgtgggaacgcatggacgaagggtgcggggagactatctacgtgatcggacaagggtctgacgggactgaatatggactgtccgaggcagatatggaggcctcctatgcaaccgtaaaatccatggcagagcaaatcgaagctgatgtcatcctcctgcgcgaacgacaggaggctgggggacgggtgcgggattaccttgtcaggaaacgcgttggcgataatgacttcctcgaggtccgggtggccgtagtgggcaacgtggacgcaggaaaaagcactctgcttggtgtgctaactcacggggagcttgataacggcagaggcttcgccagacaaaagctgttccgccacaagcacgagatcgagtcaggccgtacatcctccgtgggaaatgatatcctgggcttcgactcggaaggaaacgtggtgaataaacctgattctcatgggggatccttggaatggacaaaaatttgtgagaagagtaccaaagtaatcacatttatcgacctggcaggccacgaaaaatatctgaagacaacggtgttcggcatgactggccatctgcccgatttctgcatgctgatggtgggttcaaatgccggtattgttgggatgaccaaggaacacttgggtcttgcactggctctcaatgtgccggtctttgtggtggtcacgaagatcgacatgtgtccagcaaacatacttcaggaaacacttaagctgctgcagcggctgttgaaaagcccagggtgcagaaaaatccctgtacttgtccaatccaaggacgatgtgatagtgacagccagcaatttcagttccgagagaatgtgccctatctttcaaattagcaatgtcactggggagaacctggatctcctgaagatgtttctgaacctcctgagtcctaggacaagctacagggaagaagaacctgccgaattccagatcgacgacacttactctgttcctggcgtggggaccgtggtatctggtaccactttacggggactaataaaactgaatgacaccctgctgctcgggccagatccccttggaaacttcctctccattgccgtcaagagtattcaccgcaaacgaatgcctgtgaaggaggtgcggggaggtcagactgcttcatttgcactcaaaaaaatcaagcggagctctattcgcaagggcatggtgatggtgtcaccccgactgaacccacaggctagctgggaatttgaagctgaaatcctggtgctgcatcatcccacaaccattagcccgagatatcaggccatggtccactgcggaagcatacgccaaaccgccaccatcctgtccatggacaaggattgccttagaaccggcgacaaggcaacagtacatttccgctttataaagaccccggagtacctgcacatagaccagaggcttgtctttagagaaggcaggaccaaagctgttggtacgatcacaaagctgctccaaacaacgaataacagtcctatgaatagcaagccacaacagataaagatgcagtctacgaagaaggggcctttgaccaagagagatgagggaggacctagtggaggaccggctgtgggcgctcccccaccaggagatgaagcctcctccgtcggcgctggacaaccagctgcttcctctaatctgcagcctcagcccaagccctcctctggtgggagacggaggggtgggcagcgacataaggtgaaatctcaaggagcgtgtgtgaccccagcctcaggctgttag

SEQ ID NO: 144776 - DNA, 2010 bp, Artificial Sequence
  derived and/or modified sequence
atggccaccgagagaagcagaagcgccatggacagccccgtgcccgccagcatgttcgcccccgagcccagcagccccggcgccgccagagccgccgccgccgccgccagactgcacggcggcttcgacagcgactgcagcgaggacggcgaggccctgaacggcgagcccgagctggacctgaccagcaagctggtgctggtgagccccaccagcgagcagtacgacagcctgctgagacagatgtgggagagaatggacgagggctgcggcgagaccatctacgtgatcggccagggcagcgacggcaccgagtacggcctgagcgaggccgacatggaggccagctacgccaccgtgaagagcatggccgagcagatcgaggccgacgtgatcctgctgagagagagacaggaggccggcggcagagtgagagactacctggtgagaaagagagtgggcgacaacgacttcctggaggtgagagtggccgtggtgggcaacgtggacgccggcaagagcaccctgctgggcgtgctgacccacggcgagctggacaacggcagaggcttcgccagacagaagctgttcagacacaagcacgagatcgagagcggcagaaccagcagcgtgggcaacgacatcctgggcttcgacagcgagggcaacgtggtgaacaagcccgacagccacggcggcagcctggagtggaccaagatctgcgagaagagcaccaaggtgatcaccttcatcgacctggccggccacgagaagtacctgaagaccaccgtgttcggcatgaccggccacctgcccgacttctgcatgctgatggtgggcagcaacgccggcatcgtgggcatgaccaaggagcacctgggcctggccctggccctgaacgtgcccgtgttcgtggtggtgaccaagatcgacatgtgccccgccaacatcctgcaggagaccctgaagctgctgcagagactgctgaagagccccggctgcagaaagatccccgtgctggtgcagagcaaggacgacgtgatcgtgaccgccagcaacttcagcagcgagagaatgtgccccatcttccagatcagcaacgtgaccggcgagaacctggacctgctgaagatgttcctgaacctgctgagccccagaaccagctacagagaggaggagcccgccgagttccagatcgacgacacctacagcgtgcccggcgtgggcaccgtggtgagcggcaccaccctgagaggcctgatcaagctgaacgacaccctgctgctgggccccgaccccctgggcaacttcctgagcatcgccgtgaagagcatccacagaaagagaatgcccgtgaaggaggtgagaggcggccagaccgccagcttcgccctgaagaagatcaagagaagcagcatcagaaagggcatggtgatggtgagccccagactgaacccccaggccagctgggagttcgaggccgagatcctggtgctgcaccaccccaccaccatcagccccagataccaggccatggtgcactgcggcagcatcagacagaccgccaccatcctgagcatggacaaggactgcctgagaaccggcgacaaggccaccgtgcacttcagattcatcaagacccccgagtacctgcacatcgaccagagactggtgttcagagagggcagaaccaaggccgtgggcaccatcaccaagctgctgcagaccaccaacaacagccccatgaacagcaagccccagcagatcaagatgcagagcaccaagaagggccccctgaccaagagagacgagggcggccccagcggcggccccgccgtgggcgcccccccccccggcgacgaggccagcagcgtgggcgccggccagcccgccgccagcagcaacctgcagccccagcccaagcccagcagcggcggcagaagaagaggcggccagagacacaaggtgaagagccagggcgcctgcgtgacccccgccagcggctgctag

SEQ ID NO: 144777 - DNA, 5126 bp, Artificial Sequence
  derived and/or modified sequence
ttgggatttgggcctcattaattattcattaggtacttgaaagctctgcagggattggtggctgagaggcctagtcgactgtttcttagctagaggtacgtgtcacccagtacgcggctggagttttgcataaattattccgataaggagcggggcggggctctgtgcatagattagtcaaatgagcctgggagggagggaagccggctacgaattagcctaagttattaaagatggcgacggagcgcagtcgctccgcgatggactcgccggtcccggcctctatgttcgcccccgagcccagctccccgggggcggccagggccgcggcggccgccgcccgactccacggcggctttgactcggactgcagcgaggacggcgaggcgctcaacggcgagccagagctggacctcaccagcaagctggttctagtgagccctacatcagagcagtatgacagcctacttcggcagatgtgggagaggatggacgagggatgcggagagaccatatatgtcattgggcagggatcagatgggactgagtatgggctgagtgaagctgacatggaggcctcctacgccacagtgaagagcatggcggaacagatagaggccgatgtcatccttctgcgggaacggcaagaagctgggggccgcgtgcgtgattacctggtccggaaacgagtaggagacaatgacttcctggaggtcagggtagcagtggtgggcaacgtggatgctggcaaaagcacgcttctgggggtcctgacacatggggagctggacaatggccgaggctttgcccgccagaaactcttccgccacaaacatgaaattgaatctggtcgcaccagcagtgtgggcaacgacattctgggctttgacagtgaaggcaatgtagtgaacaagcctgacagccacggcggcagcctggagtggaccaagatctgtgagaagtccacgaaagtcattaccttcatcgacttggctggtcatgagaagtacctgaaaaccactgtcttcggcatgacaggccatctgcctgacttctgcatgctcatggtgggcagcaatgctggcatcgtggggatgaccaaagaacacctgggcttggcactggcactcaatgtacctgtctttgtggtagtcaccaagattgacatgtgtcctgccaacatcctgcaagaaaccctgaagctgttacagcgcctgctgaagtcaccaggctgccggaagatccccgtgctggtgcagagcaaagatgatgtgattgtcacagcctccaacttcagctctgaaaggatgtgcccgatattccagatctccaacgttacaggcgagaacctagatctgctgaagatgttcctcaacctcctctccccccgcaccagctacagggaggaggagcctgctgagtttcagattgatgacacctactccgtcccgggtgtggggacagtggtttcggggacaacactgagaggcctgatcaagctgaatgacacgctgctgctgggcccagaccccttgggtaacttcctgtccattgctgtcaaatccatccatcgcaagcgcatgcctgtcaaggaggtgcggggtggccagacagcatcctttgcgctgaagaagatcaagcgctcgtccatccggaagggcatggtgatggtttccccacgtttgaatccccaagcctcctgggagtttgaggccgagattctcgtcctccaccaccccaccacaattagcccgcgctaccaggccatggtgcactgtgggagcatcaggcagacagccaccattctgagcatggacaaggactgtctgcgcactggggacaaggccactgtacacttccgcttcatcaagacccctgagtacctgcacatagaccagcggctggtgttccgggaaggccgcaccaaggctgtcggcaccatcaccaagctcctccagaccaccaacaactccccaatgaactccaagccgcagcagattaaaatgcagtcgacgaaaaagggccccctgacgaaacgagacgaggggggcccgtctggtgggccagcagtaggagcacccccacctggagatgaagcctcctctgtaggggcagggcaaccagctgcgtccagcaatctccagcctcagcctaagcccagcagtggaggccggcgacgagggggccagcgccacaaggtgaagtcccagggggcctgtgtgactcctgccagcggctgctgaaccttcccctggcccaccctcaccacccaaggggtcatcatctctggccaccactccaccagatgggcagagcagctatgaccgccacccagccctcccgctcaggccacagccggagcctccgcattgcccccacccccattttccaggggggttgtaatttataagctgacgaaggtagccagacttccggaggactgaccatctctcactgtcctccccaccttcttcctcactcacacattttttgtacatctgggcccttagtttttattctgtttattatatgtctctgtctctctctattgtgtgtgtgtgtgtgtgtgtgtgtgtgtgtgtgtgtgtggtgcaggagtgccacccccagggccctgtcaacctctcttttctcctccatggctgtctgcctgcgtatctgtctctgagaatcctcggggcggtcaggggatgtcaggaggggaaggagccgccctccctatcttgctgctcctcttggcactcaggggcaccttccatggagccagaccgggtggaggggcttctgggatttggtgtctgctgctgccagagcaggaacccccagtctaggacttgggcattttaacagggagaaagtagtggcttcccttttctctctctcctcctttttccctttaagcccacagattcaggtcatgccaaaagctctctggttgtaacctggagacatgtggaggggaatggcgatgggattataggactctccccatctcgggccctgaccctgacccttgccaccaacccaaagacagctggtgggtttccccttggagacaatcctgcgtttgcctgggccggccctggctgccctcagctttcgctgatctgcccggcctggagcctcccatcaccccgcttcttgttgggcctcaggcactggttaccagaagggggtctgggtctgctcaggatcatgttttgtagcacctcctgttggaggggtggagggatgttcccctgagccaggctgagactagaaccccatcttccctgagccaggctgagactagaaccccatcttccccaccacgccacccctgtggctgctacaggagcacagtagtgaaggcctgagctccaggtttgaaagacccaactggagcgtggggcgggcaggcaggggttagtgaaaggacacttccagggttaggacagagcatttagccttctggaagaacccctgcctggggtgggactgtgcaggccagagaaggtggcatgggcctgaacccacctggactgacttctgcactgaagccacagatggagggtaggctggtgggtgggggtggttcgttctctagccggggcagacacccagctggctgggtccttcctcagccttgcctcctcctgtccccaaccctttcctttcctcctgcttgcggactgctggtcccctctccttccctccttccagctgtttctagttaccacctacccctggccgtggactgatcagaccagcattcaaaataaaagtttgttccaagttgacagtgtggtgctccctgcccagcccctccaggtggaggtgctgccacgggaacgcagttgctctgcctgccctggggcccctggcgacagctgggagcagggcagtgctgtgaggagcccagctttcccagtcaggcaggcatggcttccgtgttcaggctccctcaccagctggtgacacgggacaagcttacaaaccttctctgaacctcagttttctcatttacaagaggcaaagccatccatcaccttgtgtggattcagagaatgtgaggccctggggtgtcctacacaagggaaaggcttgctcagtgagcggtctgcacaccgttagccaccctgccacctctgtgccctgggcaggctccaaaggaaagctctggctgggactgccaggagtctcacacgctcctgttgacattcccagcagccgcccctgaggtcgatgtttgttctgtttttctttttcttttttgagacggagtctcgctgtgttgccaggctggagtgcagtggtgtgatctctgctcactgcaacctccgcctgccagtttcaagtgattctctgcctcagccttctgagtagctgggactacaggtgcacgccaccacgcccagctaactttttgtattttagtagagacagggtttcgccatgtcggccagggtggtcttgatctcctgacctcatgatccacccgcctcagcctcccaaagtgctgggattacaggtatgagccaccgcaccgggcctgttctatttttctagttaagggaactgaagctcagagaggtgtcaccagcaggtgttcattcccatgccagccttgccccccggcttttcccaggcaggctcctgcgtgcccactggctccagcctggtcctctgtctcttggctgcttcactcctgctctttgtcccgactctggccctgcttacaggggccactacctgctggtgcctccataacaagcgtctggcgttgagacccctggcatggcaggggctttggggtctggtttccacaaggcttagccatggcagaacctcgttttattttaactctttgcccctacaaacaaacagcagtacttgccagaaccattcttgggattcaggagctcgggcgactgccttggcctctggccgcacccaggagggtggggttggatctgtgtagttgccaggcccacacctgccagcagggggctgactggatccatgctttactgtgtttaatgggggtaacaggggtccctacagccctcccagctaaacatttggaacaaaacaccagcccttttgtagtggatgcagaataaaattgttaatccaatcacctccaa

SEQ ID NO: 144778 - protein, 212 aa, Artificial Sequence
  derived and/or modified sequence
MDPLFQQTHKQVHEIQSCMGRLETADKQSVHIVENEIQASIDQIFSRLERLEILSSKEPPNKRQNARLRVDQLKYDVQHLQTALRNFQHRRHAREQQERQREELLSRTFTTNDSDTTIPMDESLQFNSSLQKVHNGMDDLILDGHNILDGLRTQRLTLKGTQKKILDIANMLGLSNTVMRLIEKRAFQDKYFMIGGMLLTCVVMFLVVQYLT

SEQ ID NO: 144779 - DNA, 639 bp, Artificial Sequence
  derived and/or modified sequence
atggatccactgttccagcagactcacaagcaggtgcacgaaatccagtcttgcatggggagactggaaacagcagataaacagtctgtacacattgtggagaatgagatccaagcctcaatcgatcagatctttagccggctagagcgtctcgagatcctgtcatcaaaggaacccccaaacaaacggcagaacgctcggctgcgagttgaccagctgaagtatgacgtgcaacatctgcaaactgccctccgtaactttcagcatcgacgccacgcgcgcgaacagcaggagagacagcgtgaagagttgctgtctcggacctttactactaatgatagcgatacaacaatacccatggacgagtccttacagttcaacagttctttgcagaaggtacataatggtatggacgatcttattctggacggacataatatcctggacgggctgagaacccagcggctgacactgaaaggtactcagaagaagatcctggatatcgcgaacatgttaggcctgagcaatactgtaatgaggctgatcgagaaaagagcgttccaggacaagtactttatgataggcggcatgttgctgacttgtgtagttatgtttctggtggtacagtacctcacgtag

SEQ ID NO: 144780 - DNA, 3319 bp, Artificial Sequence
  derived and/or modified sequence
aaccggaaggggggctgtgaggacgtgttccgaggaagccagagccggagccgtggcctgcggggccggcgacatggatcccctgttccagcaaacgcacaagcaggtccacgagatccagtcttgcatgggacgcctggagacggcagacaagcagtctgtgcacatagtagaaaacgaaatccaagcaagcatagaccagatattcagccgtctagaacgtctggagattttgtccagcaaggagccccctaacaaaaggcaaaatgccagacttcgggttgaccagttaaagtatgatgtccagcacctgcagactgcgctcagaaacttccagcatcggcgccatgcaagggagcagcaggagagacagcgagaagagcttctgtctcgaaccttcaccactaacgactctgacaccaccataccaatggacgaatcactgcagtttaactcctccctccagaaagttcacaacggcatggatgacctcattttagatgggcacaatattttagatggactgaggacccagagactgaccttgaaggggactcagaagaagatccttgacattgccaacatgctgggcttgtccaacacagtgatgcggctcatcgagaagcgggctttccaggacaagtactttatgataggtgggatgctgctgacctgtgtggtcatgttcctcgtggtgcagtacctgacatgagccagccacgctcagtggctgaacagcattcccacagcctgcaagtgtgtgtgtgtgtgaaagagagaggggggcccagaggccgccttttgaaatgtttgcctgtctgaactgtgaagacacttgggagtgattgtggtctaatttccaacctgctctgttttctgtgacatcttggagggggagctagtgccaccaccatgcgcggtgcttaggaaatgaaagaagtcccgggtctgtctctctcactctcgctctcactgggggagggaaagaatggctttggtggctttgttcacatagctgatgcgtgccctgggaaggtgtccacagtgagccctgtgtgcaggactgtccacacggttcacaccttgtcaccatcaggcctttctggctcctgatagggtggagcaaaagtggaaaggaaaggaaagaggccttttctcacagccattatattaaatagtaggtcgattcacatcctcgtgctcctggccaccctcccctgtgcctcagtgacatgtagatgactgactgccaatacttgtcaccattccctggaagcagctacctaggggaaacaagatgtagtgctattgccgataacaagtaagattttccacactacagctgggtgtttctcttttctaaagtgaggccagtgttatttcccgggagtgttcagtcttgaccctagtcactgattttttctagttgttaatagagtggttggcttttaaggttcagagactgtggcttggcacctgcgcccaggctttgtgggcctttgccccttagaaagtagctgtaggcaaagatttgtgattttccaattacagtctcagctctagttttagtatctctaattctttggttcccttctcttccctgaaatatattagcacctgccagccaggccctcattttgcccagccagtgtgggcagatcccaccgtggagacatctgtagtgtgtatgtccttgtaacactctgttttcagggactacaacctttttccttctgtgaccagccccggattcaggctgtactaataccaggtatattgtggaatttagtataaaggccaatctgtcctgaagtccatctaatgtggtgaatcactgaaagtctcagaaagacctggttagtgtatgttctcatttaccacaggcctaccagccctgggcacagcagcttcatggcaagacataaaatgacactcaaaatccttcagatctggaaaccggctcagtattaaccctacctttggttgtcctgccctacctgctctgttagtttcttgttgcttgaactgtcttctgtcttatttcccttcctttctgtgttcctcttcacctctcttgttcccctccccgctgctctgtagtcatgttggtcctttcaggcacctctgtggcatagctcccctttggtaagttttcttaattgtcatagattaactgagtttcctggatgctaatttcacactttcggttggaggagatctccattgttcctacccctccgggccaaatgggccccaggtttccaaggaaggagcaatctgtgactcctaaaatgggttggggccctgccagagttaaagcagtgactggagggtggactggggggttgcagcatctttagacctagatctgtctaactctggggaggcacattgacatttccattacacacagcactgctgcggtgccagggacctagcgcaggacttttggtaatccataaaatggattctgagactgcgacggcaaggctgtcctgtcccccaggcacccaaggatcctgccagacagcacactttggaggaaggtctgcagggagcagctgagccatttgttcttgaactctgggaggcagaagtccccgcacccatcatgcgtggactgataggacatcttttcgtggtgtgcaccagtgctttccacacttgacagtggttggctttgatgaaccctcatgctgcaccttcagagccagtcctctagtttggaataaaaattgcagaggtggtttttgggtctttaccacctgcggctggtggacagcagccagtgtgtctggacacccaggggcattgagactgcatgttgtcacatgaccacttctcttcacacatctgctttcagtgcctggtgaaaaatagaccttggcctaacagtgtgactctctccaccgcctcagtgtagggaagggtccaggccagggaaggagcaccctctagtggaggcgggggtgaattcttaggtcgagctgatgcaagaaactccggtagccagcctctgtgaccttgtacatgagtttggtgtgcctattgtgatttaaaacaggtgggttatcaagaggaacttgagatctctttattacatggacatttacttcagggggaccactgtaagaaaagccaaactccaagaccaagtaagttagaggagtcttgattttttagacttcactgcggagttctgtacaccctttgccctgatgaatttgaatgggtttgatttgcaaatttggatttacacccattgttttggaagcacatcagctgaataaagttgaggtttattttatttagaaaatca

SEQ ID NO: 144781 - DNA, 639 bp, Artificial Sequence
  derived and/or modified sequence
atggaccccctcttccagcagacccacaagcaggtgcatgagatccagagctgcatgggccgcctggagacagctgacaagcagagcgtgcacatcgtggagaatgagatccaggccagcattgaccagatcttcagccggctggagcggctggagatcctgagcagcaaggagccccccaacaagaggcagaatgcccggctgcgggtggaccagctgaagtatgatgtgcagcacctgcagacagccctgaggaacttccagcacagaagacatgcccgggagcagcaggagcggcagcgggaggagctgctgagcaggaccttcaccaccaatgacagcgacaccaccatccccatggatgagagcctgcagttcaacagcagcctgcagaaggtgcacaacggcatggatgacctgatcctggatggccacaacatcctggatggcctgcggacccagaggctgaccctgaagggcacccagaagaagatcctggacatcgccaacatgctgggcctgagcaacacagtgatgaggctcatcgagaagagggccttccaggacaagtacttcatgattggaggcatgctgctgacctgtgtggtgatgttcctggtggtgcagtacctgacctag

SEQ ID NO: 144782 - DNA, 639 bp, Artificial Sequence
  derived and/or modified sequence
atggaccccctgttccagcagacccacaagcaggtgcacgagatccagtcatgcatggggagattggagaccgcggacaagcaaagcgtccacatcgtcgagaacgagatacaggcttcaatagaccaaatattctccagactggaacgactggagatcctgagtagcaaggaacctcccaataaacggcaaaacgctaggctaagagttgatcagctgaaatatgatgtccagcatctgcagacagctctgagaaatttccaacatagacgtcatgcacgtgagcagcaggagagacaaagggaagagctgctttcacgtaccttcacaaccaatgattccgacaccaccatccccatggatgaaagcctgcagtttaattctagtcttcagaaggtgcacaatggaatggatgacctgatcctggacggacataacattctcgacgggcttagaacacagaggctcaccctgaagggaacacaaaagaaaattctggacatagctaatatgctggggttaagtaataccgtgatgcgtttgatcgagaaacgggcattccaggacaaatattttatgattggcggtatgttactaacatgcgtagtcatgtttctggtggtgcagtatttaacttag

SEQ ID NO: 144783 - DNA, 639 bp, Artificial Sequence
  derived and/or modified sequence
atggaccccctgtttcagcagacacacaaacaagtgcacgagattcagtcctgcatgggtaggctggagactgctgataagcaatctgtgcacattgtggaaaatgaaattcaagctagcattgatcaaattttcagtcggctcgaaaggttggaaatacttagcagcaaggaaccacctaataaacgacaaaacgctcgtttgagagtcgaccagttgaagtacgacgttcagcatcttcagactgctctgcgtaacttccagcaccggagacatgctagagaacaacaggaacgacaacgtgaggaattgctgagcagaacctttacaacgaacgatagtgataccaccatccccatggacgaatctcttcagtttaattccagcctacaaaaagttcacaacgggatggatgacttaatattagacggccataacattttggacggcctgagaacgcagcgcttaacccttaagggtacccaaaagaaaatcctggacatcgcaaatatgctgggcctgtctaataccgtgatgagactcattgaaaagagagctttccaggataaatactttatgattggcggaatgctcctcacctgtgtggttatgtttctggtcgttcaatatttgacttag

SEQ ID NO: 144784 - DNA, 639 bp, Artificial Sequence
  derived and/or modified sequence
atggaccccctgttccagcagacccacaagcaggtgcacgagatccagagctgcatgggcagactggagaccgccgacaagcagagcgtgcacatcgtggagaacgagatccaggccagcatcgaccagatcttcagcagactggagagactggagatcctgagcagcaaggagccccccaacaagagacagaacgccagactgagagtggaccagctgaagtacgacgtgcagcacctgcagaccgccctgagaaacttccagcacagaagacacgccagagagcagcaggagagacagagagaggagctgctgagcagaaccttcaccaccaacgacagcgacaccaccatccccatggacgagagcctgcagttcaacagcagcctgcagaaggtgcacaacggcatggacgacctgatcctggacggccacaacatcctggacggcctgagaacccagagactgaccctgaagggcacccagaagaagatcctggacatcgccaacatgctgggcctgagcaacaccgtgatgagactgatcgagaagagagccttccaggacaagtacttcatgatcggcggcatgctgctgacctgcgtggtgatgttcctggtggtgcagtacctgacctag

SEQ ID NO: 144785 - protein, 359 aa, Artificial Sequence
  derived and/or modified sequence
MSLQRLLQHSSNGNLADFCAGPAYSSYSTLTGSLTMDDNRRIQMLADTVATLPRGRKQLALTRSSSLSDFSWSQRKLVTVEKQDNETFGFEIQSYRPQNQNACSSEMFTLICKIQEDSPAHCAGLQAGDVLANINGVSTEGFTYKQVVDLIRSSGNLLTIETLNGTMILKRTELEAKLQVLKQTLKQKWVEYRSLQLQEHRLLHGDAANCPSLENMDLDELSLFGPLPGPGPALVDRNRLSSESSCKSWLSSMTMDSEDGYQTCVSEDSSRGAFSRQTSTDDECFIPKEGDDFLRRSSSRRNRSISNTSSGSMSPLWEGNLSSMFGTLPRKSRKGSVRKQLLKFIPGLHRAVEEEESRF

SEQ ID NO: 144786 - protein, 253 aa, Artificial Sequence
  derived and/or modified sequence
MFTLICKIQEDSPAHCAGLQAGDVLANINGVSTEGFTYKQVVDLIRSSGNLLTIETLNGTMILKRTELEAKLQVLKQTLKQKWVEYRSLQLQEHRLLHGDAANCPSLENMDLDELSLFGPLPGPGPALVDRNRLSSESSCKSWLSSMTMDSEDGYQTCVSEDSSRGAFSRQTSTDDECFIPKEGDDFLRRSSSRRNRSISNTSSGSMSPLWEGNLSSMFGTLPRKSRKGSVRKQLLKFIPGLHRAVEEEESRF

SEQ ID NO: 144787 - DNA, 1080 bp, Artificial Sequence
  derived and/or modified sequence
atgtcattacagcggctgctgcagcattcctccaatggaaaccttgccgatttttgcgcggggccagcttacagttcttatagcacactgacagggagcctcaccatggatgataacaggcgcatccagatgctcgcagacacagtggccacactaccaagaggccgtaagcaacttgctctgactcgcagctcatccctgagtgacttctcgtggagccagcgcaaactggtgactgtggaaaagcaggacaacgaaacattcgggtttgagatacagagttacagaccccaaaaccagaacgcttgcagctcagagatgttcacactcatctgtaagatccaggaagatagccctgctcattgtgccggactgcaggccggagacgttcttgctaatatcaacggggtctcaaccgaaggtttcacatacaagcaagtggtggatcttattcgcagtagcggcaatttactcacaattgagacattgaatggcacgatgatacttaaaaggacggaactggaagcaaagttgcaggtgttgaaacagaccctgaagcagaagtgggtggaataccgctccctccagcttcaggagcaccggctactgcacggcgacgccgccaactgcccaagcttagagaacatggacctagacgagttatccttgtttggccctttgcctggacctggcccagctttagtcgataggaaccgcctgtccagcgagagcagttgcaagtcttggttaagctctatgaccatggattcagaggacggatatcaaacctgcgttagcgaagactcaagtagaggcgccttctctcgtcaaacaagcaccgatgacgagtgctttatccccaaggaaggcgatgattttctgcgccgaagcagcagcaggcggaaccggagcattagtaacacgagttcagggtcaatgagccccctgtgggaagggaacctgagttcaatgttcggcaccctgccgagaaaatctcgaaaggggtccgtgagaaagcaattgttaaagtttattcccggcctccaccgcgcggtggaggaggaggaatcccgattctag

SEQ ID NO: 144788 - DNA, 762 bp, Artificial Sequence
  derived and/or modified sequence
atgttcaccctgatctgcaagattcaggaagatagtcctgcacattgtgccggactccaagcgggagatgtattggctaatatcaatggggtcagcaccgaagggtttacatacaagcaagtggttgatttgattcgcagcagcgggaacttgctgaccatcgaaactttaaacggcacgatgatactaaagcgcaccgaattggaagcaaagttacaggtactgaaacagacccttaagcagaagtgggtggagtacagatcactccagctacaggagcatcggctgttacatggcgacgcagcgaactgccctagtctggaaaacatggatctcgatgaattgtctctctttggtcctctgcccgggccgggtcccgccttggtagatagaaatcgcttgtctagcgagtcctcctgcaagtcatggctctccagcatgactatggatagcgaggacggttatcagacctgcgtgagcgaagactcaagccggggtgcctttagcagacagacttccactgatgatgagtgttttattccaaaggagggggacgactttctaagacgctcgtcaagtcgtcggaatcggtctattagcaatactagtagtggaagcatgagccccctgtgggaaggaaacctgagttctatgttcggcacccttccacgaaaaagccgtaagggatccgtgaggaagcagctcctgaaatttataccgggcttacatcgggctgtggaggaggaggagagccgattttag

SEQ ID NO: 144789 - DNA, 1080 bp, Artificial Sequence
  derived and/or modified sequence
atgagcctgcagaggctgctgcagcacagcagcaatggaaacctggccgacttctgtgccggccctgcctacagcagctacagcaccctgaccggcagcctgaccatggatgacaacagacgcatccagatgctggccgacacagtggccaccctgccccggggcaggaagcagctggccctgaccaggagcagcagcctgagtgacttctcctggagccagaggaagctggtgacagtggagaagcaggacaatgagaccttcggctttgagatccagagctaccggccccagaaccagaatgcctgcagcagcgagatgttcaccctcatctgcaagatccaggaggacagccctgcccactgtgccggcctgcaggccggagatgtgctggccaacatcaatggagtgtccacagagggcttcacctacaagcaggtggtggacctgatccgcagcagcggcaacctgctgaccatcgagaccctgaatggcaccatgatcctgaagaggacagagctggaggccaagctgcaggtgctgaagcagaccctgaagcagaagtgggtggagtaccgcagcctgcagctgcaggagcaccggctgctgcatggagatgctgccaactgccccagcctggagaacatggacctggatgagctgagcctgtttggccccctgcccggccctggccctgccctggtggacaggaaccggctgagcagcgagagcagctgcaagtcctggctgagctccatgaccatggattctgaagatggctaccagacctgtgtgtctgaggacagcagcagaggagccttcagccggcagaccagcacagatgatgagtgcttcatccccaaggagggagatgacttcctgcggcgcagcagcagcagaagaaacagaagcatcagcaacaccagcagcggctccatgagccccctgtgggagggcaacctgagctccatgtttggcaccctgcccaggaagagcaggaagggctctgtgaggaagcagctgctgaagttcatccctggcctgcacagagctgtggaggaggaggagagccgcttctag

SEQ ID NO: 144790 - DNA, 762 bp, Artificial Sequence
  derived and/or modified sequence
atgttcaccctcatctgcaagatccaggaggacagccctgcccactgtgccggcctgcaggccggagatgtgctggccaacatcaatggagtgtccacagagggcttcacctacaagcaggtggtggacctgatccgcagcagcggcaacctgctgaccatcgagaccctgaatggcaccatgatcctgaagaggacagagctggaggccaagctgcaggtgctgaagcagaccctgaagcagaagtgggtggagtaccgcagcctgcagctgcaggagcaccggctgctgcatggagatgctgccaactgccccagcctggagaacatggacctggatgagctgagcctgtttggccccctgcccggccctggccctgccctggtggacaggaaccggctgagcagcgagagcagctgcaagtcctggctgagctccatgaccatggattctgaagatggctaccagacctgtgtgtctgaggacagcagcagaggagccttcagccggcagaccagcacagatgatgagtgcttcatccccaaggagggagatgacttcctgcggcgcagcagcagcagaagaaacagaagcatcagcaacaccagcagcggctccatgagccccctgtgggagggcaacctgagctccatgtttggcaccctgcccaggaagagcaggaagggctctgtgaggaagcagctgctgaagttcatccctggcctgcacagagctgtggaggaggaggagagccgcttctag

SEQ ID NO: 144791 - DNA, 1080 bp, Artificial Sequence
  derived and/or modified sequence
atgagcctgcagcggctgctgcagcacagcagcaacggcaacctggcagatttttgcgcgggcccggcctattcatcatactccaccttaacaggatccctcacaatggacgacaatcggaggatccagatgttggccgatactgtggccacgttgcctaggggcagaaaacagttggcgctgacccggagctcttcactgagtgatttttcctggagtcagagaaagctcgtaaccgtcgagaaacaggataacgaaaccttcggtttcgaaatacagtcctatagaccgcagaatcagaatgcttgctcttcagagatgttcactcttatttgcaagattcaggaggactctccagctcactgcgcaggcttgcaggccggcgatgtgttggccaacataaatggagtgtccacagaaggttttacctacaaacaggtggtggatctcattcggtcttccggcaacctcctcaccattgagacactgaatgggacaatgatactcaaacggacggagctggaggccaagctgcaggtcttgaagcagactctgaagcagaagtgggtggaatatcggtcattgcagctgcaagagcaccggctgctccacggtgatgccgcaaattgcccttcactggaaaacatggaccttgatgaactgtcactgttcgggcctctgcctgggccaggacctgctctggttgatcgcaacagactgtccagtgagtctagctgtaaaagctggcttagcagtatgacaatggattcagaagatgggtatcagacctgcgtgtcggaagactcttcgcgcggcgcattttccaggcaaacttcaactgacgacgagtgctttatacccaaagaaggcgacgactttctcaggcgctcttcctctagaagaaacaggtctatctccaataccagtagtgggtcgatgtccccactgtgggagggaaatctcagttctatgttcgggaccctccctcgaaagagccgtaagggcagcgttcggaagcagctcttgaagtttatccctggcctgcacagagcggtggaagaagaggagtcccgcttttag

SEQ ID NO: 144792 - DNA, 762 bp, Artificial Sequence
  derived and/or modified sequence
atgttcaccctgatctgcaagatccaggaggacagccccgcccactgtgccgggctgcaggcaggggacgttctggctaacatcaacggagtaagtactgagggtttcacatacaagcaagttgtggacctgattaggtcaagcggcaatctcctaactattgaaaccctgaatggaacaatgatcctgaaaagaaccgagcttgaagccaaactacaggtcttaaagcagacactgaagcagaagtgggtcgaatatcgttctctacagttgcaggagcacaggctgctgcatggcgacgctgcaaactgtccgtccctcgagaacatggaccttgacgaactgtcacttttcgggccgctgccaggccccggacctgcccttgtggataggaataggttgtcctccgagagttcctgcaagtcatggctgtcatcaatgactatggattccgaggatgggtaccagacgtgtgtgagtgaggattcttcccgcggcgccttttctcggcagacctccaccgacgatgagtgtttcatccctaaagaaggtgatgacttcttacgccgctctagtagccgcagaaaccgctctattagcaatacttcctctggttccatgagccctctctgggaaggcaacttgtcctcaatgttcgggaccttacccaggaaatcacgcaagggaagcgtacgaaaacagttgctcaaatttatcccgggcctgcatagagccgtggaggaggaagaatctagattctag

SEQ ID NO: 144793 - DNA, 1080 bp, Artificial Sequence
  derived and/or modified sequence
atgtccctgcaacgcctccttcagcacagtagcaatggcaatcttgctgatttttgcgcaggacccgcttactcatcatacagcactctgacaggatcactcacgatggatgacaacaggcggattcagatgctcgctgacactgtggctaccttgccaagaggaaggaagcaactcgctttgactaggtcttcctccttaagcgatttctcctggtctcagcggaaactcgtcacggtggagaagcaggacaatgaaacattcggctttgagatacagagttaccgaccacaaaaccagaacgcttgcagctctgagatgttcaccctgatctgcaagatccaggaagactctcctgcccattgtgctggcctacaggccggtgacgtcttggcgaatatcaatggggtcagcactgagggctttacttataaacaggtggtagatctcattagatcctcagggaatctgctcacaatcgaaactctgaacggcacgatgatccttaagaggactgaactggaggcaaaactgcaagtcctgaagcaaactctgaaacagaagtgggtggagtatcgttcccttcagctacaggaacatagactgctgcacggtgatgctgcgaattgccctagcctggaaaatatggacctggatgagttgagcctcttcggaccactgcctggcccaggccctgctttggtggatcgcaaccgtctgtcgtccgaatcgtcttgcaaatcctggttgagctccatgaccatggacagcgaggatggataccagacttgtgtttccgaggactctagccggggagctttctcacggcagacaagcactgatgacgaatgtttcatccccaaggagggggacgactttcttagacgcagctcttcccgcaggaatcgctcgattagtaacacaagtagtggcagcatgtctcctctatgggaaggcaatctttcatctatgtttgggacactgccaaggaaatcgaggaaggggtccgttaggaaacagctgctgaaatttattcccggactacatcgggctgtcgaggaggaggagagtcgcttttag

SEQ ID NO: 144794 - DNA, 762 bp, Artificial Sequence
  derived and/or modified sequence
atgttcacactcatctgtaagatccaggaagattcccccgctcactgtgccggtcttcaagctggggatgtgctcgctaatatcaatggcgtgtccaccgaaggcttcacttacaaacaagtggtggacctgatccgctcaagtggaaacctcctaacaatcgaaactctgaacggcactatgatactcaagcgcacagagctggaggctaaactccaggtgctcaaacagaccctcaaacaaaagtgggtcgaataccgttccctgcaacttcaggagcatagactcctgcatggcgacgccgcaaactgcccaagtctggagaatatggatcttgacgaactctccctttttggacctttgccgggaccgggaccggctctggtcgatcgcaacaggttgagcagtgaatctagctgtaaatcttggttatccagcatgactatggattccgaggacgggtaccagacatgtgtcagtgaagattcctcccgaggagccttctcccggcagacctccacagatgatgagtgttttattccgaaggagggggacgacttcttgcgccgttcgtcatcccgccgaaataggtccataagtaacacatcatcgggcagcatgtctccactgtgggagggaaacctgtcatctatgtttggaacattgcccaggaaatcacggaaaggaagcgtgaggaaacaactgctgaagtttattccaggtctgcacagggctgtggaggaggaggagtccaggttttag

SEQ ID NO: 144795 - DNA, 2260 bp, Artificial Sequence
  derived and/or modified sequence
agaggtcacatgggctctttctgctttgctacttttgattacttgtcacagttgtacttttagcttcccccatcctgcaaggccactcaaccatgtgctagctggagtgatctttattcacaatgtctttacaaaggctcctgcaacacagcagcaatggcaatttggcggacttctgcgctgggccagcgtatagctcttactccacactcaccggcagccttacgatggacgataatagaaggattcaaatgctagcagacacggtggctactctgcctcggggacgaaagcagcttgctttgaccagatcaagttctttaagtgacttttcctggtctcaaagaaagcttgttactgtggagaagcaggataatgaaacatttggatttgaaattcagtcttacaggccccagaatcagaatgcctgctcctcggaaatgttcactttgatatgcaaaatacaggaggacagcccagctcactgtgctggcctgcaagctggtgatgtccttgcaaatatcaatggtgtgagcacagaaggttttacctacaaacaagtcgttgacctgatcagatcgtccggaaacctgctaacgatagagactcttaatggaacaatgattctgaaaagaacggagcttgaagcaaagctgcaggttttaaagcaaactttgaaacaaaaatgggtggagtacagatctctgcagttacaggaacatcgtctgcttcatggtgatgcagctaattgccccagtttggaaaacatggacttggatgaattgtctttgtttggacccctgcctgggccaggcccagcccttgtggaccggaatcgattatccagtgagagcagctgtaagagctggctgagctccatgacgatggacagtgaagatggctaccagacgtgtgtgtctgaggactccagcaggggtgccttcagtcggcagacgagtacagatgatgagtgctttatccccaaggagggggatgattttctgaggaggtcatcttcaaggaggaaccggagcatcagtaacaccagcagcggatccatgtctcccttgtgggagggcaacttatcaagcatgtttgggaccctgccccggaagagcagaaagggaagtgtccgaaagcaactcttgaaatttatccctggccttcatcgtgctgtggaagaggaagaaagtcgcttttgacggattgtggtgtcctttcaaattagcttatttcacaaatatctctagactcacccagatcccagcttggtgggaaagtgcagaagaattgcaaaactgacatcccatttcacagcaatagtgacctttatttaaattgttgtgttatagtttatgcttcttaaatcatttttcaacctaaacagccaatttctaagcagacaggaaaactaaataataagttaattaatataacaaagatgcaggttcctgctcattccagtaatgtctttgaaagcaaaactaatatttattttctagattatccctgtgaataattgagaactttttggagtcaagtatgaataaaggtgtggcagaatataataatctggactattttctataggataattgctgggttataaaatcttaggtttgcttatgcccagtagctcctgcggaggcttaataataggcaattttgaatttgttcaaacctgtaatggcttgtaaacaaagatgaccatcagctgtttctcacatctatagtgacaataaagcgggaagtataagatttaataggaggggttaaggttcatgagaaccatggaaagatgtggtctgagatgggtgctgcaaagatcataataaagtcatttttatagacagtctaaacaaaatgggtggggatgtcgtgttttttgcccaattcagcttttgttctgcctgaacattaatggcaagtctagaactctccgaatcctacagctttgtaattttttttctacaaatgtctaacatccaaaactgagggttgggaaaaggacttccctcctgtagtttttttcatattacttctcactttatatcttatattctaaatagctatcacctcagcagtcttttgcctattggttatgttagtatcacattacttctagcctttcaattactccatgttttatttaatatccattgaagtctatgaattctctgttctggtggcacagctattcataacctatattctagagtagacaatctggactatgtaataaatagtctgctgattttaa

SEQ ID NO: 144796 - DNA, 1464 bp, Artificial Sequence
  derived and/or modified sequence
ctttactgcctctctccagccagctccagcactacaggacagagattggaattaaatgtcacgtggaaaaaagccaacatggcattctgttaagaagatagacaacctaagtgacgtctatcctgcttcaaagacaaaactcaggaggctgtacattcatttagagcagagtagacgaaacctcctattctctggcttgggaaccaggaggaatcactgactgagatttgccaaccagacctctatgaagtgagctctatcacatggtacgtttatgagaagaggaaccagcaatgtttccttccatcttcaactatactaacaagatccatctgatgtcttgctttgaccagatcaagttctttaagtgacttttcctggtctcaaagaaagcttgttactgtggagaagcaggataatgaaacatttggatttgaaattcagtcttacaggccccagaatcagaatgcctgctcctcggaaatgttcactttgatatgcaaaatacaggaggacagcccagctcactgtgctggcctgcaagctggtgatgtccttgcaaatatcaatggtgtgagcacagaaggttttacctacaaacaagtcgttgacctgatcagatcgtccggaaacctgctaacgatagagactcttaatggaacaatgattctgaaaagaacggagcttgaagcaaagctgcaggttttaaagcaaactttgaaacaaaaatgggtggagtacagatctctgcagttacaggaacatcgtctgcttcatggtgatgcagctaattgccccagtttggaaaacatggacttggatgaattgtctttgtttggacccctgcctgggccaggcccagcccttgtggaccggaatcgattatccagtgagagcagctgtaagagctggctgagctccatgacgatggacagtgaagatggctaccagacgtgtgtgtctgaggactccagcaggggtgccttcagtcggcagacgagtacagatgatgagtgctttatccccaaggagggggatgattttctgaggaggtcatcttcaaggaggaaccggagcatcagtaacaccagcagcggatccatgtctcccttgtgggagggcaacttatcaagcatgtttgggaccctgccccggaagagcagaaagggaagtgtccgaaagcaactcttgaaatttatccctggccttcatcgtgctgtggaagaggaagaaagtcgcttttgacggattgtggtgtcctttcaaattagcttatttcacaaatatctctagactcacccagatcccagcttggtgggaaagtgcagaagaattgcaaaactgacatcccatttcacagcaatagtgacctttatttaaattgttgtgttatagtttatgcttcttaaatcatttttcaacctaaacagccaatttctaagcagacaggaaaactaaataata

SEQ ID NO: 144797 - DNA, 1080 bp, Artificial Sequence
  derived and/or modified sequence
atgagcctgcagagactgctgcagcacagcagcaacggcaacctggccgacttctgcgccggccccgcctacagcagctacagcaccctgaccggcagcctgaccatggacgacaacagaagaatccagatgctggccgacaccgtggccaccctgcccagaggcagaaagcagctggccctgaccagaagcagcagcctgagcgacttcagctggagccagagaaagctggtgaccgtggagaagcaggacaacgagaccttcggcttcgagatccagagctacagaccccagaaccagaacgcctgcagcagcgagatgttcaccctgatctgcaagatccaggaggacagccccgcccactgcgccggcctgcaggccggcgacgtgctggccaacatcaacggcgtgagcaccgagggcttcacctacaagcaggtggtggacctgatcagaagcagcggcaacctgctgaccatcgagaccctgaacggcaccatgatcctgaagagaaccgagctggaggccaagctgcaggtgctgaagcagaccctgaagcagaagtgggtggagtacagaagcctgcagctgcaggagcacagactgctgcacggcgacgccgccaactgccccagcctggagaacatggacctggacgagctgagcctgttcggccccctgcccggccccggccccgccctggtggacagaaacagactgagcagcgagagcagctgcaagagctggctgagcagcatgaccatggacagcgaggacggctaccagacctgcgtgagcgaggacagcagcagaggcgccttcagcagacagaccagcaccgacgacgagtgcttcatccccaaggagggcgacgacttcctgagaagaagcagcagcagaagaaacagaagcatcagcaacaccagcagcggcagcatgagccccctgtgggagggcaacctgagcagcatgttcggcaccctgcccagaaagagcagaaagggcagcgtgagaaagcagctgctgaagttcatccccggcctgcacagagccgtggaggaggaggagagcagattctag

SEQ ID NO: 144798 - DNA, 762 bp, Artificial Sequence
  derived and/or modified sequence
atgttcaccctgatctgcaagatccaggaggacagccccgcccactgcgccggcctgcaggccggcgacgtgctggccaacatcaacggcgtgagcaccgagggcttcacctacaagcaggtggtggacctgatcagaagcagcggcaacctgctgaccatcgagaccctgaacggcaccatgatcctgaagagaaccgagctggaggccaagctgcaggtgctgaagcagaccctgaagcagaagtgggtggagtacagaagcctgcagctgcaggagcacagactgctgcacggcgacgccgccaactgccccagcctggagaacatggacctggacgagctgagcctgttcggccccctgcccggccccggccccgccctggtggacagaaacagactgagcagcgagagcagctgcaagagctggctgagcagcatgaccatggacagcgaggacggctaccagacctgcgtgagcgaggacagcagcagaggcgccttcagcagacagaccagcaccgacgacgagtgcttcatccccaaggagggcgacgacttcctgagaagaagcagcagcagaagaaacagaagcatcagcaacaccagcagcggcagcatgagccccctgtgggagggcaacctgagcagcatgttcggcaccctgcccagaaagagcagaaagggcagcgtgagaaagcagctgctgaagttcatccccggcctgcacagagccgtggaggaggaggagagcagattctag

SEQ ID NO: 144799 - protein, 694 aa, Artificial Sequence
  derived and/or modified sequence
MKHLKRWWSAGGGLLHLTLLLSLAGLRVDLDLYLLLPPPTLLQDELLFLGGPASSAYALSPFSASGGWGRAGHLHPKGRELDPAAPPEGQLLREVRALGVPFVPRTSVDAWLVHSVAAGSADEAHGLLGAAAASSTGGAGASVDGGSQAVQGGGGDPRAARSGPLDAGEEEKAPAEPTAQVPDAGGCASEENGVLREKHEAVDHSSQHEENEERVSAQKENSLQQNDDDENKIAEKPDWEAEKTTESRNERHLNGTDTSFSLEDLFQLLSSQPENSLEGISLGDIPLPGSISDGMNSSAHYHVNFSQAISQDVNLHEAILLCPNNTFRRDPTARTSQSQEPFLQLNSHTTNPEQTLPGTNLTGFLSPVDNHMRNLTSQDLLYDLDINIFDEINLMSLATEDNFDPIDVSQLFDEPDSDSGLSLDSSHNNTSVIKSNSSHSVCDEGAIGYCTDHESSSHHDLEGAVGGYYPEPSKLCHLDQSDSDFHGDLTFQHVFHNHTYHLQPTAPESTSEPFPWPGKSQKIRSRYLEDTDRNLSRDEQRAKALHIPFSVDEIVGMPVDSFNSMLSRYYLTDLQVSLIRDIRRRGKNKVAAQNCRKRKLDIILNLEDDVCNLQAKKETLKREQAQCNKAINIMKQKLHDLYHDIFSRLRDDQGRPVNPNHYALQCTHDGSILIVPKELVASGHKKETQKGKRK

SEQ ID NO: 144800 - protein, 399 aa, Artificial Sequence
  derived and/or modified sequence
MNSSAHYHVNFSQAISQDVNLHEAILLCPNNTFRRDPTARTSQSQEPFLQLNSHTTNPEQTLPGTNLTGFLSPVDNHMRNLTSQDLLYDLDINIFDEINLMSLATEDNFDPIDVSQLFDEPDSDSGLSLDSSHNNTSVIKSNSSHSVCDEGAIGYCTDHESSSHHDLEGAVGGYYPEPSKLCHLDQSDSDFHGDLTFQHVFHNHTYHLQPTAPESTSNLFRPGKSQKIRSRYLEDTDRNLSRDEQRAKALHIPFSVDEIVGMPVDSFNSMLSRYYLTDLQVSLIRDIRRRGKNKVAAQNCRKRKLDIILNLEDDVCNLQAKKETLKREQAQCNKAINIMKQKLHDLYHDIFSRLRDDQGRPVNPNHYALQCTHDGSILIVPKELVASGHKKETQKGKRK

SEQ ID NO: 144801 - DNA, 3720 bp, Artificial Sequence
  derived and/or modified sequence
cggctgggcgaacgggctcggcgctcaggtggctccttcttcgcttctcccgatccccggcggtgccaggcacggtgccggctgccgagggaacgcctttgtgcccggtgctgggaacccgcgacggccgccacgcgccccggtccattgtttcgcttatctgggttccaggcaggtgcgggcggcgcgcggggtccgcacgtgtcaccccggcggctggggcgccgggacccgcgggcgccggcaggggcgttcccgggcgcgcggcggcgatgaagcacctgaagcggtggtggtcggccggcggcggcctcctgcacctcaccctcctgctgagcttggcggggctccgcgtagacctagatctttacctgctgctgccgccgcccaccctgctgcaggacgagctgctgttcctgggcggcccggccagctccgcctacgcgctcagccccttctcggcctcgggagggtgggggcgcgcgggccacttgcaccccaagggccgggagctggaccctgccgcgccgcccgagggccagctgctccgggaggtgcgcgcgctcggggtccccttcgtccctcgcaccagcgtggatgcatggctggtgcacagcgtggctgccgggagcgcggacgaggcccacgggctgctcggcgccgccgccgcctcgtccaccggaggagccggcgccagcgtggacggcggcagccaggctgtgcaggggggcggcggggacccccgagcggctcggagtggccccttggacgccggggaagaggagaaggcacccgcggaaccgacggctcaggtgccggacgctggcggatgtgcgagcgaggagaatggggtactaagagaaaagcacgaagctgtggatcatagttcccagcatgaggaaaatgaagaaagggtgtcagcccagaaggagaactcacttcagcagaatgatgatgatgaaaacaaaatagcagagaaacctgactgggaggcagaaaagaccactgaatctagaaatgagagacatctgaatgggacagatacttctttctctctggaagacttattccagttgctttcatcacagcctgaaaattcactggagggcatctcattgggagatattcctcttccaggcagtatcagtgatggcatgaattcttcagcacattatcatgtaaacttcagccaggctataagtcaggatgtgaatcttcatgaggccatcttgctttgtcccaacaatacatttagaagagatccaacagcaaggacttcacagtcacaagaaccatttctgcagttaaattctcataccaccaatcctgagcaaacccttcctggaactaatttgacaggatttctttcaccggttgacaatcatatgaggaatctaacaagccaagacctactgtatgaccttgacataaatatatttgatgagataaacttaatgtcattggccacagaagacaactttgatccaatcgatgtttctcagctttttgatgaaccagattctgattctggcctttctttagattcaagtcacaataatacctctgtcatcaagtctaattcctctcactctgtgtgtgatgaaggtgctataggttattgcactgaccatgaatctagttcccatcatgacttagaaggtgctgtaggtggctactacccagaacccagtaagctttgtcacttggatcaaagtgattctgatttccatggagatcttacatttcaacacgtatttcataaccacacttaccacttacagccaactgcaccagaatctacttctgaaccttttccgtggcctgggaagtcacagaagataaggagtagataccttgaagacacagatagaaacttgagccgtgatgaacagcgtgctaaagctttgcatatccctttttctgtagatgaaattgtcggcatgcctgttgattctttcaatagcatgttaagtagatattatctgacagacctacaagtctcacttatccgtgacatcagacgaagagggaaaaataaagttgctgcgcagaactgtcgtaaacgcaaattggacataattttgaatttagaagatgatgtatgtaacttgcaagcaaagaaggaaactcttaagagagagcaagcacaatgtaacaaagctattaacataatgaaacagaaactgcatgacctttatcatgatatttttagtagattaagagatgaccaaggtaggccagtcaatcccaaccactatgctctccagtgtacccatgatggaagtatcttgatagtacccaaagaactggtggcctcaggccacaaaaaggaaacccaaaagggaaagagaaagtgagaagaaactgaagatggactctattatgtgaagtagtaatgttcagaaactgattatttggatcagaaaccattgaaactgcttcaagaattgtatctttaagtactgctacttgaataactcagttaacgctgttttgaagcttacatggacaaatgtttaggacttcaagatcacacttgtgggcaatctgggggagccacaacttttcatgaagtgcattgtatacaaaattcatagttatgtccaaagaataggttaacatgaaaacccagtaagactttccatcttggcagccatcctttttaagagtaagttggttacttcaaaaagagcaaacactggggatcaaattattttaagaggtatttcagttttaaatgcaaaatagccttattttcatttagtttgttagcactatagtgagcttttcaaacactattttaatctttatatttaacttataaattttgctttctatggaaataaattttgtatttgtattaaaaattaacttttcccttttatacagaatctgaaccaaatttaccttactttccttccaaaatatccacattcaggaatataggtgaataacaaataaggcagcatagcaaactgctcagactcaagccaaattgaggtcaacatagtatgccaaatccatagtaaggcaaatccacccccctaccccaatacttaacacacagaatactatgtgatatagaatgcactgaagacctacggtcactggtagtttgagccacaggccttcctcatgtaaccagagacagaatgggctacttgcaaaaacgtaactccttgtgtgtatattaaatccataaaatctctggcagtaaagccagcctgaagggatggcctcaccatcttagaatactgagatctcaccagaacactgtaagccatataaacagtagggaaagagtcagcaacagtgaaaccatctgtttaaaatgggcaaaagcgattaagggaaaaaaaacaggtgaatttgaaaataaaccagggtaaggtaaattctagaaataatagcatttgaaatgaaaacctcacttaagttcactagaacagtaaacaggagattgctgaattttttgaagacagcaatgacctcacctagatgactcaagtttggggaacatcaagattttgacgggtactataatgcttaatatgtccaaattttcaaaatgaagtttctcagatattatttctgccataggagctacagtgtagagtatcacataagtatcttgggctagagaaatgcagtttatatataccgttggatttttataataaagtttcccaagacctgttattttgccagaaaaaaaaaaaa

SEQ ID NO: 144802 - DNA, 2085 bp, Artificial Sequence
  derived and/or modified sequence
atgaagcacctcaaacgatggtggtccgcaggtggtggactgcttcatttgacgcttctgttgtctctggccgggctgcgggtggatttagacctgtatttgcttttaccgcctcctaccttgctgcaggacgaactgcttttcctcggagggcccgcctcctcggcctacgccttgtcaccctttagtgcgtccggaggctggggtcgggccggacacctgcaccccaagggacgggagctggaccctgcggctcccccggaaggccaattgctcagggaagtgagggctctaggggtgccctttgtgccccggacaagcgttgatgcttggcttgttcattccgtcgcggctggctctgccgatgaagctcacggcctgttaggagccgccgctgcgtcgagtaccggcggcgcgggcgcgtcggtcgatgggggctcccaggctgttcagggaggcggaggcgacccaagagccgccaggtctggtccattagatgctggcgaggaggagaaagctcctgctgaacctaccgctcaagtgccagacgccgggggatgcgcctccgaagagaacggcgtgctccgcgagaagcatgaggccgtagaccactcctcgcagcacgaagaaaacgaggaaagggtaagcgctcagaaggagaatagcttgcaacagaatgacgacgatgagaataagatcgccgagaaacctgattgggaggcagagaaaaccaccgagagccgcaacgaaaggcacctgaatggtaccgatacgtcctttagccttgaggatctttttcagttgctttcttcccaaccagagaatagccttgaggggattagtttgggtgacatccctttgcctgggagcatctctgatgggatgaattcttctgcgcactaccacgtgaacttcagccaggctatatcacaagacgttaacctccatgaggcaattctgttgtgccctaacaatacatttagacgggaccccaccgcacgcacctcccagtcacaggaacctttcctgcagctcaactcccacaccactaaccccgagcaaactctacctggaacaaatctcacaggatttctgtctcctgtcgataatcacatgagaaatctgacaagccaagatcttctgtatgacctggacatcaacatcttcgatgagattaatctaatgtctttggccacagaagacaacttcgaccctatcgatgttagtcagctttttgatgagcccgatagcgactcgggtctctctcttgactcatcacacaacaacacatccgttatcaaaagcaactcctcacactcagtgtgcgacgaaggcgccatcggctattgtactgaccacgaatcgagttcccatcacgaccttgagggcgccgtgggaggttattaccctgagccatctaaactatgtcacctggatcagtcggatagtgatttccacggcgacctgacattccagcacgtattccacaatcacacgtaccaccttcagccgacagcgcctgaatctacatctgagccgttcccttggcccgggaaatcccagaagattcggtccaggtacttagaggacaccgataggaacttgtcacgcgacgagcagcgcgctaaggcactgcatatcccattctcggttgatgagattgtgggaatgcccgtggacagcttcaattccatgctaagtcgctattacctgacagatctgcaagtgagcctcatcagggacattcggcgccggggaaagaataaagtggccgcccagaattgccggaagagaaagctcgacattatactgaacctcgaagacgacgtatgcaatctgcaggcaaaaaaagaaacccttaagcgggagcaagcacagtgcaacaaagctattaacatcatgaagcagaagctgcacgatctgtatcacgatatctttagtagactgcgcgacgatcagggacggcccgtcaatccgaaccactacgccctgcaatgtacacatgatgggtcaatccttatcgttccaaaggaactggtggcaagcggacacaagaaggaaacccaaaagggtaagcgaaaatag

SEQ ID NO: 144803 - DNA, 1200 bp, Artificial Sequence
  derived and/or modified sequence
atgaattcctctgctcattatcatgtcaatttcagtcaagctatttcccaggatgtgaatctgcatgaggctattctgttgtgtcctaataacacattcagacgcgaccccaccgccaggactagccaatcccaggaaccatttctgcagctgaatagccacactacgaaccccgaacaaaccctccctggaacaaacctgacaggctttctctcaccggtggataatcatatgagaaacctgacaagccaggacctgctgtacgacttagatatcaatatctttgacgaaataaatctaatgtccctggccactgaagacaactttgaccccatagatgtaagccagttgttcgacgagcctgactccgatagcggtcttagcctggactctagtcacaacaatacctcggtcattaagtccaattcctcacactccgtttgtgacgaaggtgcgatcggttactgcacagaccatgagtcttcttctcaccacgacctggagggggccgtgggagggtactacccagagccgtctaaattatgtcatctggatcagtctgacagcgattttcatggagacttgacctttcaacacgttttccacaaccacacatatcacctgcagccaaccgcgccggagagcacgtcaaacctgtttcgcccagggaagagccagaaaatcagatcgaggtatcttgaagataccgatcggaatctcagccgagacgaacagagagccaaagctctgcatatacctttttctgtggacgaaatcgttggaatgccagtggactccttcaatagcatgctgtccaggtactacttgaccgacctccaggtgtccctgataagggacatccgccggagaggcaaaaacaaagttgccgcacagaattgtcgtaagaggaagctggatatcattctcaatctcgaggatgacgtgtgcaatctgcaggcaaaaaaggagaccctgaaaagagagcaggcccagtgcaataaggctattaacattatgaagcagaaattgcacgacctgtatcatgatatattctcccgcctgagggatgaccaggggcgtcccgtcaacccgaaccactatgccctgcagtgtactcacgacggctcgattctgatcgtgccaaaagagctggtggcaagcggccacaagaaggagactcagaaggggaagcgcaagtag

SEQ ID NO: 144804 - DNA, 2085 bp, Artificial Sequence
  derived and/or modified sequence
atgaagcacctgaagcgctggtggagcgctgggggcggcctgctgcacctgaccctgctgctgagcctggccggcctgcgggtggacctggacctgtacctgctgctgcccccacccaccctgctgcaggatgagctgctcttcctgggcggccctgccagcagcgcctatgccctgagccccttcagcgccagcggcggctggggccgggccggccacctgcaccccaagggccgggagctggaccctgctgcccctcctgagggccagctgctgcgggaggtgcgggccctgggcgtgccctttgtgcccaggacctctgtggatgcctggctggtgcacagcgtggccgccggcagcgcagatgaggcccacggcctgctgggcgctgctgctgccagcagcactggaggagctggggcctctgtggatggcggcagccaggccgtgcagggcggcggcggggaccccagggctgcccggagcggccccctggatgctggggaggaggagaaggccccagctgagcccacagcccaggtgcctgatgctgggggctgtgcctctgaagaaaatggagtgctgcgggagaagcatgaagctgtggaccacagcagccagcacgaggagaatgaggagcgggtgtctgcccagaaggagaacagcctgcagcagaatgatgatgatgagaacaagattgctgagaagccagactgggaggccgagaagaccacagagagcagaaatgaaagacacctgaatggaacagacaccagcttcagcctggaggacctcttccagctgctgagcagccagcctgagaacagcctggagggcatcagcctgggggacatccccctgcccggcagcatcagtgatggcatgaacagcagcgcccactaccacgtgaacttcagccaggccatcagccaggatgtgaacctgcacgaggccatcctgctgtgccccaacaacaccttccggcgggaccccacagcccggaccagccagagccaggagcccttcctgcagctgaacagccacaccaccaaccctgagcagaccctgcccggcaccaacctgaccggcttcctgagccctgtggacaaccacatgaggaacctgaccagccaggacctgctgtatgacctggacatcaacatctttgatgagatcaacctgatgagcctggccacagaggacaactttgaccccattgatgtgtcccagctgtttgatgagccagacagcgacagcggcctgagcctggacagcagccacaacaacaccagcgtcatcaagagcaacagcagccacagcgtgtgtgatgaaggagccatcggctactgcacagaccacgagagcagcagccaccacgacctggagggcgctgtgggcggctactacccagagcccagcaagctgtgccacctggaccagagcgacagcgacttccacggggacctgaccttccagcacgtgttccacaaccacacctaccacctgcagcccacagcccctgagagcaccagcgagcccttcccctggccaggcaagagccagaagatccgcagccgctacctggaggacacagacaggaacctgagcagagatgagcagagggccaaggccctgcacatccccttctctgtggatgagatcgtgggcatgcctgtggacagcttcaacagcatgctgagccgctactacctgacagacctgcaggtgtccctcatccgggacatcagaagaagaggcaagaacaaggtggccgcccagaactgcaggaagaggaagctggacatcatcctgaacctggaggatgatgtgtgcaacctgcaggccaagaaggagaccctgaagcgggagcaggcccagtgcaacaaggccatcaacatcatgaagcagaagctgcatgacctgtaccatgacatcttcagccggctgagagatgaccagggccggcctgtgaaccccaaccactacgccctgcagtgcacccatgatggcagcatcctgattgtgcccaaggagctggtggccagcggccacaagaaggagacccagaagggcaagaggaagtag

SEQ ID NO: 144805 - DNA, 1200 bp, Artificial Sequence
  derived and/or modified sequence
atgaacagcagcgcccactaccacgtgaacttcagccaggccatcagccaggatgtgaacctgcacgaggccatcctgctgtgccccaacaacaccttccggcgggaccccacagcccggaccagccagagccaggagcccttcctgcagctgaacagccacaccaccaaccctgagcagaccctgcccggcaccaacctgaccggcttcctgagccctgtggacaaccacatgaggaacctgaccagccaggacctgctgtatgacctggacatcaacatctttgatgagatcaacctgatgagcctggccacagaggacaactttgaccccattgatgtgtcccagctgtttgatgagccagacagcgacagcggcctgagcctggacagcagccacaacaacaccagcgtcatcaagagcaacagcagccacagcgtgtgtgatgaaggagccatcggctactgcacagaccacgagagcagcagccaccacgacctggagggcgctgtgggcggctactacccagagcccagcaagctgtgccacctggaccagagcgacagcgacttccacggggacctgaccttccagcacgtgttccacaaccacacctaccacctgcagcccacagcccctgagagcaccagcaacctcttccggcctgggaagagccagaagatccgcagccgctacctggaggacacagacaggaacctgagcagagatgagcagagggccaaggccctgcacatccccttctctgtggatgaaattgtgggcatgcctgtggacagcttcaacagcatgctgagccgctactacctgacagacctgcaggtgtccctcatccgggacatcagaagaagaggcaagaacaaggtggccgcccagaactgcaggaagaggaagctggacatcatcctgaacctggaggatgatgtgtgcaacctgcaggccaagaaggagaccctgaagcgggagcaggcccagtgcaacaaggccatcaacatcatgaagcagaagctgcatgacctgtaccatgacatcttcagccggctgagagatgaccagggccggcctgtgaaccccaaccactacgccctgcagtgcacccatgatggcagcatcctgattgtgcccaaggagctggtggccagcggccacaagaaggagacccagaagggcaagaggaagtag

SEQ ID NO: 144806 - DNA, 2085 bp, Artificial Sequence
  derived and/or modified sequence
atgaagcacctgaagcggtggtggagcgccggcggcggcctgctgcatctgacacttcttctgtctctggccggcttacgagtggacctggacttgtatttgttactacctcccccaacccttctgcaggatgagctgctctttttaggaggtcccgcctccagcgcctacgcgctgtcaccattctctgctagtggcggatggggtcgcgcgggacatctccaccctaagggtagagaactcgatccagccgctccccccgaggggcagctcctcagggaggtgagagctcttggcgtacccttcgtgccccgaactagcgtcgatgcatggcttgtgcattctgtagctgccggctcagccgacgaggcacacggactgctgggagcagcggctgcatccagcaccggcggcgccggtgctagtgtagacggcggctcacaagccgttcaagggggcggaggcgacccgcgggccgcaaggagcggcccactcgacgctggcgaggaagagaaagcgcccgccgaacctacagcacaggtaccggacgccggagggtgtgcctccgaagaaaatggcgtgctgagagagaagcacgaagccgtggatcacagtagccagcacgaggagaacgaggagagggtgtcagcgcagaaagagaattcgttgcagcagaatgatgatgatgagaataagatagcggaaaagcctgattgggaagcagaaaaaacgactgagtcccgcaatgagcggcacttaaacggcaccgatacttccttctctttggaagatcttttccagttgttgagcagccaacccgaaaactctctcgaaggcatttcccttggagacattcctctgccaggtagtatcagcgatggcatgaatagtagcgcacattaccatgtgaatttttctcaggctatatcacaggatgtgaatctgcacgaagctatcctgctttgcccaaacaatacctttaggagagatcccacagcacgaaccagtcagtcacaggagccatttctgcagctgaactctcacaccacgaatccggaacagactctgcccgggacaaatctgacagggtttctgtctcctgttgataaccacatgagaaacctaaccagccaggatctgttatacgaccttgacatcaacatctttgatgaaattaatttgatgtctctggcgaccgaggacaactttgatccaatcgacgtttcacagctctttgatgagcctgattcagattccggcctttctcttgacagttcgcataataacacaagtgtcattaaatccaatagcagccattccgtttgcgatgaaggtgccattggctactgcacagaccacgagtcttccagccatcatgacttggaaggcgcggtgggtggctattacccggagcccagtaagctgtgtcacctggatcagtccgattccgactttcatggggatctgaccttccagcatgtgtttcataatcacacttatcacttacagcccaccgctccagagagcacgagtgagccctttccatggcctggaaaaagtcagaagattaggagtcgttacttggaagataccgacaggaacctgagccgcgacgagcagcgagccaaggcccttcatattcctttctctgtggacgagattgtgggcatgccagtagacagttttaactcaatgctaagccgatactatctgaccgatctacaagtctctttaattcgcgatattcggcggagaggaaagaataaggtggctgctcagaattgccgaaagcggaagctagatattatcctgaaccttgaagacgatgtctgtaacttgcaagctaagaaggaaaccctcaagcgggagcaggcccaatgcaataaagctatcaatataatgaagcaaaaactgcacgatctgtatcacgacatcttcagtcgcttacgggatgatcaaggaaggcctgtgaaccccaaccactacgcccttcagtgtacgcatgacgggtcaatcctcatcgtgcccaaagaacttgtggccagtggacacaagaaggagacacagaaaggcaaacggaaatag

SEQ ID NO: 144807 - DNA, 1200 bp, Artificial Sequence
  derived and/or modified sequence
atgaacagcagcgcccactaccacgtgaacttcagccaggccatcagtcaggacgtgaatcttcatgaggctatcctgctctgtcctaacaacaccttccggagggatccaactgcgcgcacatcacaaagccaggaaccctttctccagctgaattcccacactacaaaccccgagcaaaccctgcccggaacgaatctcactggattcctgagccctgtggataaccacatgcgtaatctgaccagccaggatctgctctacgacttggacatcaacattttcgacgagataaatctgatgagcctggccaccgaggacaactttgatccgatcgatgtgagccagctgttcgatgagccggattcggatagtggcctcagtctggattcctcccacaacaatacaagcgtgattaaatcaaattcttctcactctgtgtgcgacgaaggggcaatcgggtattgtaccgaccacgagtcctcatcgcatcacgacctagaaggggcggtcggggggtactatccagaaccttcaaagctgtgccacctggatcaaagcgattcagattttcacggggatctgaccttccaacacgtgttccacaaccacacatatcatcttcagcctaccgctccagaaagtacctccaatctgttcaggccaggaaagagtcagaagatccggagtaggtacctcgaggataccgacagaaatttaagcagggacgaacagcgcgccaaagccctgcatatccctttcagcgtcgacgagatagttggcatgcctgttgactctttcaattcaatgctctcaagatactacttgacagatctccaggtaagcctgattcgagatatccgtcgaaggggcaagaacaaggttgcagcccagaattgccgaaagcgcaaactcgacattatcctgaacctggaggacgatgtgtgcaatttacaggctaaaaaagagacactaaagagggagcaggcccaatgtaataaggcaatcaacattatgaagcagaaattacacgatctttaccatgacatattctccagattgagagatgaccagggaaggcccgtgaaccccaaccactacgccctgcaatgcacccacgacggcagcattcttatcgtacccaaggaacttgtggcctctgggcacaagaaggagactcagaagggtaaacgcaagtag

SEQ ID NO: 144808 - DNA, 3686 bp, Artificial Sequence
  derived and/or modified sequence
gggctcggcgctcaggtggctccttcttcgcttctcccgatccccggcggtgccaggcacggtgccggctgccgagggaacgcctttgtgcccggtgctgggaacccgcgacggccgccacgcgccccggtccattgtttcgcttatctgggttccaggcaggtgcgggcggcgcgcggggtccgcacgtgtcaccccggcggctggggcgccgggacccgcgggcgccggcaggggcgttcccgggcgcgcggcggcgatgaagcacctgaagcggtggtggtcggccggcggcggcctcctgcacctcaccctcctgctgagcttggcggggctccgcgtagacctagatctttacctgctgctgccgccgcccaccctgctgcaggacgagctgctgttcctgggcggcccggccagctccgcctacgcgctcagccccttctcggcctcgggagggtgggggcgcgcgggccacttgcaccccaagggccgggagctggaccctgccgcgccgcccgagggccagctgctccgggaggtgcgcgcgctcggggtccccttcgtccctcgcaccagcgtggatgcatggctggtgcacagcgtggctgccgggagcgcggacgaggcccacgggctgctcggcgccgccgccgcctcgtccaccggaggagccggcgccagcgtggacggcggcagccaggctgtgcaggggggcggcggggacccccgagcggctcggagtggccccttggacgccggggaagaggagaaggcacccgcggaaccgacggctcaggtgccggacgctggcggatgtgcgagcgaggagaatggggtactaagagaaaagcacgaagctgtggatcatagttcccagcatgaggaaaatgaagaaagggtgtcagcccagaaggagaactcacttcagcagaatgatgatgatgaaaacaaaatagcagagaaacctgactgggaggcagaaaagaccactgaatctagaaatgagagacatctgaatgggacagatacttctttctctctggaagacttattccagttgctttcatcacagcctgaaaattcactggagggcatctcattgggagatattcctcttccaggcagtatcagtgatggcatgaattcttcagcacattatcatgtaaacttcagccaggctataagtcaggatgtgaatcttcatgaggccatcttgctttgtcccaacaatacatttagaagagatccaacagcaaggacttcacagtcacaagaaccatttctgcagttaaattctcataccaccaatcctgagcaaacccttcctggaactaatttgacaggatttctttcaccggttgacaatcatatgaggaatctaacaagccaagacctactgtatgaccttgacataaatatatttgatgagataaacttaatgtcattggccacagaagacaactttgatccaatcgatgtttctcagctttttgatgaaccagattctgattctggcctttctttagattcaagtcacaataatacctctgtcatcaagtctaattcctctcactctgtgtgtgatgaaggtgctataggttattgcactgaccatgaatctagttcccatcatgacttagaaggtgctgtaggtggctactacccagaacccagtaagctttgtcacttggatcaaagtgattctgatttccatggagatcttacatttcaacacgtatttcataaccacacttaccacttacagccaactgcaccagaatctacttctgaaccttttccgtggcctgggaagtcacagaagataaggagtagataccttgaagacacagatagaaacttgagccgtgatgaacagcgtgctaaagctttgcatatccctttttctgtagatgaaattgtcggcatgcctgttgattctttcaatagcatgttaagtagatattatctgacagacctacaagtctcacttatccgtgacatcagacgaagagggaaaaataaagttgctgcgcagaactgtcgtaaacgcaaattggacataattttgaatttagaagatgatgtatgtaacttgcaagcaaagaaggaaactcttaagagagagcaagcacaatgtaacaaagctattaacataatgaaacagaaactgcatgacctttatcatgatatttttagtagattaagagatgaccaaggtaggccagtcaatcccaaccactatgctctccagtgtacccatgatggaagtatcttgatagtacccaaagaactggtggcctcaggccacaaaaaggaaacccaaaagggaaagagaaagtgagaagaaactgaagatggactctattatgtgaagtagtaatgttcagaaactgattatttggatcagaaaccattgaaactgcttcaagaattgtatctttaagtactgctacttgaataactcagttaacgctgttttgaagcttacatggacaaatgtttaggacttcaagatcacacttgtgggcaatctgggggagccacaacttttcatgaagtgcattgtatacaaaattcatagttatgtccaaagaataggttaacatgaaaacccagtaagactttccatcttggcagccatcctttttaagagtaagttggttacttcaaaaagagcaaacactggggatcaaattattttaagaggtatttcagttttaaatgcaaaatagccttattttcatttagtttgttagcactatagtgagcttttcaaacactattttaatctttatatttaacttataaattttgctttctatggaaataaattttgtatttgtattaaaaattaacttttcccttttatacagaatctgaaccaaatttaccttactttccttccaaaatatccacattcaggaatataggtgaataacaaataaggcagcatagcaaactgctcagactcaagccaaattgaggtcaacatagtatgccaaatccatagtaaggcaaatccacccccctaccccaatacttaacacacagaatactatgtgatatagaatgcactgaagacctacggtcactggtagtttgagccacaggccttcctcatgtaaccagagacagaatgggctacttgcaaaaacgtaactccttgtgtgtatattaaatccataaaatctctggcagtaaagccagcctgaagggatggcctcaccatcttagaatactgagatctcaccagaacactgtaagccatataaacagtagggaaagagtcagcaacagtgaaaccatctgtttaaaatgggcaaaagcgattaagggaaaaaaaacaggtgaatttgaaaataaaccagggtaaggtaaattctagaaataatagcatttgaaatgaaaacctcacttaagttcactagaacagtaaacaggagattgctgaattttttgaagacagcaatgacctcacctagatgactcaagtttggggaacatcaagattttgacgggtactataatgcttaatatgtccaaattttcaaaatgaagtttctcagatattatttctgccataggagctacagtgtagagtatcacataagtatcttgggctagagaaatgcagtttatatataccgttggatttttataataaagtttcccaagacctgtta

SEQ ID NO: 144809 - DNA, 2247 bp, Artificial Sequence
  derived and/or modified sequence
tcagtgtatcaaagggacacctgcacccccatgtttattgcagcaatattcacaatagccttgtagttttagcgcttagaggcatttaaacagcctctctcctccagactacttcactgtagtttattatccctgaccctccacaatgtgattaccaaccgctaggatgagttgcatcttattataaagtagcaaattacaagattgtaacattagactttttaagaaaatccagtcagcttttatactaatccatcttaatttctaggttactcagaattccaggtattctgatttggactcacatctcgtattgtattgcctgtatttaactaggaagttactgccaacagcatctatctctattaaatgtagaggaattgacaaaagaggggaaagaaagttgttaggtaatagaactgcttcagaaatagggctattcatgtttgaagtgtttctccttcgtttttcagggcatctcattgggagatattcctcttccaggcagtatcagtgatggcatgaattcttcagcacattatcatgtaaacttcagccaggctataagtcaggatgtgaatcttcatgaggccatcttgctttgtcccaacaatacatttagaagagatccaacagcaaggacttcacagtcacaagaaccatttctgcagttaaattctcataccaccaatcctgagcaaacccttcctggaactaatttgacaggatttctttcaccggttgacaatcatatgaggaatctaacaagccaagacctactgtatgaccttgacataaatatatttgatgagataaacttaatgtcattggccacagaagacaactttgatccaatcgatgtttctcagctttttgatgaaccagattctgattctggcctttctttagattcaagtcacaataatacctctgtcatcaagtctaattcctctcactctgtgtgtgatgaaggtgctataggttattgcactgaccatgaatctagttcccatcatgacttagaaggtgctgtaggtggctactacccagaacccagtaagctttgtcacttggatcaaagtgattctgatttccatggagatcttacatttcaacacgtatttcataaccacacttaccacttacagccaactgcaccagaatctacttctaaccttttccgtcctgggaagtcacagaagataaggagtagataccttgaagacacagatagaaacttgagccgtgatgaacagcgtgctaaagctttgcatatccctttttctgtagatgaaattgtcggcatgcctgttgattctttcaatagcatgttaagtagatattatctgacagacctacaagtctcacttatccgtgacatcagacgaagagggaaaaataaagttgctgcgcagaactgtcgtaaacgcaaattggacataattttgaatttagaagatgatgtatgtaacttgcaagcaaagaaggaaactcttaagagagagcaagcacaatgtaacaaagctattaacataatgaaacagaaactgcatgacctttatcatgatatttttagtagattaagagatgaccaaggtaggccagtcaatcccaaccactatgctctccagtgtacccatgatggaagtatcttgatagtacccaaagaactggtggcctcaggccacaaaaaggaaacccaaaagggaaagagaaagtgagaagaaactgaagatggactctattatgtgaagtagtaatgttcagaaactgattatttggatcagaaaccattgaaactgcttcaagaattgtatctttaagtactgctacttgaataactcagttaacgctgttttgaagcttacatggacaaatgtttaggacttcaagatcacacttgtgggcaatctgggggagccacaacttttcatgaagtgcattgtatacaaaattcatagttatgtccaaagaataggttaacatgaaaacccagtaagactttccatcttggcagccatcctttttaagagtaagttggttacttcaaaaagagcaaacactggggatcaaattattttaagaggtatttcagttttaaatgcaaaatagccttattttcatttagtttgttagcactatagtgagcttttcaaacactattttaatctttatatttaacttataaattttgctttctatggaaataaattttgtatttgtattaaaaattaacttttccctttt

SEQ ID NO: 144810 - DNA, 2085 bp, Artificial Sequence
  derived and/or modified sequence
atgaagcatctaaagagatggtggtccgctgggggtggtctactacacctcactctgttactgagtctggccggactgcgagtcgacctggatctgtacctgctcctcccacctcctacattgctccaggatgagctgctgtttctcggaggaccagccagcagcgcctatgctctctctccattctctgcctcgggaggatggggtagagctggacatctccaccctaaggggagggagcttgatcctgcagcacctcctgagggccagttgctgcgtgaggtacgtgcgctcggagtgcctttcgttccaagaacatccgtggacgcttggttagtccattcggttgccgctggctcagccgatgaggctcatggccttctcggcgcagctgctgctagttctaccgggggagctggggcatcagttgatggcggatcacaggctgtgcaggggggaggtggcgaccctagggccgctaggtccggtcccctggacgctggggaagaagagaaggcccctgccgaacctacagcacaggtaccagacgcagggggatgcgctagcgaagaaaatggagtgttgcgagaaaaacatgaggccgtcgatcacagcagccagcacgaagaaaatgaggagcgggtgtctgcacagaaagagaactcactgcagcagaacgatgacgacgagaacaaaatcgctgagaagcccgattgggaagcggagaagacaacggaaagtcggaacgagcgtcatctgaacgggactgacaccagcttttcacttgaggatctgttccagctactctcttcccagcctgagaactctctcgagggaatatcactcggagacattccccttcccggttctatctcagatggaatgaattcttctgcacactaccacgttaacttctcacaggctatcagtcaggacgttaacctgcatgaggctatcctgctgtgtcccaacaacacattccgcagggacccaacggctaggaccagccaatcacaggagcctttcctgcaactgaattcgcacactactaaccctgaacagaccctccctggaactaacttgacaggttttctgtcaccggtcgacaaccatatgcgtaacctgacaagccaggacctgctgtacgaccttgacattaacatcttcgacgagattaacctgatgagcctggcaaccgaagacaattttgatcctattgatgtgagccagctctttgatgaacccgatagcgattctggactgtcactagacagcagccacaataacacctcagttatcaagtctaattcctcacactccgtatgcgatgagggtgcaattggttactgtactgatcacgagagcagcagccaccatgatctggaaggcgcagtgggtgggtactaccccgaaccctcgaaactgtgtcacctggaccagtctgactcagactttcacggtgacctaacattccaacatgtgtttcacaatcatacgtatcatttacagcccaccgccccagaatccacctccgaacccttcccatggcccggtaaatctcaaaagattcgtagcagatatttggaggacaccgaccggaatctctcccgggatgagcagagagcgaaagcgctacacattccgttcagcgtagacgagattgtggggatgccagtagattccttcaactccatgctgtctcgctactacttaactgatctccaggtgtcactgattagggatatcaggcgaaggggcaagaataaagtggccgcacagaactgtcgaaaacgtaaactggatatcattctgaaccttgaagacgatgtatgcaacctgcaagccaaaaaggaaacactcaaaagggagcaggcacagtgcaacaaggcaatcaatattatgaagcagaagttacacgacctgtaccacgacattttctcccgactcagagacgaccagggtcgcccagtgaatccaaaccactatgctttacagtgtacccacgatggcagtatcttgatagtacccaaggaactcgtcgcgtccgggcataagaaggagactcagaagggaaaaagaaaatag

SEQ ID NO: 144811 - DNA, 1200 bp, Artificial Sequence
  derived and/or modified sequence
atgaattcctcagcacactatcacgtgaattttagccaggccataagccaagatgtaaaccttcatgaggctattctactgtgtccaaataacacgtttaggagagaccccactgctcggacgtcacagagccaggagccttttcttcagttgaactctcataccaccaaccctgaacaaaccctcccagggaccaatctcaccggatttctatcacctgtcgataaccacatgcgcaaccttactagtcaggacttactgtatgatttagacatcaatatttttgacgagatcaatctcatgagtctggctactgaggataattttgatcctattgacgtgagtcagcttttcgatgagcccgatagcgattctgggctgtcactcgacagctctcacaacaacaccagcgttattaaatccaattcaagccactctgtttgtgacgagggagctatcgggtactgtactgatcacgaatcaagtagccaccacgacctcgagggcgctgtggggggttactatccagaaccgagcaaattgtgccatctggatcagagcgatagtgattttcacggggacctgaccttccagcacgtctttcacaatcacacctaccacttgcaacctacagcccctgagagcacctctaacctgttcagacccggaaagtcacagaaaatccgcagccggtatctcgaagatacagaccgcaacctttcgagagacgaacagagggccaaggccctgcacatccccttttctgtggatgaaatcgtgggcatgcccgttgacagcttcaacagcatgctgtctaggtattacctcactgatctccaagtgagtctcattagagatatccggcgtagaggcaagaacaaggtggccgctcagaactgccggaaacgcaagcttgacatcatccttaatttagaagacgacgtgtgtaacttacaggctaagaaagagactctcaaaagggaacaagcccagtgtaataaggctatcaatattatgaagcagaaactgcacgacctttatcacgacattttctccaggctgagggatgaccagggcagacccgtcaacccaaatcattatgcattacaatgtactcacgacggtagcatactgatcgtgcctaaagaattggtagcctcgggacacaaaaaagaaactcagaagggaaagcgaaaatag

SEQ ID NO: 144812 - DNA, 2085 bp, Artificial Sequence
  derived and/or modified sequence
atgaaacatcttaaaaggtggtggtccgcaggtggagggttgctccaccttacacttctcctcagcctggccgggctccgtgtcgatttagatctttatctgctgctccctccaccgactttactacaggacgagctcctttttcttggtggccctgcctccagcgcctatgccctgtcaccattcagtgcatcaggaggctggggtagagccggccacctgcaccctaaaggtagggaactcgaccccgcggctccccccgaaggccagctgctcagggaggtcagggcactcggggtaccctttgtccccagaacatccgtggatgcttggctggtgcactccgtggccgcgggctctgccgacgaagctcatggacttttaggagccgcagctgcgagcagtacaggcggcgccggggcctcagtcgacgggggtagtcaggccgtccagggcggcggtggcgaccctcgcgctgcccggtcggggcctctggatgctggcgaggaggaaaaagcaccagccgagccaactgctcaggtaccagacgccggcggctgcgcttcagaagagaacggcgtgctgagggagaaacatgaggccgttgatcacagctcccagcacgaagaaaatgaagaaagagtttccgctcagaaggagaatagcctgcaacagaacgatgacgacgaaaataaaattgcggagaaacccgattgggaagctgagaagacgacagaaagccggaacgagcgtcatctgaatggaactgacacctctttttcattagaggatctattccagctcctgtccagtcaaccagaaaacagcctcgagggaatttcactcggagatattccccttccagggagtatttctgacggcatgaattcttctgctcattatcatgtgaacttctcacaggctatcagtcaggatgtgaaccttcatgaagcaattttgctgtgccccaataacacattccgccgtgaccctaccgcacggactagtcagagccaagagccgtttctccaactcaacagccacactaccaacccagagcagacattacctggtaccaatctcacagggttcctctctcctgtggataaccacatgagaaatcttacgtcacaagacctcctttatgatctggatataaacattttcgacgaaatcaaccttatgagcctggcaacggaagacaactttgatcccattgacgtttctcaactgtttgacgaacccgacagtgacagtggacttagcttagactcttcacataataatacctcagtgataaagagcaattcatcccactccgtgtgtgacgagggggccatcggctactgtacggaccatgagtcttcctcccaccatgatcttgagggcgccgttggaggatattacccagaacccagcaagctctgccacctcgaccagtcagattccgactttcatggagacctcacctttcaacatgttttccacaaccatacttatcatctgcagccgactgccccggaatctacttccgaaccttttccatggccagggaagtcgcaaaagattcgctcccgctacctggaggatacagatagaaacctctccagggatgaacaacgcgcaaaggcactgcacattccctttagcgtcgatgagatagtaggcatgcccgtggactccttcaatagcatgttaagccgctactacttgactgacctgcaggtgtcactcatccgcgatattcgacgacgagggaaaaataaagttgccgcccagaactgccggaaacgtaagttagacatcattctgaatttggaggacgacgtgtgcaatcttcaggccaagaaagagactctcaaacgtgagcaagcccagtgtaataaagccatcaatataatgaaacaaaagcttcacgacctctatcacgatattttttcacgcttaagggacgaccagggacgacccgtgaaccccaaccactacgcattgcagtgcacccatgacggatccattcttatagttccaaaggaacttgtagcctccggacataagaaggagactcagaaagggaaacggaagtag

SEQ ID NO: 144813 - DNA, 2085 bp, Artificial Sequence
  derived and/or modified sequence
atgaaacatctgaagcggtggtggtcagccggtgggggactgttacacctgacccttctcttgagcctggctgggctgcgagttgacttggatttgtatctactgctccctccccccacactattacaggatgagctgctttttctcggtggacccgctagctccgcatacgccctgtcacccttttccgcctctggcggctggggccgagcaggacacctccaccccaagggcagagaactggaccccgcggccccacccgaaggtcagttattaagagaagtcagagccctgggagtcccatttgtccctagaacatcggtggatgcgtggttggtacacagcgtggctgccggatctgctgacgaggcgcatggtctgctcggagctgcagccgccagctcaacaggaggcgccggggctagcgtcgacggcgggtctcaagcagtccagggaggcggcggagacccaagagccgcaaggtctggaccactcgacgcaggtgaagaagagaaagcacctgccgagccaaccgcccaggttccggacgccggaggatgtgcatcggaagagaacggagtactgcgcgagaaacacgaggccgtggatcatagttctcaacacgaagagaatgaagaaagggtaagtgctcagaaggaaaatagtttacagcagaacgatgacgacgagaataaaatcgcagagaagcctgactgggaagccgagaagacaactgaaagccgcaacgagcgccatctcaacggcaccgatacctcttttagccttgaagatctctttcagctccttagcagccaacccgagaactcactggaaggtataagcctcggagatatccccctgcccggctccatctcagatggtatgaacagtagtgcccactaccacgtgaacttctcccaagccatttcacaagacgtcaacctacacgaagctatcttgctgtgcccgaataacactttcagacgggacccaacagccagaacgtcccagtcacaagaacccttcctgcagcttaactctcatacgaccaacccagagcagaccctgccaggcactaacctaaccggattcctgagtcctgtcgataatcacatgagaaacctgacctcacaagatctgctttacgatctggatattaacatcttcgatgagattaatctgatgtccttggccacagaagacaatttcgatcccattgatgtctcccaactgtttgacgagcctgactctgactccggattaagcctggacagctcacacaacaacacatccgtaatcaagtctaattccagccactctgtgtgcgatgagggcgctatcggatattgcaccgaccatgaatcatccagccaccacgatttagagggggcagttggggggtactacccagagcctagcaaactttgtcacctagatcagagcgactccgatttccacggcgatctgacattccaacatgtttttcacaatcatacttatcatctccagccaactgcacctgaaagcacttctgaacccttcccctggcccggcaaatcacagaagatcagaagtaggtatctggaagacacagatcgcaatcttagcagagatgaacagcgagctaaagccctacacattccgttttctgtagacgaaatcgtgggaatgcccgtcgactccttcaactccatgttgtctcggtactacctgaccgacctgcaagtgagcttgatccgcgacatcagacgacgcggaaaaaataaagtagctgctcaaaattgcagaaagagaaagctggacatcattctgaatttggaggacgacgtgtgcaatcttcaggccaagaaagagactctcaaacgtgagcaagcccagtgtaataaagccatcaatataatgaaacaaaagcttcacgacctctatcacgatattttttcacgcttaagggacgaccagggacgacccgtgaaccccaaccactacgcattgcagtgcacccatgacggatccattcttatagttccaaaggaacttgtagcctccggacataagaaggagactcagaaagggaaacggaagtag

SEQ ID NO: 144814 - DNA, 2085 bp, Artificial Sequence
  derived and/or modified sequence
atgaagcacctgaagagatggtggagcgccggcggcggcctgctgcacctgaccctgctgctgagcctggccggcctgagagtggacctggacctgtacctgctgctgcccccccccaccctgctgcaggacgagctgctgttcctgggcggccccgccagcagcgcctacgccctgagccccttcagcgccagcggcggctggggcagagccggccacctgcaccccaagggcagagagctggaccccgccgccccccccgagggccagctgctgagagaggtgagagccctgggcgtgcccttcgtgcccagaaccagcgtggacgcctggctggtgcacagcgtggccgccggcagcgccgacgaggcccacggcctgctgggcgccgccgccgccagcagcaccggcggcgccggcgccagcgtggacggcggcagccaggccgtgcagggcggcggcggcgaccccagagccgccagaagcggccccctggacgccggcgaggaggagaaggcccccgccgagcccaccgcccaggtgcccgacgccggcggctgcgccagcgaggagaacggcgtgctgagagagaagcacgaggccgtggaccacagcagccagcacgaggagaacgaggagagagtgagcgcccagaaggagaacagcctgcagcagaacgacgacgacgagaacaagatcgccgagaagcccgactgggaggccgagaagaccaccgagagcagaaacgagagacacctgaacggcaccgacaccagcttcagcctggaggacctgttccagctgctgagcagccagcccgagaacagcctggagggcatcagcctgggcgacatccccctgcccggcagcatcagcgacggcatgaacagcagcgcccactaccacgtgaacttcagccaggccatcagccaggacgtgaacctgcacgaggccatcctgctgtgccccaacaacaccttcagaagagaccccaccgccagaaccagccagagccaggagcccttcctgcagctgaacagccacaccaccaaccccgagcagaccctgcccggcaccaacctgaccggcttcctgagccccgtggacaaccacatgagaaacctgaccagccaggacctgctgtacgacctggacatcaacatcttcgacgagatcaacctgatgagcctggccaccgaggacaacttcgaccccatcgacgtgagccagctgttcgacgagcccgacagcgacagcggcctgagcctggacagcagccacaacaacaccagcgtgatcaagagcaacagcagccacagcgtgtgcgacgagggcgccatcggctactgcaccgaccacgagagcagcagccaccacgacctggagggcgccgtgggcggctactaccccgagcccagcaagctgtgccacctggaccagagcgacagcgacttccacggcgacctgaccttccagcacgtgttccacaaccacacctaccacctgcagcccaccgcccccgagagcaccagcgagcccttcccctggcccggcaagagccagaagatcagaagcagatacctggaggacaccgacagaaacctgagcagagacgagcagagagccaaggccctgcacatccccttcagcgtggacgagatcgtgggcatgcccgtggacagcttcaacagcatgctgagcagatactacctgaccgacctgcaggtgagcctgatcagagacatcagaagaagaggcaagaacaaggtggccgcccagaactgcagaaagagaaagctggacatcatcctgaacctggaggacgacgtgtgcaacctgcaggccaagaaggagaccctgaagagagagcaggcccagtgcaacaaggccatcaacatcatgaagcagaagctgcacgacctgtaccacgacatcttcagcagactgagagacgaccagggcagacccgtgaaccccaaccactacgccctgcagtgcacccacgacggcagcatcctgatcgtgcccaaggagctggtggccagcggccacaagaaggagacccagaagggcaagagaaagtag

SEQ ID NO: 144815 - DNA, 1200 bp, Artificial Sequence
  derived and/or modified sequence
atgaacagcagcgcccactaccacgtgaacttcagccaggccatcagccaggacgtgaacctgcacgaggccatcctgctgtgccccaacaacaccttcagaagagaccccaccgccagaaccagccagagccaggagcccttcctgcagctgaacagccacaccaccaaccccgagcagaccctgcccggcaccaacctgaccggcttcctgagccccgtggacaaccacatgagaaacctgaccagccaggacctgctgtacgacctggacatcaacatcttcgacgagatcaacctgatgagcctggccaccgaggacaacttcgaccccatcgacgtgagccagctgttcgacgagcccgacagcgacagcggcctgagcctggacagcagccacaacaacaccagcgtgatcaagagcaacagcagccacagcgtgtgcgacgagggcgccatcggctactgcaccgaccacgagagcagcagccaccacgacctggagggcgccgtgggcggctactaccccgagcccagcaagctgtgccacctggaccagagcgacagcgacttccacggcgacctgaccttccagcacgtgttccacaaccacacctaccacctgcagcccaccgcccccgagagcaccagcaacctgttcagacccggcaagagccagaagatcagaagcagatacctggaggacaccgacagaaacctgagcagagacgagcagagagccaaggccctgcacatccccttcagcgtggacgagatcgtgggcatgcccgtggacagcttcaacagcatgctgagcagatactacctgaccgacctgcaggtgagcctgatcagagacatcagaagaagaggcaagaacaaggtggccgcccagaactgcagaaagagaaagctggacatcatcctgaacctggaggacgacgtgtgcaacctgcaggccaagaaggagaccctgaagagagagcaggcccagtgcaacaaggccatcaacatcatgaagcagaagctgcacgacctgtaccacgacatcttcagcagactgagagacgaccagggcagacccgtgaaccccaaccactacgccctgcagtgcacccacgacggcagcatcctgatcgtgcccaaggagctggtggccagcggccacaagaaggagacccagaagggcaagagaaagtag

SEQ ID NO: 144816 - protein, 116 aa, Artificial Sequence
  derived and/or modified sequence
MESSRVRLLPLLGAALLLMLPLLGTRAQEDAELQPRALDIYSAVDDASHEKELIEALQEVLKKLKSKRVPIYEKKYGQVPMCDAGEQCAVRKGARIGKLCDCPRGTSCNSFLLKCL

SEQ ID NO: 144817 - DNA, 351 bp, Artificial Sequence
  derived and/or modified sequence
atggagagcagccgggtgaggctgttgccattgctcggggcagctttactccttatgctgccgctgctgggcactcgggctcaggaagacgctgaattgcagcctcgcgcactggatatctactcggctgtggatgatgcttcgcacgaaaaagagctcatcgaggcgcttcaggaggtgctcaagaagctaaagagtaagagagtgcctatctacgaaaagaagtatggacaggtgccgatgtgcgatgccggtgaacagtgtgcagtgagaaaaggtgccagaatcgggaagttatgtgattgcccgagaggcactagctgcaacagtttcttacttaaatgcctttag

SEQ ID NO: 144818 - DNA, 351 bp, Artificial Sequence
  derived and/or modified sequence
atggaatcttctagagtgagacttctccccctgctgggcgctgccctgttacttatgttacctctgctaggtacgcgggcacaggaagatgccgagctgcaaccacgcgccctggatatttattctgcggtcgatgacgccagtcacgagaaagaactcattgaggctttgcaagaggttctgaagaaactaaagtctaaacgggttcctatttacgaaaaaaagtacggacaagtgccaatgtgcgacgccggcgagcaatgtgccgtgcgaaagggcgcaagaatcggaaaattatgtgactgtcctcgcggaacttcgtgcaatagttttctgctgaagtgcctgtag

SEQ ID NO: 144819 - DNA, 351 bp, Artificial Sequence
  derived and/or modified sequence
atggaatcttctagagtgagacttctccccctgctgggcgctgccctgttacttatgttacctctgctaggtacgcgggcacaggaagatgccgagctgcaaccacgcgccctggatatttattctgcggtcgatgacgccagtcacgagaaagaactcattgaggctttgcaagaggttctgaagaaactaaagtctaaacgggttcctatttacgaaaaaaagtacggacaagtgccaatgtgcgacgccggcgagcaatgtgccgtgcgaaagggcgcaagaatcggaaaattatgtgactgcccccgcggaacctcctgcaattcatttctcctaaaatgtttatag

SEQ ID NO: 144820 - DNA, 915 bp, Artificial Sequence
  derived and/or modified sequence
agacggttgacccgggccctcctccacacccccttccttcttcgcctcctccctctttcctgcacgggggctcgggctcactataaaaggtgggagcgcgtggtgccccagcaacgacgagtttcagaacgatggagagctcccgcgtgaggctgctgcccctcctgggcgccgccctgctgctgatgctacctctgttgggtacccgtgcccaggaggacgccgagctccagccccgagccctggacatctactctgccgtggatgatgcctcccacgagaaggagctgatcgaagcgctgcaagaagtcttgaagaagctcaagagtaaacgtgttcccatctatgagaagaagtatggccaagtccccatgtgtgacgccggtgagcagtgtgcagtgaggaaaggggcaaggatcgggaagctgtgtgactgtccccgaggaacctcctgcaattccttcctcctgaagtgcttatgaaggggcgtccattctcctccatacatccccatccctctactttccccagaggaccacaccttcctccctggagtttggcttaagcaacagataaagtttttattttcctctgaagggaaagggctcttttcctgctgtttcaaaaataaaagaacacattagatgttactgtgtgaagaataatgccttgtatggtgttgatacgtgtgtgaagtattcttattttatttgtctgacaaactcttgtgtacctttgtgtaaagaagggaagctttgtttgaaaattgtatttttgtatgtggcatggcagaatgaaaattagatctagctaatctcggtagatgtcattacaacctggaaaataaatcaccctaagtgacacaaattgaagcatgtacaaattatacataataaagtgtttttaataattgcc

SEQ ID NO: 144821 - DNA, 351 bp, Artificial Sequence
  derived and/or modified sequence
atggagagcagcagagtgagactgctgcccctgctgggcgccgccctgctgctgatgctgcccctgctgggcaccagagcccaggaggacgccgagctgcagcccagagccctggacatctacagcgccgtggacgacgccagccacgagaaggagctgatcgaggccctgcaggaggtgctgaagaagctgaagagcaagagagtgcccatctacgagaagaagtacggccaggtgcccatgtgcgacgccggcgagcagtgcgccgtgagaaagggcgccagaatcggcaagctgtgcgactgccccagaggcaccagctgcaacagcttcctgctgaagtgcctgtag

SEQ ID NO: 144822 - DNA, 351 bp, Artificial Sequence
  derived and/or modified sequence
atggagtctagccgggtgaggctgctacctctcctgggagcagccctgctgctcatgctcccgcttctgggaacacgggctcaggaggacgctgagttacaaccccgggccttagacatttattccgcagtggatgacgcttcacatgagaaagagttaatcgaggctttgcaggaggtgctgaagaagctgaagtcaaaaagggtccccatctatgagaaaaagtacggtcaggtgcccatgtgcgacgcgggtgagcagtgtgctgtacgaaaaggggcacgcataggtaaactgtgcgactgcccacgcggtacttcttgtaatagctttttgctcaaatgtttatag

SEQ ID NO: 144823 - DNA, 351 bp, Artificial Sequence
  derived and/or modified sequence
atggagagcagccgggtgcggctgctgcccctgctgggcgccgccctgctgctgatgctgcccctgctgggcacccgggcccaggaggatgctgagctgcagccccgggccctggacatctacagcgctgtggatgatgccagccatgagaaggagctgattgaggccctgcaggaggtgctgaagaagctgaagagcaagagggtgcccatctatgagaagaagtatggccaggtgcccatgtgtgatgctggggagcagtgtgctgtgaggaagggggcccgcatcggcaagctgtgtgactgcccccggggcaccagctgcaacagcttcctgctgaagtgcctgtag

SEQ ID NO: 144824 - DNA, 351 bp, Artificial Sequence
  derived and/or modified sequence
atggagagcagccgggtgcggctgctgcccctgctgggcgccgcccttctgctcatgctcccgctgcttggtaccagggctcaggaggacgcggaactccagcctcgagcgctcgatatctacagtgctgtcgatgatgcttctcacgagaaggagttaattgaggcactgcaggaagtactaaaaaaactgaagtccaagcgggttccaatctacgagaagaagtacggccaggtgccaatgtgcgacgccggagagcaatgtgcggttcggaagggcgcacgtattggaaaactgtgtgactgtcctaggggcacctcgtgtaattccttcctactgaaatgtctgtag

SEQ ID NO: 144825 - RNA, 351 nt, Artificial Sequence
  derived and/or modified sequence
auggaaucuucuagagugagacuucucccccugcugggcgcugcccuguuacuuauguuaccucugcuagguacgcgggcacaggaagaugccgagcugcaaccacgcgcccuggauauuuauucugcggucgaugacgccagucacgagaaagaacucauugaggcuuugcaagagguucugaagaaacuaaagucuaaacggguuccuauuuacgaaaaaaaguacggacaagugccaaugugcgacgccggcgagcaaugugccgugcgaaagggcgcaagaaucggaaaauuaugugacuguccucgcggaacuucgugcaauaguuuucugcugaagugccuguag

SEQ ID NO: 144826 - RNA, 351 nt, Artificial Sequence
  derived and/or modified sequence
auggaaucuucuagagugagacuucucccccugcugggcgcugcccuguuacuuauguuaccucugcuagguacgcgggcacaggaagaugccgagcugcaaccacgcgcccuggauauuuauucugcggucgaugacgccagucacgagaaagaacucauugaggcuuugcaagagguucugaagaaacuaaagucuaaacggguuccuauuuacgaaaaaaaguacggacaagugccaaugugcgacgccggcgagcaaugugccgugcgaaagggcgcaagaaucggaaaauuaugugacugcccccgcggaaccuccugcaauucauuucuccuaaaauguuuauag

SEQ ID NO: 144827 - protein, 783 aa, Artificial Sequence
  derived and/or modified sequence
MESPGESGAGSPGAPSPSSFTTGHLAREKPAQDPLYDVPNASGGQAGGPQRPGRVVSLRERLLLTRPVWLQLQANAAAALHMLRTEPPGTFLVRKSNTRQCQALCMRLPEASGPSFVSSHYILESPGGVSLEGSELMFPDLVQLICAYCHTRDILLLPLQLPRAIHHAATHKELEAISHLGIEFWSSSLNIKAQRGPAGGPVLPQLKARSPQELDQGTGAALCFFNPLFPGDLGPTKREKFKRSFKVRVSTETSSPLSPPAVPPPPVPVLPGAVPSQTERLPPCQLLRRESSVGYRVPAGSGPSLPPMPSLQEVDCGSPSSSEEEGVPGSRGSPATSPHLGRRRPLLRSMSAAFCSLLAPERQVGRAAAALMQDRHTAAGQLVQDLLTQVRAGPEPQELQGIRQALSRARAMLSAELGPEKLLSPKRLEHVLEKSLHCSVLKPLRPILAARLRRRLAADGSLGRLAEGLRLARAQGPGAFGSHLSLPSPVELEQVRQKLLQLLRTYSPSAQVKRLLQACKLLYMALRTQEGEGAGADEFLPLLSLVLAHCDLPELLLEAEYMSELLEPSLLTGEGGYYLTSLSASLALLSGLGQAHTLPLSPVQELRRSLSLWEQRRLPATHCFQHLLRVAYQDPSSGCTSKTLAVPPEASIATLNQLCATKFRVTQPNTFGLFLYKEQGYHRLPPGALAHRLPTTGYLVYRRAEWPETQGAVTEEEGSGQSEARSRGEEQGCQGDGDAGVKASPRDIREQSETTAEGGQGQAQEGPAQPGEPEAEGSRAAEE

SEQ ID NO: 144828 - protein, 605 aa, Artificial Sequence
  derived and/or modified sequence
MRLPEASGPSFVSSHYILESPGGVSLEGSELMFPDLVQLICAYCHTRDILLLPLQLPRAIHHAATHKELEAISHLGIEFWSSSLNIKAQRGPAGGPVLPQLKARSPQELDQGTGAALCFFNPLFPGDLGPTKREKFKRSFKVRVSTETSSPLSPPAVPPPPVPVLPGAVPSQTERLPPCQLLRRESSVGYRVPAGSGPSLPPMPSLQEVDCGSPSSSEEEGVPGSRGSPATSPHLGRRRPLLRSMSAAFCSLLAPERQVGRAAAALMQDRHTAAGQLVQDLLTQVRAGPEPQELQGIRQALSRARAMLSAELGPEKLLSPKRLEHVLEKSLHCSVLKPLRPILAARLRRRLAADGSLGRLAEGLRLARAQGPGAFGSHLSLPSPVELEQVRQKLLQLLRTYSPSAQVKRLLQACKLLYMALRTQEGEGAGADEFLPLLSLVLAHCDLPELLLEAEYMSELLEPSLLTGEGGYYLTSLSASLALLSGLGQAHTLPLSPVQELRRSLSLWEQRRLPATHCFQHLLRVAYQDPSSGCTSKTLAVPPEASIATLNQLCATKFRVTQPNTFGLFLQGNQRQREAGQQRSSLKWPEGSFGAGDPEPAEKSF

SEQ ID NO: 144829 - DNA, 2352 bp, Artificial Sequence
  derived and/or modified sequence
atggagagccccggcgagagcggcgccggcagccccggcgcccccagccccagcagcttcaccaccggccacctggccagagagaagcccgcccaggaccccctgtacgacgtgcccaacgccagcggcggccaggccggcggcccccagagacccggcagagtggtgagcctgagagagagactgctgctgaccagacccgtgtggctgcagctgcaggccaacgccgccgccgccctgcacatgctgagaaccgagccccccggcaccttcctggtgagaaagagcaacaccagacagtgccaggccctgtgcatgagactgcccgaggccagcggccccagcttcgtgagcagccactacatcctggagagccccggcggcgtgagcctggagggcagcgagctgatgttccccgacctggtgcagctgatctgcgcctactgccacaccagagacatcctgctgctgcccctgcagctgcccagagccatccaccacgccgccacccacaaggagctggaggccatcagccacctgggcatcgagttctggagcagcagcctgaacatcaaggcccagagaggccccgccggcggccccgtgctgccccagctgaaggccagaagcccccaggagctggaccagggcaccggcgccgccctgtgcttcttcaaccccctgttccccggcgacctgggccccaccaagagagagaagttcaagagaagcttcaaggtgagagtgagcaccgagaccagcagccccctgagcccccccgccgtgccccccccccccgtgcccgtgctgcccggcgccgtgcccagccagaccgagagactgcccccctgccagctgctgagaagagagagcagcgtgggctacagagtgcccgccggcagcggccccagcctgccccccatgcccagcctgcaggaggtggactgcggcagccccagcagcagcgaggaggagggcgtgcccggcagcagaggcagccccgccaccagcccccacctgggcagaagaagacccctgctgagaagcatgagcgccgccttctgcagcctgctggcccccgagagacaggtgggcagagccgccgccgccctgatgcaggacagacacaccgccgccggccagctggtgcaggacctgctgacccaggtgagagccggccccgagccccaggagctgcagggcatcagacaggccctgagcagagccagagccatgctgagcgccgagctgggccccgagaagctgctgagccccaagagactggagcacgtgctggagaagagcctgcactgcagcgtgctgaagcccctgagacccatcctggccgccagactgagaagaagactggccgccgacggcagcctgggcagactggccgagggcctgagactggccagagcccagggccccggcgccttcggcagccacctgagcctgcccagccccgtggagctggagcaggtgagacagaagctgctgcagctgctgagaacctacagccccagcgcccaggtgaagagactgctgcaggcctgcaagctgctgtacatggccctgagaacccaggagggcgagggcgccggcgccgacgagttcctgcccctgctgagcctggtgctggcccactgcgacctgcccgagctgctgctggaggccgagtacatgagcgagctgctggagcccagcctgctgaccggcgagggcggctactacctgaccagcctgagcgccagcctggccctgctgagcggcctgggccaggcccacaccctgcccctgagccccgtgcaggagctgagaagaagcctgagcctgtgggagcagagaagactgcccgccacccactgcttccagcacctgctgagagtggcctaccaggaccccagcagcggctgcaccagcaagaccctggccgtgccccccgaggccagcatcgccaccctgaaccagctgtgcgccaccaagttcagagtgacccagcccaacaccttcggcctgttcctgtacaaggagcagggctaccacagactgccccccggcgccctggcccacagactgcccaccaccggctacctggtgtacagaagagccgagtggcccgagacccagggcgccgtgaccgaggaggagggcagcggccagagcgaggccagaagcagaggcgaggagcagggctgccagggcgacggcgacgccggcgtgaaggccagccccagagacatcagagagcagagcgagaccaccgccgagggcggccagggccaggcccaggagggccccgcccagcccggcgagcccgaggccgagggcagcagagccgccgaggagtag

SEQ ID NO: 144830 - DNA, 2352 bp, Artificial Sequence
  derived and/or modified sequence
atggagtcacccggcgagtctggagctggcagcccaggtgccccaagcccttcttctttcacaacgggacacctggcccgagaaaagcctgcccaggatcctctgtatgacgttcccaacgcctcaggaggacaagcgggaggacctcaacgaccaggacgtgttgtttctctcagggagaggctgttattaacccgcccggtgtggctacagctgcaggcgaatgccgccgctgcactgcatatgctccgtaccgagcccccaggaacatttctggtccgtaagagtaacactcggcaatgccaggcactctgcatgaggttacctgaggccagcggaccgagctttgtgagtagccattacatcctggaaagtcccgggggggtcagcctcgaaggcagtgaactaatgtttcccgatcttgtgcagttaatctgcgcctattgtcacacacgcgacatcttactgctgcccttgcagctgccgagagctatccaccatgctgccacccacaaggagcttgaagcgatatcacacctggggattgagttctggtcttcatctctcaacattaaggcacagagggggcctgctggagggcctgtccttcctcagctgaaggccaggtctcctcaggagttggatcaggggacaggggctgcattatgcttcttcaaccccctcttcccaggcgacttaggccccactaaacgagagaaattcaaacgtagctttaaagtccgggttagtacagagacgagttcccctctgagcccacctgccgtaccgccaccccccgtgccagttctgccgggagccgtgccttcacagacagaacgtctgcccccctgccagttgttacgcagagaaagctcggtcggataccgggtccccgctggaagcggaccttctctgccaccaatgccgtccctccaagaggtggattgtggatcaccaagcagttcagaggaggagggcgtgccgggcagtagaggttcacctgctacatctcctcacctcggacggcggagacccctcctccgcagcatgtccgccgcattctgttctctgttggctccagagcgccaagttggccgagccgccgcagccctgatgcaggacaggcataccgccgctgggcagttagtgcaggacctccttacccaagtcagagcaggacccgagcctcaagaactccagggcatacggcaggcactgtcaagggccagagcaatgcttagtgctgagctgggccccgaaaaactcctaagccccaaacgattggaacatgtcctggaaaaatccctgcactgcagtgtcttaaagcctctgagaccaatactggctgccaggcttcgcaggaggcttgcagccgatgggtccttgggcaggctcgctgaaggtttgcggcttgcacgggcccaaggaccgggtgcgttcggcagtcatctctcgctgccttcccctgtggagctggaacaggtgcggcagaagctgttacagcttctcagaacctactccccatctgcccaggtcaagcgccttctgcaggcttgcaaactcctgtatatggcccttagaacccaggaaggagaaggcgccggagctgacgagttcctgccactgttgagcctggtcctcgctcattgcgacctgccagaactccttctggaagcggagtacatgtctgagctcttggagcccagccttctgaccggcgagggaggctactatctcacaagcctgtcagctagtctggcgctgttgtctggtctggggcaggcacacactctgcccctgtctccagttcaggagctgaggcgaagtttatcattgtgggagcagcgaagactcccagcgacacattgcttccagcacctgctgcgcgtcgcatatcaggacccttcctctggctgtaccagcaagacccttgctgtcccccctgaggcttcaattgctacattgaatcaactctgcgcgacgaagtttcgtgtgactcagcccaacacatttgggcttttcctttacaaagaacagggataccacagactgcctccaggagcgcttgcccaccgcttacccacaacaggatatctggtgtatcgaagggccgagtggccagagactcagggagctgtaacagaggaagaagggagcggacaatctgaggcccgctcgaggggtgaagagcaaggatgtcagggcgatggggacgcaggggttaaagcaagccccagggacataagggagcagtccgagaccactgctgaggggggccagggccaggcgcaggaaggcccagcacagccgggcgaaccggaagccgaagggtccagagcagcggaggagtag

SEQ ID NO: 144831 - DNA, 2352 bp, Artificial Sequence
  derived and/or modified sequence
atggagagccctggagagagcggggccggcagccctggggcccccagccccagcagcttcaccaccggccacctggcccgggagaagccagcccaggaccccctgtatgatgtgcccaatgccagcggcggccaggccggcggcccccagaggcctggccgggtggtgtccctgcgggagcggctgctgctgaccaggcctgtgtggctgcagctgcaggccaatgctgctgctgccctgcacatgctgaggacagagcccccaggcaccttcctggtgaggaagagcaacacccggcagtgccaggccctgtgcatgaggctgcctgaggccagcggccccagctttgtgagcagccactacatcctggagagccctgggggcgtgtccctggagggcagcgagctgatgtttcctgacctggtgcagctgatctgtgcctactgccacacccgggacatcctgctgctgcccctgcagctgccccgggccatccaccacgccgccacccacaaggagctggaggccatcagccacctgggcatcgagttctggagcagcagcctgaacatcaaggcccagaggggccctgctgggggccctgtgctgccccagctgaaggcccggagcccccaggagctggaccagggcaccggggccgccctgtgcttcttcaaccccctcttccctggggacctgggccccaccaagcgggagaagttcaagaggagcttcaaggtgcgggtgtccacagagaccagcagccccctgagccccccagctgtgcccccacctcctgtgcctgtgctgcctggagctgtgcccagccagacagagcggctgcccccctgccagctgctgcggcgggagagctctgtgggctacagagtgcctgctggcagcggccccagcctgccccccatgcccagcctgcaggaggtggactgtggcagccccagcagcagcgaggaggagggcgtgcccggcagccggggcagccctgccaccagcccccacctgggcagaagaagacccctgctgcgctccatgtctgctgccttctgcagcctgctggcccctgagcggcaggtgggccgggctgctgctgccctgatgcaggacagacacacagctgctggccagctggtgcaggacctgctgacccaggtgcgggccggccctgagccccaggagctgcagggcatccggcaggccctgagccgggcccgggccatgctgtctgctgagctgggccctgagaagctgctgagccccaagaggctggagcacgtgctggagaagagcctgcactgcagcgtgctgaagcccctgcggcccatcctggccgcccggctgcggcggcggctggccgcagatggcagcctgggccgcctggccgagggcctgcggctggcccgggcccagggccctggggccttcggcagccacctgagcctgcccagccctgtggagctggagcaggtgcggcagaagctgctgcagctgctgcggacctacagccccagcgcccaggtgaagaggctgctgcaggcctgcaagctgctgtacatggccctgcggacccaggagggggagggcgctggagcagatgagttcctgcccctgctgagcctggtgctggcccactgtgacctgcctgagctgctgctggaggccgagtacatgtctgagctgctggagcccagcctgctgaccggggagggcggctactacctgaccagcctgagcgccagcctggccctgctgagcggcctgggccaggcccacaccctgcccctgagccctgtgcaggagctgcggcgcagcctgagcctgtgggagcagaggcggctgcctgccacccactgcttccagcacctgctgcgggtggcctaccaggaccccagcagcggctgcaccagcaagaccctggccgtgcccccagaggccagcatcgccaccctgaaccagctgtgtgccaccaagttccgggtgacccagcccaacaccttcggcctcttcctgtacaaggagcagggctaccaccggctgcccccaggggccctggcccaccggctgcccaccaccggctacctggtgtaccgccgggcagagtggccagagacccagggcgctgtgacagaggaggagggcagcggccagagcgaggcccggagcagaggagaggagcagggctgccagggagatggagatgctggggtgaaggccagcccccgggacatccgggagcagagcgagaccacagctgagggcggccagggccaggcccaggagggccctgcccagcccggggagcctgaggccgagggcagcagagctgctgaggagtag

SEQ ID NO: 144832 - DNA, 2352 bp, Artificial Sequence
  derived and/or modified sequence
atggagagccccggcgagagcggcgccggcagccccggcgccccctctccaagtagcttcacgactggccacctggcccgagaaaagcctgctcaggaccccctctatgacgttcccaatgcctcaggcggccaggccggcggccctcagaggcctggacgggtcgtcagcctgcgtgaacgattattgctcacaaggcctgtgtggctgcagctgcaggccaatgccgcggcagcccttcatatgcttagaacagagcctccgggaacttttctcgttcggaagtcaaacaccaggcagtgccaggctctatgtatgcgcctgccggaggctagtggcccgagcttcgtgtctagtcattatattctggaaagtcctggcggggtttctttggagggatccgagttaatgtttcctgacctggttcaactcatctgcgcctactgccacaccagggacatactgctcttgccactgcagctgcctagggctatccaccacgccgcaacccataaagaattggaagcaatctctcacttggggattgaattctggtcatcttctctcaatatcaaggctcaaagggggcctgccgggggaccagtgctccctcagttgaaagcccggagccctcaggaacttgatcagggaacaggtgctgcactctgcttctttaatccactgttccctggtgatctgggcccaacaaaaagagagaagttcaaacgcagttttaaagtacgggtatccacagagacttccagtcctttgtccccccctgccgtgccaccacctcctgtgcctgtcctgccaggcgctgttccatctcagaccgagagactgcccccctgccagctgctgcggagagagtccagtgtaggatacagggtccccgccggaagtggcccctccttaccacctatgccgagcctgcaggaggtggattgcgggtcaccatcatcatccgaggaggagggcgtgcctgggagtagagggagcccagctacctcgccacaccttggccgccggcgccccctactcaggtccatgtctgcagcattttgtagcctcctcgcccccgaaaggcaagttgggcgggccgcagccgcattaatgcaggacagacatactgctgccggacaactggttcaggacttgctcacccaagtgcgagctggacccgagccccaggagcttcaaggaatacgccaggccctgagtagagctcgggctatgttgtcagcagaactggggccagaaaaactcctgtctcctaaacgccttgaacacgtgctggagaaatcgcttcactgctcagtgcttaagcctctgcgacccatcctcgcggcccgtctccgccgacgccttgctgcagatggatctctgggtaggttggcggaaggcttaaggcttgcgcgcgcccaaggaccaggcgctttcggttctcacctgtctcttccaagcccagtcgagctagagcaggtccgacagaagttgcttcaactcctgcgcacgtattccccatctgctcaagtcaaacgcctgttgcaggcttgcaagctgctgtacatggccctgcggacccaggaaggtgaaggagctggcgctgacgaattcttgccacttctgtcactggtcttggcccattgcgatctccctgaactgctcctggaagcagagtatatgtctgaacttttggagccctctctgctgactggagaaggaggctactatctcacgagcctgagtgcctccctggctcttctcagcggattagggcaagcacacacacttcctctgtcacccgtgcaggagctcaggcggagcctgtctctttgggagcagagacgtctgcccgccacacactgttttcagcacctgctgcgcgttgcttaccaagatccatccagcggttgcacaagtaagacgctggctgtgccacccgaggcaagtatagctacactcaatcagctttgcgccacaaaattccgggttacacaaccgaatacctttggcctgttcttgtacaaggaacagggctaccacaggctcccaccaggcgctttggctcaccggttacctaccaccgggtacctggtgtatcggcgcgccgagtggccagagacccaaggtgcagttaccgaggaagaaggctcaggccagagtgaagctagaagcagaggagaagagcaaggctgtcagggcgatggcgacgccggagttaaagcgagccccagggacatacgagagcagtctgagaccaccgccgaaggaggtcagggtcaagctcaggaaggtccggcccaacccggcgagccggaagccgagggttcaagggcagctgaagagtag

SEQ ID NO: 144833 - DNA, 2352 bp, Artificial Sequence
  derived and/or modified sequence
atggagagccccggtgagagtggggctggatcccccggagcaccgagtccgtcctccttcaccactggtcatctcgcccgtgagaagcctgctcaggatcccctgtacgatgtgcctaatgccagtggcggacaggctggcggtccacagcgcccaggacgagtcgtaagcctccgggagcgcctgcttctgacccgaccagtctggctgcagttacaggcgaatgctgcagcggcactccatatgctgcggaccgagcctcctggcaccttcctggtgaggaaaagtaacacccggcagtgccaggctttatgcatgagactgcctgaagcttccggcccatcctttgtttccagccactacattctagagtccccaggtggcgtctcactcgaaggaagcgagctcatgtttcccgatctcgtccagttaatctgcgcttattgccacactcgggatatactgctgctgcccctacagctgcctagagccatccaccacgcagccacccacaaagaactggaagcaatctcacacctgggtatcgagttctggtcctcatcactgaacattaaggcgcagaggggccctgctggcggacccgtcctgccccagcttaaggccagaagtccacaagaattggatcagggcacgggcgcagccctgtgctttttcaacccactgtttccaggagaccttgggcctaccaaacgggaaaaatttaagcggtcctttaaggtgcgcgtttcgaccgaaacgtccagcccgcttagtcccccagcagtgcccccacccccagtccccgtgctgccgggagcagttccgagccagaccgaacgactgcccccttgccagttgttgcgtagagaaagttcagtgggatatcgagttcctgctggtagtggcccttcgttaccacccatgcccagtttgcaggaggtagactgtgggtcgccaagctcatcggaggaagagggagttcctgggtcaaggggctctccggcaacttcccctcacttggggaggaggcgccctctactgaggagcatgagtgcagctttttgtagcctcctggctcccgagcgacaggtcgggagggctgctgctgctcttatgcaagaccgacatactgctgctgggcagctcgtgcaggatctcctcacccaggttcgcgcaggccctgaaccccaagagctccaagggatccgtcaggcattgtctagggctagagcaatgctaagtgccgagctgggtccggagaagctgttgtctccaaaaaggcttgagcacgtgcttgagaagtctttacactgctctgttctgaagcctcttcgtccgattctagccgcaaggctgaggcgcagactggcagccgatggctctttgggcaggctcgctgagggattgaggcttgcaagggctcagggacctggcgcattcggctcccacttatcactgccgtctccagtcgaactggaacaggtgaggcaaaaactgttgcagctcctgcgcacatacagtccaagcgctcaggttaaaagacttctgcaggcttgcaaacttctgtatatggctttgcgaacccaagagggcgagggcgcaggcgcagacgagttcctgccattattaagcctcgttcttgcgcattgcgatctgcccgaacttcttcttgaagccgagtacatgtcagagctcctggagccaagtctgcttacaggagagggcggttactatctgacgtccctcagtgccagccttgcactcctaagcgggctcggccaggcgcacacactccccctcagccctgtgcaggagctgagacgcagccttagcttatgggagcagagacgcctgcccgcaacccactgttttcagcatctactcagagtggcctatcaggacccttcctccggttgtacaagcaaaacattagctgttccacctgaagccagcatcgctactctgaaccagttgtgcgctactaagttccgggtgacgcagccaaacacattcgggctttttctgtacaaagaacagggctaccaccgcctgccacctggagccctggcccaccggttgcctacaaccggctacctcgtttatagaagagcggaatggcccgagacacaaggagcagtgacggaggaagaaggctcaggtcaaagtgaggctaggtccagaggagaagagcagggctgccaaggtgacggcgatgccggagtcaaggcctctcccagggacattcgagagcagtctgaaaccacagccgaaggcggtcaaggccaagcccaagagggcccagcccaacccggtgaacctgaagctgaggggagcagggccgctgaggagtag

SEQ ID NO: 144834 - DNA, 2693 bp, Artificial Sequence
  derived and/or modified sequence
gtggacacacaagagttaactggcgggtgtgacaggcggaccgccctcaggaagtgttactcactggggatgtgcgtgccttgccttgggactggattctcttcctgaagcgaaggagctcccagccatggaaagccctggagagtcaggcgcgggctctcctggagcccccagcccgtccagcttcactactgggcacctggcgagagaaaagccagcccaggacccactgtatgacgtgcccaatgccagcggcgggcaggcaggcgggccgcagcggccggggcgcgttgtgagcctgcgggagcgcctgctgctcacccggcccgtgtggctgcagctgcaagccaacgcagcggccgcactgcacatgctgaggaccgagcccccggggacgttcctcgtgcggaaatctaacacccgccagtgccaggccctgtgcatgcggttgcctgaagccagtggcccctccttcgtctccagccactacatcctggagagccctggcggcgtctccttggagggctcggagctcatgttcccagacctagtccagctcatctgtgcctactgccacacccgggacatccttctcctcccgctgcagctccccagagccatccaccacgcagccactcacaaagagctggaggccatctcccatctgggcattgagttctggagctcctccctcaacatcaaggctcagcggggcccggctggaggcccagtgttgccccagctgaaggcccggtcccctcaagagctggaccagggcaccggagccgccttgtgcttcttcaaccccctgttcccgggggacctagggcccaccaagcgggagaaattcaagagaagcttcaaagtgcgcgtgtccacagagacctccagccccctgtctccacctgccgtgccacctccccccgtccccgtgctgccaggggcagtccccagccagacagagcggctgcccccttgccagctgctacggagggagagctcagtggggtaccgcgtgccagcaggcagtggccctagccttccgcctatgccctccctccaagaggtggactgcggctcccccagcagctccgaggaggagggggtgccagggtcccgggggagcccagcgacctcaccccacctgggccgccgacgacctctgcttcggtccatgagcgccgccttctgctccctactggcaccggagcggcaggtgggccgggctgcggcagcactgatgcaggaccgacacacagccgcgggccagctggtgcaggacctactgacccaggtgcgggctgggcccgagccccaggagctgcagggcatccgtcaggcgctgagccgggcccgggccatgctgagtgcggagctgggccctgagaagctgctgtcgcctaagaggctggaacatgtcctggagaagtcattgcattgctctgtgctcaagcctctccggcccatcctggcagcccgcctgcggcgccggcttgccgcagacggctccctgggccgcctagctgagggcctccgcctggcccgggcccagggccccggagccttcgggtcccacctgagcctgccctccccagtagagttggagcaagtgcgccagaagctgctgcagctgctccgcacctactcacccagcgcccaggtcaagcggctcctgcaggcctgcaagctgctctacatggccctgaggacccaggaaggggagggcgcgggtgccgacgagttcctgcctctgctgagcctcgtcttggcccactgtgaccttcctgagctgctgctggaggccgagtacatgtcggagctgctggagcccagcctgcttactggagagggtggctactacctgaccagcctctctgccagcctggccctgctgagtggcctgggtcaggcccacaccctcccactgagccccgtgcaggagctacggcgctccctcagcctctgggagcagcgccgcctgcctgccacccactgcttccagcacctcctccgagtagcctatcaggatcccagcagtggctgcacctccaagaccctggccgtgcccccagaagcctcgattgccaccctgaaccagctctgtgccaccaagttccgagtgacccagcccaacacttttggcctcttcctgtacaaggagcagggctaccaccgcctgccccctggggccctggcccacaggctgcccaccactggctacctcgtctaccgccgggcggagtggcctgagacccagggggctgtgacagaggaggagggcagtgggcagtcagaggcaagaagcagaggggaggagcaagggtgccagggagatggggatgctggggtcaaagccagccccagggacattcgggaacagtctgagacaactgctgaagggggccagggtcaagcccaggaaggccctgctcagccaggggaaccagaggcagagggaagccgggcagcagaggagtagcttgaagtggccagaagggtcattcggggcgggagaccctgagcctgctgagaaatccttttagcgccagcaagccccacccagggccctgtcctgtgtctgccaccacctttgtctgatacttgtttccagggaagctgggggaactgccacatctgaggaactggaataaagatgagggggcttcgggggcccccagactgtgtgcccaagg

SEQ ID NO: 144835 - protein, 454 aa, Artificial Sequence
  derived and/or modified sequence
MCAAQMPPLAHIFRGTFVHSTWTCPMEVLRDHLLGVSDSGKIVFLEEASQQEKLAKEWCFKPCEIRELSHHEFFMPGLVDTHIHASQYSFAGSSIDLPLLEWLTKYTFPAEHRFQNIDFAEEVYTRVVRRTLKNGTTTACYFATIHTDSSLLLADITDKFGQRAFVGKVCMDLNDTFPEYKETTEESIKETERFVSEMLQKNYSRVKPIVTPRFSLSCSETLMGELGNIAKTRDLHIQSHISENRDEVEAVKNLYPSYKNYTSVYDKNNLLTNKTVMAHGCYLSAEELNVFHERGASIAHCPNSNLSLSSGFLNVLEVLKHEVKIGLGTDVAGGYSYSMLDAIRRAVMVSNILLINKVNEKSLTLKEVFRLATLGGSQALGLDGEIGNFEVGKEFDAILINPKASDSPIDLFYGDFFGDISEAVIQKFLYLGDDRNIEEVYVGGKQVVPFSSSV

SEQ ID NO: 144836 - DNA, 1365 bp, Artificial Sequence
  derived and/or modified sequence
atgtgtgcagcacagatgccgcctttggcccacatattccgggggactttcgtgcactccacatggacttgtccaatggaagtattgagggatcacctcctcggggtgagcgactctggaaaaattgtgttcctggaggaagcctcccaacaggagaagttagccaaggaatggtgttttaagccctgtgaaatccgagagcttagtcatcacgagtttttcatgccaggtctggttgatacccatattcacgccagccagtactccttcgccggaagttccatcgatctccccttgttagaatggctgacaaagtatacctttcctgcagaacatcgcttccagaacatagatttcgccgaagaggtctacaccagagtggtgcgccgcacactgaaaaatgggacaactactgcttgctactttgcaacaatccacacagatagttcactcctgctggcagatattacagataaatttgggcagcgggcctttgtcggaaaagtttgcatggacctgaatgacaccttcccagaatataaagaaaccacagaggagtctattaaagagaccgagaggttcgtgagcgaaatgcttcaaaaaaattattcaagggtcaaacccatcgtgaccccgcgttttagcctgtcttgctcagaaactttaatgggggagttggggaatatagccaagacccgggacctccacatccagtcacatatatccgagaatcgggacgaagtggaagcagtgaagaacctgtatccttcttacaagaattataccagtgtttacgacaagaataacctgctcacaaacaagactgtaatggcccatgggtgctatttgtctgcggaagagttaaatgttttccatgagcgcggcgcttctattgcacactgcccgaactctaacctgagcctcagttctgggtttctgaatgttttagaagtgctcaagcacgaagtcaagattggtctcggcacagatgtggctgggggttacagttacagtatgttggacgccataagacgcgccgtgatggttagtaatattctcctgattaacaaagtgaatgaaaagagcctgactctgaaagaagtattccggcttgccacgcttggtggcagccaggcactgggcctggacggggagatcgggaatttcgaggtgggcaaggaatttgacgccattcttatcaatcccaaggcttctgactctcctatagacctcttttacggcgattttttcggcgatatcagcgaggcagtgatccagaagttcttgtatttaggcgacgaccggaacattgaggaggtttatgtgggggggaagcaagtggtccctttttctagctccgtatag

SEQ ID NO: 144837 - DNA, 1365 bp, Artificial Sequence
  derived and/or modified sequence
atgtgcgcggctcaaatgcctcctctggctcacatatttcggggcactttcgttcactctacctggacctgtcctatggaggtattgagggatcatctgttaggagttagtgattccggcaagatcgtttttcttgaagaagcctcacagcaggaaaagttggccaaggagtggtgcttcaaaccctgcgagatacgggaactttcccatcacgagttttttatgcccgggttagtcgatacacatattcacgcgtcccagtactcattcgctgggagttcaattgacctgcctctccttgagtggctgactaaatatacattccctgcagaacaccgattccagaacatcgacttcgctgaggaggtatataccagggtggtgaggcgcaccctaaagaatggaaccaccacagcgtgttactttgccactatccatacagacagctcacttctcctggcagacatcaccgataaatttgggcagagagcatttgtgggtaaagtgtgtatggatttaaacgacacgttccccgaatacaaagaaacaactgaagagtcaatcaaagagaccgaaagattcgtgtctgagatgctacagaaaaattattcaagggtgaagcctattgtcaccccaaggtttagcctgtcctgcagcgaaaccctgatgggagaactcggaaatattgccaaaaccagagatctgcacatccaatcacacattagtgagaaccgtgacgaagttgaggccgtgaagaatctttatcccagctacaagaattatacaagtgtgtatgacaagaataatctgctgactaacaaaactgttatggctcacgggtgttacttgtctgccgaggagttgaatgtgtttcatgagcggggcgctagtatagcccattgcccaaattcaaatttaagcttatcatctggcttcctaaacgtgctagaggtgctcaaacacgaagtgaagatcggacttgggacggacgtggccggcggctactcctactccatgctggacgcaatcagacgggcggtaatggtgagcaatatcctgctgatcaacaaagtaaacgagaagtccttgacacttaaagaggtctttcgactcgccacacttggcggtagtcaagccctgggtcttgacggggagatcgggaacttcgaagtgggcaaagaattcgatgccatcctgattaaccccaaagcctctgactcccctatcgacctgttctacggcgacttttttggcgatattagcgaggcggttattcagaagtttctctacttaggagacgacagaaatattgaagaagtctatgtggggggcaaacaggtagtgcctttcagctccagtgtatag

SEQ ID NO: 144838 - DNA, 5340 bp, Artificial Sequence
  derived and/or modified sequence
cggcagccgcccgcagctgcagagagtcccgctgcgtctccgccgcgtgcgccctcctcgaccagcagacccgcgctgcgctccgccgctgacatgtgtgccgctcagatgccgcccctggcgcacatcttccgagggacgttcgtccactccacctggacctgccccatggaggtgctgcgggatcacctcctcggcgtgagcgacagcggcaaaatagtgtttttagaagaagcatctcaacaggaaaaactggccaaagaatggtgcttcaagccgtgtgaaataagagaactgagccaccatgagttcttcatgcctgggctggttgatacacacatccatgcctctcagtattcctttgctggaagtagcatagacctgccactcttggagtggctgaccaagtacacatttcctgcagaacacagattccagaacatcgactttgcagaagaagtatataccagagttgtcaggagaacactaaagaatggaacaaccacagcttgttactttgcaacaattcacactgactcatctctgctccttgccgacattacagataaatttggacagcgggcatttgtgggcaaagtttgcatggatttgaatgacacttttccagaatacaaggagaccactgaggaatcgatcaaggaaactgagagatttgtgtcagaaatgctccaaaagaactattctagagtgaagcccatagtgacaccacgtttttccctctcctgctctgagactttgatgggtgaactgggcaacattgctaaaacccgtgatttgcacattcagagccatataagtgaaaatcgtgatgaagttgaagctgtgaaaaacttataccccagttataaaaactacacatctgtgtatgataaaaacaatcttttgacaaataagacagtgatggcacacggctgctacctctctgcagaagaactgaacgtattccatgaacgaggagcatccatcgcacactgtcccaattctaatttatcgctcagcagtggatttctaaatgtgctagaagtcctgaaacatgaagtcaagatagggctgggtacagacgtggctggtggctattcatattccatgcttgatgcaatcagaagagcagtgatggtttccaatatccttttaattaataaggtaaatgagaaaagcctcaccctcaaagaagtcttcagactagctactcttggaggaagccaagccctggggctggatggtgagattggaaactttgaagtgggcaaggaatttgatgccatcctgatcaaccccaaagcatccgactctcccattgacctgttttatggggacttttttggtgatatttctgaggctgttatccagaagttcctctatctaggagatgatcgaaatattgaagaggtttatgtgggcggaaagcaggtggttccgttttccagctcagtgtaagaccctcgggcgtctacaaagttctcctgggattagcgtggttctgcatctcccttgtgcccaggtggagttagaaagtcaaaaaatagtaccttgttcttgggatgactatccctttctgtgtctagttacagtattcacttgacaaatagttcgaaggaagttgcactaattctcaactctggttgagagggttcataaatttcatgaaaatatctccctttggagctgctcagacttactttaagctcaaacagaagggaatgctattactggtggtgttcctacggtaagacttaagcaaagcctttttcatatttgaaaatgtggaaagaaaagatgttcctaaaaggttagatattttgagctaataattgcaaaaattagaagactgaaaatggacccatgagagtatatttttatgagggagcaaaagttagactgagaacaaacgttagaaaatcacttcagattgtgtttgaaaattatatactgagcatactaatttaaaaagagaacttgttgaaatttaaaacgtgtttctaggttgaccttgtgttttagaaatttgcacttaatggaatttgcatttcagagatgtgttagtgttgtgctttgccttctttggcgatgaatgtcagaaattgaatgccacatgctttcataatatagttttgtgcttcaaagtgtttgacagaagttgggtattaaagatttaaagtctcttaggaatattattcatgtaactccatggcataaatagttgtatttttgtgtactttaaaatcaacttataactgtgagatgttattgcttccattttattagaagagaaacaaattccatgctttatggaatttatgtagactggagtcttcgtgaactggggcaaatgctggcatccaggagccgccaatactaacaggacaggttccattgccatggcctattccacccaaacaatatgttgtagtttctggaaattccatactcagatatcagtctgctagaactttaaaatgaaggacaaatcctgttaaagaaatattgttaaaaatctttaaaccctgtgtattgaaagcactctattttctaattttatccagttttctgtttaactccttataatgtttaggatattaaaattttaggataatgaagagtacataatgtcctacttaatatttatgttaataggacttaattcttactagacatctaggaacattacaaagcaaagactatttttatgcttccataacctagaattaaaaccaaattatgaccttatgataaatctttaagtattggtgtgaatgttatttaaattctatatttttcttatttaattacaaatactataaatgagcaaggaaaaggaatagactttcttaatatattataacactcattcctagagcttaggggtgactctttaatattaccttatagtagaaactttatgtaatatagctaactccgtatttacagaacaaaaaaacacagttccccctcctgtagtataaattttattttcacatacttagctaatttagcagtaattggcccagttttttccctaatagaaatacttttagatttgattatgtatacatgacacctaaagagggaacaaaagttagttttatttttttaataaacaacagagtttgttttgtgagataagtatcttagtaaacccaatttccagtcttagtctgtatttccaatatttctaattcctgagccacgtcaaagatgccttgccaaatttctccccatttctctacggggctagcaaaaatcttcagctttatcactcaacccctgccaaaggaacttgattacatggtgtctaaccaaatgagcaggcttaggaatttagatgagatgtgtaagattcacttacaggcagtagctgcttctagcatttgcaagatcctacacttttaccttctttaagggtgtacattttgatgttgaacatcagttttcatgtagacttaggactcatgtgcagtaaatataaataagtgtagcatcagaagcagtaggaatggccgtatacaaccatcctgttaaacatttaaatttagctctgatagtgtgttaagacctgaatatctttcctagtaaaaataggatgtgttgaaatatttatatgtactttgatctctccacatcacttataacttatgtgttttatttctccaagtgcggtgttcctgaatgttatgtatgcttttttttctgtaccacaggcattatctatacctggggccagattttctgcactttgaaatgttgcctttgcctaatgtaggttgactttctgaattgtggagaggcacttttccaagccaatcttatttgtcactttttgttttaatatcttgctctctgacaggaaagaaacaattcacttaccagcctcctcaccccatcctccaccatttccttaatgttccatggtattttcaacggaatacactttgaaaggtaaaaacaattcaaaagtatcgattatcataaattcacaaaatatttttgcaaccagaacacaaaagcaggctagtcagctaaggtaaatttcattttcaaacgagagggaaacatgggaagtaaaagattaggatgtgaaaggttgtcctaaacagaccaaggagactgttccctaatttattctcttggctggttctctcattgaattatcagaccccaagaggagatattggaacaggctcccttcatgccaagggtctttctaagttaatactgtgagcattgagcccccattaaaactcttttttacttcagaaagaattttacaggttaaagggaaagaaatggtgggaaactctccccgtaatgcttagccaactttaaagtgtacccttcaatatccccattggcaactgcagctgagatcttagagaggaaatataaccggtgtgagatctagcaatgcattttgaatcttcactccctaccaggctcttcctatttttaatctcttcacctcagaactagacatatggagagctttaaaggcaagctggaaggcacattgtatcaattctaccttgtgctatacgtaggagagatccaaaatttggatgcttctggagactcttagacatcttttcattgttgtccatttttaaagttgatgattgctggaaacattcacacgcttaaaagcaatggtgtgagttattaatgggtaaactaagaagtgttataggcaatgacttgaaatggtttttaaattgtatggattgttaagaattgttgaaaaaaaattttttttttttggacagcttcaaggagatgttagcaatttcagatatactagccagtttaggtatgactttggaagtgcagaaacagaaggatactgttagaaaatcctaacattggtctccgtgcatgtgttcacacctggtctcactgcctttccttcccacagacctgagtgtgaaagactgagagttgaggagttactttgtggatcttgtccaaatttagtgaaatgtggaagtcaaccagaccaatgatggaattaaatgtaaattccaagagggctttcacagtccacagggttcaaatgacttgggtaacagaagttattcttagcttacctgttatgtgacagtgatttacctgtccatttccaacccaaaagcctgtcagaaagcattctttagagaaaaccactttacatttgttgttaaactcctgatcgctactcttaagaatatacatgtatgtattcataggaacattttttctcaatatttgtatgattcgcttactgttattgtgctgagtgagctcctgtgtgcttcagacaaaaataaatgagactttgtgtttacgtta

SEQ ID NO: 144839 - DNA, 2019 bp, Artificial Sequence
  derived and/or modified sequence
gcccgcagctgcagagagtcccgctgcgtctccgccgcgtgcgccctcctcgaccagcagacccgcgctgcgctccgccgctgacatgtgtgccgctcagatgccgcccctggcgcacatcttccgagggacgttcgtccactccacctggacctgccccatggaggtgctgcgggatcacctcctcggcgtgagcgacagcggcaaaatagtgtttttagaagaagcatctcaacaggaaaaactggccaaagaatggtgcttcaagccgtgtgaaataagagaactgagccaccatgagttcttcatgcctgggctggttgatacacacatccatgcctctcagtattcctttgctggaagtagcatagacctgccactcttggagtggctgaccaagtacacatttcctgcagaacacagattccagaacatcgactttgcagaagaagtatataccagagttgtcaggagaacactaaagaatggaacaaccacagcttgttactttgcaacaattcacactgactcatctctgctccttgccgacattacagataaatttggacagcgggcatttgtgggcaaagtttgcatggatttgaatgacacttttccagaatacaaggagaccactgaggaatcgatcaaggaaactgagagatttgtgtcagaaatgctccaaaagaactattctagagtgaagcccatagtgacaccacgtttttccctctcctgctctgagactttgatgggtgaactgggcaacattgctaaaacccgtgatttgcacattcagagccatataagtgaaaatcgtgatgaagttgaagctgtgaaaaacttataccccagttataaaaactacacatctgtgtatgataaaaacaatcttttgacaaataagacagtgatggcacacggctgctacctctctgcagaagaactgaacgtattccatgaacgaggagcatccatcgcacactgtcccaattctaatttatcgctcagcagtggatttctaaatgtgctagaagtcctgaaacatgaagtcaagatagggctgggtacagacgtggctggtggctattcatattccatgcttgatgcaatcagaagagcagtgatggtttccaatatccttttaattaataaggtaaatgagaaaagcctcaccctcaaagaagtcttcagactagctactcttggaggaagccaagccctggggctggatggtgagattggaaactttgaagtgggcaaggaatttgatgccatcctgatcaaccccaaagcatccgactctcccattgacctgttttatggggacttttttggtgatatttctgaggctgttatccagaagttcctctatctaggagatgatcgaaatattgaagaggtttatgtgggcggaaagcaggtggttccgttttccagctcagtgtaagaccctcgggcgtctacaaagttctcctgggattagcgtggttctgcatctcccttgtgcccaggaaagaaacaattcacttaccagcctcctcaccccatcctccaccatttccttaatgttccatggtattttcaacggaatacactttgaaagacctgagtgtgaaagactgagagttgaggagttactttgtggatcttgtccaaatttagtgaaatgtggaagtcaaccagaccaatgatggaattaaatgtaaattccaagagggctttcacagtccacagggttcaaatgacttgggtaacagaagttattcttagcttacctgttatgtgacagtgatttacctgtccatttccaacccaaaagcctgtcagaaagcattctttagagaaaaccactttacatttgttgttaaactcctgatcgctactcttaagaatatacatgtatgtattcataggaacattttttctcaatatttgtatgattcgcttactgttattgtgctgagtgagctcctgtgtgcttcagacaaaaataaatgagactttgtgtttacgtta

SEQ ID NO: 144840 - DNA, 1532 bp, Artificial Sequence
  derived and/or modified sequence
attctcccgcctcagtctcctgagtagccgggactacaggcacccgctacaacgcccggctaattttttttgtatttccccttccttctttgctttcaaaatccaggcttaggggtacaaaaacctatattgtctgagacaggaagcactccgaagtttgaagaagagggcagcagcccaactcagaagaactggactccccagcactataaggagagagggtggtggttccaccagagatagtgtttttagaagaagcatctcaacaggaaaaactggccaaagaatggtgcttcaagccgtgtgaaataagagaactgagccaccatgagttcttcatgcctgggctggttgatacacacatccatgcctctcagtattcctttgctggaagtagcatagacctgccactcttggagtggctgaccaagtacacatttcctgcagaacacagattccagaacatcgactttgcagaagaagtatataccagagttgtcaggagaacactaaagaatggaacaaccacagcttgttactttgcaacaattcacactgactcatctctgctccttgccgacattacagataaatttggacagcgggcatttgtgggcaaagtttgcatggatttgaatgacacttttccagaatacaaggagaccactgaggaatcgatcaaggaaactgagagatttgtgtcagaaatgctccaaaagaactattctagagtgaagcccatagtgacaccacgtttttccctctcctgctctgagactttgatgggtgaactgggcaacattgctaaaacccgtgatttgcacattcagagccatataagtgaaaatcgtgatgaagttgaagctgtgaaaaacttataccccagttataaaaactacacatctgtgtatgataaaaacaatcttttgacaaataagacagtgatggcacacggctgctacctctctgcagaagaactgaacgtattccatgaacgaggagcatccatcgcacactgtcccaattctaatttatcgctcagcagtggatttctaaatgtgctagaagtcctgaaacatgaagtcaagatagggctgggtacagacgtggctggtggctattcatattccatgcttgatgcaatcagaagagcagtgatggtttccaatatccttttaattaataaggtaaatgagaaaagcctcaccctcaaagaagtcttcagactagctactcttggaggaagccaagccctggggctggatggtgagattggaaactttgaagtgggcaaggaatttgatgccatcctgatcaaccccaaagcatccgactctcccattgacctgttttatggggacttttttggtgatatttctgaggctgttatccagaagttcctctatctaggagatgatcgaaatattgaagaggtttatgtgggcggaaagcaggtggttccgttttccagctcagtgtaagaccctcgggcgtctacaaagttctcctgggattagcgtggttctgcatct

SEQ ID NO: 144841 - DNA, 1365 bp, Artificial Sequence
  derived and/or modified sequence
atgtgtgccgcccagatgccacccctggcccacatcttccggggcacctttgtgcacagcacctggacctgccccatggaggtgctgcgggaccacctgctgggcgtgtctgattctgggaagatcgtgttcctggaggaggccagccagcaggagaagctggccaaggagtggtgcttcaagccctgtgagatccgggagctgagccaccacgagttcttcatgcctggcctggtggacacccacatccacgccagccagtacagctttgctggcagcagcattgacctgcccctgctggagtggctgaccaagtacaccttccctgctgagcaccgcttccagaacatcgactttgctgaggaggtgtacaccagggtggtgcggaggaccctgaagaatggcaccaccacagcctgctactttgccaccatccacacagacagcagcctgctgctggccgacatcacagacaagtttggccagagggcctttgtgggcaaggtgtgcatggacctgaatgacaccttccctgagtacaaggagaccacagaggagagcatcaaggagacagaaagatttgtgtctgagatgctgcagaagaactacagccgggtgaagcccatcgtgaccccccgcttcagcctgagctgcagcgagaccctgatgggagagctgggcaacatcgccaagacccgggacctgcacatccagagccacatcagtgaaaatagagatgaggtggaggccgtgaagaacctgtaccccagctacaagaactacacctctgtgtatgacaagaacaacctgctgaccaacaagacagtgatggcccacggctgctacctgtctgctgaggagctgaatgtgttccacgagcggggggccagcatcgcccactgccccaacagcaacctgagcctgagcagcggcttcctgaatgtgctggaggtgctgaagcatgaggtgaagattggcctgggcacagatgtggccggcggctacagctacagcatgctggatgccatccggcgggctgtgatggtgagcaacatcctgctgatcaacaaggtgaatgagaagagcctgaccctgaaggaggtgttccggctggccaccctgggcggcagccaggccctgggcctggatggagagatcggcaactttgaggtgggcaaggagtttgatgccatcctgatcaaccccaaggccagtgacagccccatcgacctcttctatggagacttctttggagacatcagcgaggccgtcatccagaagttcctgtacctgggagatgacagaaatattgaggaggtgtatgtgggcggcaagcaggtggtgcccttcagcagctctgtgtag

SEQ ID NO: 144842 - DNA, 1365 bp, Artificial Sequence
  derived and/or modified sequence
atgtgcgccgcccagatgccccccctggcccacatcttccggggcacgttcgttcatagcacatggacttgtcctatggaagtgcttcgagatcacttgctcggcgtgtccgatagcggcaaaattgtgttccttgaggaggcatctcagcaagagaagctggctaaggaatggtgcttcaaaccctgtgaaatccgggagctgtctcaccacgaattctttatgcccggcctcgttgacacccacatccatgcctcccaatactcttttgccggtagctcgattgatctgccactgctcgagtggctgaccaagtataccttcccagcagagcatcgatttcagaatatcgattttgctgaagaggtttacacacgagtggtgaggagaaccctgaaaaacggaacgactactgcctgctatttcgctacaatccataccgacagctcactgctgctggctgatatcaccgataagtttggtcagagggcttttgtggggaaggtgtgtatggacctaaacgacaccttccctgagtacaaagagacaactgaggagtcaattaaggagactgaacgctttgtcagcgagatgctccagaagaactactcccgagtgaaacccattgttactccgcgtttctcactgagctgttccgagaccctcatgggcgaattggggaacatcgcaaagacacgggaccttcacatccaatcccatatcagcgagaatcgtgacgaagtggaagctgtgaagaacctgtaccccagctacaagaactacacatctgtttacgacaagaataacctgctgacaaacaagactgtgatggcccacggatgttacctcagcgccgaggaactgaatgttttccacgagcggggtgcttcgatcgctcattgccctaactccaacctcagcctgtcatctggcttcctgaacgtcctagaggtgcttaaacacgaggttaaaattggcctcggtacagacgtggccggcggatactcctacagcatgttggatgcgatccgacgagccgtgatggttagtaacatcttgctgattaacaaagttaacgagaaatcccttaccctgaaagaggtatttaggctggccaccctggggggatcccaagctctgggtttagatggtgaaattggaaactttgaggtgggcaaggagtttgacgccattctgataaaccccaaggcttccgattcaccaatagatctcttctatggcgatttcttcggtgacatcagtgaagctgtgattcaaaagttcctgtatctcggtgatgatcggaatattgaggaagtgtatgtgggcggtaaacaggtcgtgcccttctcttcttccgtgtag

SEQ ID NO: 144843 - DNA, 1365 bp, Artificial Sequence
  derived and/or modified sequence
atgtgcgccgcccagatgccccccctggcccacatcttccggggcacttttgtccactccacatggacttgtcccatggaagtgctgagggaccatctactgggcgtgagtgacagcggaaagatcgtgttcctggaagaggcatcccaacaggagaaattggctaaggagtggtgtttcaagccgtgcgaaattagggagctgtcacatcatgaattctttatgcccggtttagtagacacgcacattcacgcgtcgcagtacagttttgctggatctagtatcgatctgccccttttggagtggcttactaaatatactttccccgcggaacacaggtttcagaatatcgactttgcagaagaggtgtatacccgagtggttaggcggaccctgaaaaatggcactaccaccgcctgttacttcgcaactattcacaccgattctagcctgctgctggccgatataactgacaaattcggccagcgcgcctttgtcggtaaagtgtgcatggacctgaacgatacatttccggaatacaaggagacgaccgaggagtccatcaaggaaactgaacggttcgtgtctgagatgctgcagaagaattatagccgtgtgaaacccatcgtgacaccacgattctccctaagctgctcggaaaccctcatgggtgagctgggcaatatcgctaaaactcgagacctgcatattcagtcccacattagcgaaaaccgcgatgaagtcgaagccgttaaaaatctttaccccagctacaagaattacactagcgtgtacgataagaataatcttctaacaaacaaaaccgtaatggcccatggctgttatctctcagcagaagaactgaacgtgttccacgagcgtggagcatccatcgctcactgtcctaactctaacctctcccttagctctggctttctcaatgttctggaggtactcaagcacgaagtgaagatcggtctgggaaccgatgtcgccggcgggtactcttatagtatgctagacgcaataagacgtgccgtaatggtgtccaatatcttgctgataaacaaggtaaacgagaagagcctgacgctgaaagaggtgttcaggctggctaccctaggaggaagccaggccctagggctggacggcgaaattggcaatttcgaagtggggaaagaatttgatgccattttaattaaccctaaagcctctgactcccccatagacctcttttatggagacttttttggggatattagcgaggcagtgattcaaaaattcctgtacctaggtgatgaccgaaacatcgaggaggtttacgttgggggcaaacaggtggtccccttctcaagcagcgtgtag

SEQ ID NO: 144844 - DNA, 1365 bp, Artificial Sequence
  derived and/or modified sequence
atgtgcgccgctcagatgccgccactggctcacattttccgtggcacgtttgtgcattctacctggacgtgcccaatggaggtactgcgggatcatctgctgggcgtctctgactcgggaaaaatagtttttttggaagaggccagtcagcaggagaaactggcaaaggaatggtgttttaaaccttgtgaaattagggagctgagtcatcatgagttttttatgcctgggctagtggacacccatattcacgcctcgcaatactccttcgcaggaagctccatcgacctgccacttcttgaatggcttacaaaatacacttttccggcagaacaccgattccaaaacatcgacttcgcagaagaagtgtatacacgggtcgtgcggagaacactcaagaatggaaccaccacggcatgctatttcgccaccatccacaccgattccagtttgctcttagcggatatcacagataagttcggtcaaagggctttcgtgggcaaggtttgcatggatttgaacgacaccttccccgaatacaaagagactactgaagagtccattaaggagacggagcgctttgtgagtgagatgttgcaaaagaattattcacgcgtgaaacccattgtgaccccgcgtttctccctctcttgcagcgagacattaatgggagaacttggcaacatcgctaaaacacgggatctacatattcagtcacacattagcgagaaccgagacgaagttgaggccgtcaagaatctgtatcctagctacaagaattatacgagcgtgtacgataagaacaatctgttaacaaataagaccgtaatggcccatggctgttacctgtccgccgaggagctcaacgttttccacgaaagaggtgcctccatagcccattgcccaaattctaatctgtccctgtcctctggatttcttaatgtactggaagtactcaagcatgaagtaaagattggcttagggactgacgttgcagggggatactcgtactccatgcttgatgcgatccgccgtgctgtgatggtgagcaatatattacttattaataaggtcaatgaaaagagcctcacactgaaagaagtgttccggctggccacactgggcggtagtcaagcccttggcctggatggggaaatcggcaacttcgaggtaggcaaggaatttgacgctatactaatcaaccccaaggcttcagattccccaatcgacctcttttatggagacttcttcggagacataagcgaggccgtaattcagaagtttctttacctgggggatgatcgtaacatcgaggaagtgtacgtgggagggaaacaggtggttccatttagttccagcgtttag

SEQ ID NO: 144845 - DNA, 1365 bp, Artificial Sequence
  derived and/or modified sequence
atgtgcgccgcacagatgccaccactggcacacatctttcgcggaacattcgtccatagcacctggacgtgtcccatggaggtcttgcgagatcatctgctgggagtttcagacagcgggaagatcgtcttcttggaagaagctagccagcaggagaaactcgcaaaagaatggtgtttcaagccgtgcgagattagagaattgagccaccatgagttctttatgcctggcctcgtggatacgcatatccacgcatctcaatattccttcgctggcagcagcatcgacctgccgttactggaatggcttactaaatacaccttccctgccgagcacagattccagaatatcgacttcgctgaggaagtatatactagagtggtcaggcggacactgaagaacggcactacaacagcctgttactttgcgacgatacatactgattcctcgctgcttcttgccgatatcactgataaattcgggcagagggcttttgtggggaaggtatgtatggatctgaatgatacttttcctgagtacaaagaaaccacggaggagtcgataaaggaaactgaacgcttcgtgagtgagatgttgcagaaaaactactcgagagtcaagcccattgttacaccgcgattcagcctgtcatgcagtgaaactctgatgggggagttggggaacatcgcaaagactcgcgatttacatatccagtcccacatctccgagaaccgggacgaagtcgaggcggtgaaaaatctgtacccgagctataagaattatacaagcgtgtatgacaagaacaatctccttactaataagacagtaatggcccatggctgctacctgtccgctgaggagttgaatgtgttccacgaaaggggagcatccatagcccactgccctaactcaaacctttcgctgtcttctggctttctaaatgtactcgaggtcctcaagcatgaggtcaagatagggctcggaactgacgtcgccggtggatactcatactctatgctcgacgctatccggagggccgttatggtttcaaacatcctccttattaacaaggttaacgagaaatccctaactctgaaggaggtttttcgcctggccacgctgggtgggtctcaggctttgggcctggatggggaaatcgggaactttgaggttggcaaagaattcgacgccatactgattaaccctaaggcatctgatagccctatagacctcttctacggggacttttttggcgatatatctgaggcagtgattcagaaatttctgtatttaggcgatgaccgcaatattgaggaagtgtatgtgggcggaaagcaagtcgttcccttttccagctctgtgtag

SEQ ID NO: 144846 - DNA, 1365 bp, Artificial Sequence
  derived and/or modified sequence
atgtgcgccgcccagatgccccccctggcccacatcttcagaggcaccttcgtgcacagcacctggacctgccccatggaggtgctgagagaccacctgctgggcgtgagcgacagcggcaagatcgtgttcctggaggaggccagccagcaggagaagctggccaaggagtggtgcttcaagccctgcgagatcagagagctgagccaccacgagttcttcatgcccggcctggtggacacccacatccacgccagccagtacagcttcgccggcagcagcatcgacctgcccctgctggagtggctgaccaagtacaccttccccgccgagcacagattccagaacatcgacttcgccgaggaggtgtacaccagagtggtgagaagaaccctgaagaacggcaccaccaccgcctgctacttcgccaccatccacaccgacagcagcctgctgctggccgacatcaccgacaagttcggccagagagccttcgtgggcaaggtgtgcatggacctgaacgacaccttccccgagtacaaggagaccaccgaggagagcatcaaggagaccgagagattcgtgagcgagatgctgcagaagaactacagcagagtgaagcccatcgtgacccccagattcagcctgagctgcagcgagaccctgatgggcgagctgggcaacatcgccaagaccagagacctgcacatccagagccacatcagcgagaacagagacgaggtggaggccgtgaagaacctgtaccccagctacaagaactacaccagcgtgtacgacaagaacaacctgctgaccaacaagaccgtgatggcccacggctgctacctgagcgccgaggagctgaacgtgttccacgagagaggcgccagcatcgcccactgccccaacagcaacctgagcctgagcagcggcttcctgaacgtgctggaggtgctgaagcacgaggtgaagatcggcctgggcaccgacgtggccggcggctacagctacagcatgctggacgccatcagaagagccgtgatggtgagcaacatcctgctgatcaacaaggtgaacgagaagagcctgaccctgaaggaggtgttcagactggccaccctgggcggcagccaggccctgggcctggacggcgagatcggcaacttcgaggtgggcaaggagttcgacgccatcctgatcaaccccaaggccagcgacagccccatcgacctgttctacggcgacttcttcggcgacatcagcgaggccgtgatccagaagttcctgtacctgggcgacgacagaaacatcgaggaggtgtacgtgggcggcaagcaggtggtgcccttcagcagcagcgtgtag

SEQ ID NO: 144847 - protein, 470 aa, Artificial Sequence
  derived and/or modified sequence
MPGFDYKFLEKPKRRLLCPLCGKPMREPVQVSTCGHRFCDTCLQEFLSEGVFKCPEDQLPLDYAKIYPDPELEVQVLGLPIRCIHSEEGCRWSGPLRHLQGHLNTCSFNVIPCPNRCPMKLSRRDLPAHLQHDCPKRRLKCEFCGCDFSGEAYESHEGMCPQESVYCENKCGARMMRRLLAQHATSECPKRTQPCTYCTKEFVFDTIQSHQYQCPRLPVACPNQCGVGTVAREDLPGHLKDSCNTALVLCPFKDSGCKHRCPKLAMARHVEESVKPHLAMMCALVSRQRQELQELRRELEELSVGSDGVLIWKIGSYGRRLQEAKAKPNLECFSPAFYTHKYGYKLQVSAFLNGNGSGEGTHLSLYIRVLPGAFDNLLEWPFARRVTFSLLDQSDPGLAKPQHVTETFHPDPNWKNFQKPGTWRGSLDESSLGFGYPKFISHQDIRKRNYVRDDAVFIRAAVELPRKILS

SEQ ID NO: 144848 - protein, 195 aa, Artificial Sequence
  derived and/or modified sequence
MPGFDYKFLEKPKRRLLCPLCGKPMREPVQVSTCGHRFCDTCLQEFLSEGVFKCPEDQLPLDYAKIYPDPELEVQVLGLPIRCIHSEEGCRWSGPLRHLQGHLNTCSFNVIPCPNRCPMKLSRRDLPAHLQHDCPKRRLKCEFCGCDFSGEAYESSLGFGYPKFISHQDIRKRNYVRDDAVFIRAAVELPRKILS

SEQ ID NO: 144849 - protein, 392 aa, Artificial Sequence [sequence omitted]

SEQ ID NO: 144850 - protein, 198 aa, Artificial Sequence
  derived and/or modified sequence
MPGFDYKFLEKPKRRLLCPLCGKPMREPVQVSTCGHRFCDTCLQEFLSEGVFKCPEDQLPLDYAKIYPDPELEVQVLGLPIRCIHSEEGCRWSGPLRHLQGHLNTCSFNVIPCPNRCPMKLSRRDLPAHLQHDCPKRRLKCEFCGCDFSGEAYESHESSLGFGYPKFISHQDIRKRNYVRDDAVFIRAAVELPRKILS

SEQ ID NO: 144851 - DNA, 1413 bp, Artificial Sequence
  derived and/or modified sequence
atgcccggcttcgactacaagttcctggagaagcccaagagaagactgctgtgccccctgtgcggcaagcccatgagagagcccgtgcaggtgagcacctgcggccacagattctgcgacacctgcctgcaggagttcctgagcgagggcgtgttcaagtgccccgaggaccagctgcccctggactacgccaagatctaccccgaccccgagctggaggtgcaggtgctgggcctgcccatcagatgcatccacagcgaggagggctgcagatggagcggccccctgagacacctgcagggccacctgaacacctgcagcttcaacgtgatcccctgccccaacagatgccccatgaagctgagcagaagagacctgcccgcccacctgcagcacgactgccccaagagaagactgaagtgcgagttctgcggctgcgacttcagcggcgaggcctacgagagccacgagggcatgtgcccccaggagagcgtgtactgcgagaacaagtgcggcgccagaatgatgagaagactgctggcccagcacgccaccagcgagtgccccaagagaacccagccctgcacctactgcaccaaggagttcgtgttcgacaccatccagagccaccagtaccagtgccccagactgcccgtggcctgccccaaccagtgcggcgtgggcaccgtggccagagaggacctgcccggccacctgaaggacagctgcaacaccgccctggtgctgtgccccttcaaggacagcggctgcaagcacagatgccccaagctggccatggccagacacgtggaggagagcgtgaagccccacctggccatgatgtgcgccctggtgagcagacagagacaggagctgcaggagctgagaagagagctggaggagctgagcgtgggcagcgacggcgtgctgatctggaagatcggcagctacggcagaagactgcaggaggccaaggccaagcccaacctggagtgcttcagccccgccttctacacccacaagtacggctacaagctgcaggtgagcgccttcctgaacggcaacggcagcggcgagggcacccacctgagcctgtacatcagagtgctgcccggcgccttcgacaacctgctggagtggcccttcgccagaagagtgaccttcagcctgctggaccagagcgaccccggcctggccaagccccagcacgtgaccgagaccttccaccccgaccccaactggaagaacttccagaagcccggcacctggagaggcagcctggacgagagcagcctgggcttcggctaccccaagttcatcagccaccaggacatcagaaagagaaactacgtgagagacgacgccgtgttcatcagagccgccgtggagctgcccagaaagatcctgagctag

SEQ ID NO: 144852 - DNA, 588 bp, Artificial Sequence
  derived and/or modified sequence
atgcccggcttcgactacaagttcctggagaagcccaagagaagactgctgtgccccctgtgcggcaagcccatgagagagcccgtgcaggtgagcacctgcggccacagattctgcgacacctgcctgcaggagttcctgagcgagggcgtgttcaagtgccccgaggaccagctgcccctggactacgccaagatctaccccgaccccgagctggaggtgcaggtgctgggcctgcccatcagatgcatccacagcgaggagggctgcagatggagcggccccctgagacacctgcagggccacctgaacacctgcagcttcaacgtgatcccctgccccaacagatgccccatgaagctgagcagaagagacctgcccgcccacctgcagcacgactgccccaagagaagactgaagtgcgagttctgcggctgcgacttcagcggcgaggcctacgagagcagcctgggcttcggctaccccaagttcatcagccaccaggacatcagaaagagaaactacgtgagagacgacgccgtgttcatcagagccgccgtggagctgcccagaaagatcctgagctag

SEQ ID NO: 144853 - DNA, 1179 bp, Artificial Sequence
  derived and/or modified sequence
atgcccggcttcgactacaagttcctggagaagcccaagagaagactgctgtgccccctgtgcggcaagcccatgagagagcccgtgcaggtgagcacctgcggccacagattctgcgacacctgcctgcaggagttcctgagcgagggcgtgttcaagtgccccgaggaccagctgcccctggactacgccaagatctaccccgaccccgagctggaggtgcaggtgctgggcctgcccatcagatgcatccacagcgaggagggctgcagatggagcggccccctgagacacctgcagggccacctgaacacctgcagcttcaacgtgatcccctgccccaacagatgccccatgaagctgagcagaagagacctgcccgcccacctgcagcacgactgccccaagagaagactgaagtgcgagttctgcggctgcgacttcagcggcgaggcctacgagagccacgagggcatgtgcccccaggagagcgtgtactgcgagaacaagtgcggcgccagaatgatgagaagactgctggcccagcacgccaccagcgagtgccccaagagaacccagccctgcacctactgcaccaaggagttcgtgttcgacaccatccagagccaccagtaccagtgccccagactgcccgtggcctgccccaaccagtgcggcgtgggcaccgtggccagagaggacctgcccggccacctgaaggacagctgcaacaccgccctggtgctgtgccccttcaaggacagcggctgcaagcacagatgccccaagctggccatggccagacacgtggaggagagcgtgaagccccacctggccatgatgtgcgccctggtgagcagacagagacaggagctgcaggagctgagaagagagctggaggagctgagcgtgggcagcgacggcgtgctgatctggaagatcggcagctacggcagaagactgcaggaggccaaggccaagcccaacctggagtgcttcagccccgccttctacacccacaagtacggctacaagctgcaggtgagcgccttcctgaacggcaacggcagcggcgagggcacccacctgagcctgtacatcagagtgctgcccggcgccttcgacaacctgctggagtggcccttcgccagaagagtgaccttcagcctgctgggctag

SEQ ID NO: 144854 - DNA, 597 bp, Artificial Sequence
  derived and/or modified sequence
atgcccggcttcgactacaagttcctggagaagcccaagagaagactgctgtgccccctgtgcggcaagcccatgagagagcccgtgcaggtgagcacctgcggccacagattctgcgacacctgcctgcaggagttcctgagcgagggcgtgttcaagtgccccgaggaccagctgcccctggactacgccaagatctaccccgaccccgagctggaggtgcaggtgctgggcctgcccatcagatgcatccacagcgaggagggctgcagatggagcggccccctgagacacctgcagggccacctgaacacctgcagcttcaacgtgatcccctgccccaacagatgccccatgaagctgagcagaagagacctgcccgcccacctgcagcacgactgccccaagagaagactgaagtgcgagttctgcggctgcgacttcagcggcgaggcctacgagagccacgagagcagcctgggcttcggctaccccaagttcatcagccaccaggacatcagaaagagaaactacgtgagagacgacgccgtgttcatcagagccgccgtggagctgcccagaaagatcctgagctag

SEQ ID NO: 144855 - DNA, 1413 bp, Artificial Sequence
  derived and/or modified sequence
atgcccggctttgattacaagttcctagaaaagccgaaacgccgactactatgcccattatgcggcaaacctatgcgggagccggttcaggttagcacttgtggccacagattttgcgatacctgtctgcaggagttcctctctgagggcgttttcaaatgcccagaagatcagctcccactggactatgcaaagatttacccggatccagaactggaggtccaagtgctgggccttccaatcagatgtatccacagcgaggaggggtgtcggtggtccgggccccttagacacctacaggggcacctgaatacatgcagttttaatgtgattccctgccccaaccggtgtcctatgaagctttcccggcgagacctgccagctcacttgcaacacgactgtccaaagaggcggctgaaatgtgaattttgtgggtgcgatttcagcggcgaggcatacgagtctcacgaggggatgtgccctcaggagagtgtgtattgcgaaaataagtgtggagcaagaatgatgcgacgtctgctggcgcagcacgccacttctgaatgtcccaagcgaacccagccatgtacatattgtaccaaagagttcgtttttgatacaattcagtcccaccagtatcaatgcccccggctccccgtggcctgccccaaccagtgcggagtgggcacagtagcacgcgaggacttacctgggcatctgaaggatagttgcaacactgccttagttctttgcccctttaaagattctggctgtaagcaccggtgccccaaactggctatggctaggcacgttgaagagtctgtgaaaccccatcttgccatgatgtgtgccttggtaagtcgccagaggcaggagctccaggaactgcgaagagaactggaagaactcagtgtgggaagtgacggcgttttaatctggaagatcggcagctacggtagacggctccaagaggccaaggctaaaccaaacctggagtgctttagtccagccttctatacacataaatatggttataagctgcaagtctcggcctttttaaacggaaatggctctggggagggtacgcacctttccctctacatccgagtacttcctggcgccttcgacaaccttctggaatggccattcgctaggagagtgacattctccctcctggatcagtccgacccagggctcgcgaagccgcagcatgtcaccgagactttccaccctgaccccaactggaaaaactttcagaaacctgggacctggagaggcagccttgacgagtcttcactggggtttggatatcctaaattcatcagccatcaggacatccgaaagagaaattatgtccgggacgacgcagtgttcataagagctgccgtggagctgcctcgaaagattctgagttag

SEQ ID NO: 144856 - DNA, 588 bp, Artificial Sequence
  derived and/or modified sequence
atgcccggtttcgactacaaatttttggaaaaacccaaacgcaggctgctgtgccctctgtgtggtaagccaatgagggaaccggtacaggtctcaacctgcggccatcgattctgcgacacctgtttgcaagaatttctctccgaaggcgttttcaaatgcccagaagatcagctcccactcgattatgctaaaatctaccccgaccccgaactggaggtccaagtcttaggcttgcccattaggtgcattcatagcgaagagggatgccggtggagtggaccactgcgtcacttacagggacatctgaacacatgcagctttaatgtcataccttgcccaaatcgctgccccatgaagctaagccgaagggacctgccagcacacttgcagcacgattgccctaagcgcaggctgaaatgtgagttttgtggttgtgatttttctggcgaagcctacgaaagctcactaggtttcggataccctaagttcatatcccaccaagatatccgcaagcgtaattacgtgcgtgacgatgccgttttcatccgtgcagccgtggagcttcctagaaagatcctcagttag

SEQ ID NO: 144857 - DNA, 1179 bp, Artificial Sequence
  derived and/or modified sequence
atgcctggattcgattacaagttcctggagaaaccaaagcgacgacttctgtgtcccctgtgtggcaaacctatgcgtgaaccagtgcaagtttcaacatgtgggcacagattctgtgatacatgtctgcaggagtttctttcagagggtgtctttaagtgcccagaggaccagctcccactcgattacgccaaaatttacccagaccctgaactcgaggtacaggtgctcggcctgccaattcgctgtattcactcagaagaagggtgtcggtggtcaggacccctgcgccacttacagggtcacctgaatacgtgtagcttcaacgtcattccatgcccgaatcggtgcccaatgaaactgtctagacgcgacctgcccgcccacctacagcatgactgcccaaagcggcggctgaagtgtgagttttgtggatgcgacttctcgggcgaagcctatgaatcacatgaaggtatgtgcccgcaagaaagcgtttattgcgagaataaatgtggagcccgaatgatgcggcgccttttagcccaacacgctacaagtgagtgccctaaacgaacacagccatgtacatactgcaccaaggagttcgttttcgataccatccagagccaccaatatcaatgcccacgactgcccgtggcatgccccaaccagtgtggggtcggcacagtggcccgagaggaccttcccgggcacctgaaagacagttgcaatactgccctggtgttatgcccatttaaggatagcgggtgtaaacacaggtgcccaaagctcgctatggccaggcatgtggaagagtctgtaaaacctcacctggccatgatgtgcgcccttgtgagccgacagaggcaggaactccaggaactaagacgtgagcttgaagagttgtcagttggcagcgatggggttcttatttggaaaattggttcctacggtcggagattgcaggaggctaaggctaaacccaacttggagtgtttctcccccgctttctacacgcacaaatatggctacaagttacaggtctcagcgtttcttaacgggaatggatccggtgaaggtacccatctcagcttgtacatccgggtcttgcccggcgcattcgacaacctattagagtggcctttcgcccgcagggttaccttctcactgctgggctag

SEQ ID NO: 144858 - DNA, 597 bp, Artificial Sequence
  derived and/or modified sequence
atgcctggattcgattataagtttctcgaaaagccaaagcggcgcttactgtgtcctctatgcggaaagcctatgcgagaaccggtccaggtctctacgtgcggtcaccggttttgtgatacttgcctccaggagtttctgtctgagggcgtttttaagtgtcccgaggatcagcttcctctcgattacgcaaaaatttacccggatccagaattggaggttcaagtgttaggtctgcctattagatgtatacacagtgaggaaggctgcagatggtctggacccctccgccacttgcaggggcacctgaacacatgctcattcaacgtgattccctgtcctaacaggtgtccaatgaaactatcccgaagggacctacccgcacacctgcaacatgactgccccaaacgccgcctgaagtgcgagttctgcggctgcgacttctctggagaagcttacgagtctcatgaaagtagcctgggtttcggctatcccaagtttatctcacatcaggacatacggaagcggaattatgtgcgggatgacgcggtgttcattcgggctgccgttgagctccctcgcaagatcctgtcttag

SEQ ID NO: 144859 - DNA, 1413 bp, Artificial Sequence
  derived and/or modified sequence
atgcctggctttgactacaagttcctggagaagcccaagaggcggctgctgtgccccctgtgtgggaagcccatgagggagcctgtgcaggtgtccacctgtggccaccgcttctgtgacacctgcctgcaggagttcctgtctgagggcgtcttcaagtgcccagaggaccagctgcccctggactatgccaagatctacccagaccctgagctggaggtgcaggtgctgggcctgcccatccgctgcatccacagcgaggagggctgccgctggagcggccccctgcggcacctgcagggccacctgaacacctgcagcttcaacgtcatcccctgccccaaccgctgccccatgaagctgagcagaagagacctgcctgcccacctgcagcacgactgccccaagaggcggctgaagtgtgagttctgtggctgtgacttctctggagaggcctatgagagccatgagggcatgtgcccccaggagagcgtgtactgtgagaacaagtgtggggccaggatgatgaggcggctgctggcccagcacgccaccagtgaatgtcccaagaggacccagccctgcacctactgcaccaaggagtttgtgtttgacaccatccagagccaccagtaccagtgcccccggctgcctgtggcctgccccaaccagtgtggggtgggcaccgtggcccgggaggacctgcccggccacctgaaggacagctgcaacacagccctggtgctgtgccccttcaaggacagcggctgcaagcaccgctgccccaagctggccatggcccggcacgtggaggagagcgtgaagccccacctggccatgatgtgtgccctggtgtcccggcagaggcaggagctgcaggagctgcggcgggagctggaggagctgtctgtgggcagtgatggagtgctgatctggaagattggcagctatggaagaaggctgcaggaggccaaggccaagcccaacctggagtgcttctccccagccttctacacccacaagtatggctacaagctgcaggtgtctgccttcctgaatggaaatggaagtggagagggcacccacctgagcctgtacatccgggtgctgcccggggcctttgacaacctgctggagtggccctttgcccggcgggtgaccttcagcctgctggaccagagcgaccccggcctggccaagccccagcacgtgacagagaccttccacccagaccccaactggaagaacttccagaagccaggcacctggaggggcagcctggatgagagcagcctgggcttcggctaccccaagttcatcagccaccaggacatcaggaagaggaactacgtgagagatgatgctgtgttcatccgggctgctgtggagctgcccaggaagatcctgtcctag

SEQ ID NO: 144860 - DNA, 588 bp, Artificial Sequence
  derived and/or modified sequence
atgcctggctttgactacaagttcctggagaagcccaagaggcggctgctgtgccccctgtgtgggaagcccatgagggagcctgtgcaggtgtccacctgtggccaccgcttctgtgacacctgcctgcaggagttcctgtctgagggcgtcttcaagtgcccagaggaccagctgcccctggactatgccaagatctacccagaccctgagctggaggtgcaggtgctgggcctgcccatccgctgcatccacagcgaggagggctgccgctggagcggccccctgcggcacctgcagggccacctgaacacctgcagcttcaacgtcatcccctgccccaaccgctgccccatgaagctgagcagaagagacctgcctgcccacctgcagcacgactgccccaagaggcggctgaagtgtgagttctgtggctgtgacttctctggagaggcctatgagagcagcctgggcttcggctaccccaagttcatcagccaccaggacatcaggaagagaaattatgtgagagatgatgctgtgttcatccgggctgctgtggagctgcccaggaagatcctgtcctag

SEQ ID NO: 144861 - DNA, 1179 bp, Artificial Sequence
  derived and/or modified sequence
atgcctggctttgactacaagttcctggagaagcccaagaggcggctgctgtgccccctgtgtgggaagcccatgagggagcctgtgcaggtgtccacctgtggccaccgcttctgtgacacctgcctgcaggagttcctgtctgagggcgtcttcaagtgcccagaggaccagctgcccctggactatgccaagatctacccagaccctgagctggaggtgcaggtgctgggcctgcccatccgctgcatccacagcgaggagggctgccgctggagcggccccctgcggcacctgcagggccacctgaacacctgcagcttcaacgtcatcccctgccccaaccgctgccccatgaagctgagcagaagagacctgcctgcccacctgcagcacgactgccccaagaggcggctgaagtgtgagttctgtggctgtgacttctctggagaggcctatgagagccatgagggcatgtgcccccaggagagcgtgtactgtgagaacaagtgtggggccaggatgatgaggcggctgctggcccagcacgccaccagtgaatgtcccaagaggacccagccctgcacctactgcaccaaggagtttgtgtttgacaccatccagagccaccagtaccagtgcccccggctgcctgtggcctgccccaaccagtgtggggtgggcaccgtggcccgggaggacctgcccggccacctgaaggacagctgcaacacagccctggtgctgtgccccttcaaggacagcggctgcaagcaccgctgccccaagctggccatggcccggcacgtggaggagagcgtgaagccccacctggccatgatgtgtgccctggtgtcccggcagaggcaggagctgcaggagctgcggcgggagctggaggagctgtctgtgggcagtgatggagtgctgatctggaagattggcagctatggaagaaggctgcaggaggccaaggccaagcccaacctggagtgcttctccccagccttctacacccacaagtatggctacaagctgcaggtgtctgccttcctgaatggaaatggaagtggagagggcacccacctgagcctgtacatccgggtgctgcccggggcctttgacaacctgctggagtggccctttgcccggcgggtgaccttcagcctgctgggctag

SEQ ID NO: 144862 - DNA, 597 bp, Artificial Sequence
  derived and/or modified sequence
atgcctggctttgactacaagttcctggagaagcccaagaggcggctgctgtgccccctgtgtgggaagcccatgagggagcctgtgcaggtgtccacctgtggccaccgcttctgtgacacctgcctgcaggagttcctgtctgagggcgtcttcaagtgcccagaggaccagctgcccctggactatgccaagatctacccagaccctgagctggaggtgcaggtgctgggcctgcccatccgctgcatccacagcgaggagggctgccgctggagcggccccctgcggcacctgcagggccacctgaacacctgcagcttcaacgtcatcccctgccccaaccgctgccccatgaagctgagcagaagagacctgcctgcccacctgcagcacgactgccccaagaggcggctgaagtgtgagttctgtggctgtgacttctctggagaggcctatgagagccatgagagcagcctgggcttcggctaccccaagttcatcagccaccaggacatcaggaagaggaactacgtgagagatgatgctgtgttcatccgggctgctgtggagctgcccaggaagatcctgtcctag

SEQ ID NO: 144863 - DNA, 1413 bp, Artificial Sequence
  derived and/or modified sequence
atgcccggcttcgactacaagttcctggagaagcccaagcggcggctgctttgcccattatgtgggaaaccaatgagggaaccagtccaagtgtccacatgtggtcatcggttttgcgacacctgcctgcaggagttcctctctgagggtgtctttaagtgccctgaggatcagttgcccctcgactatgcaaagatttatcctgacccagagctggaggtccaggtcctcggcttgcctataagatgtatccattccgaggaggggtgtcgctggtcgggacctttaagacacctacagggccatctaaatacatgtagctttaatgtcattccatgccctaataggtgtcctatgaagctgtctcgccgtgacttgcccgcccacttgcagcatgactgtcccaagcgcagattaaagtgtgagttttgtggctgcgacttcagtggtgaggcctacgagtcgcacgagggcatgtgccctcaggagtccgtgtattgcgaaaataagtgcggggctcgcatgatgcggcgtttgttggctcagcacgctacctccgaatgtccaaagcgcacccagccatgcacatactgcacgaaagaattcgtgttcgataccatccaaagtcaccagtatcaatgcccaagactaccagtggcatgcccaaaccagtgtggcgtgggaaccgtggcgagagaggacttaccaggtcatctgaaggattcttgcaacacagcacttgttttgtgcccctttaaggactctgggtgtaagcatagatgccctaaattagccatggcccggcacgtggaggagtctgtaaaacctcacctggcaatgatgtgcgcacttgtatcacggcagaggcaggagttgcaggagctgcgcagggaactcgaggaactgagcgttggatctgacggcgtcctcatttggaaaatcggatcttatggccgaaggctccaggaagcaaaggctaaacccaatttggaatgctttagtcctgccttctacacccataagtacgggtacaagctgcaggtgtccgcttttcttaacgggaacggttcaggtgagggaacacatttgtccttgtatattcgggtgttgccaggggcttttgacaatttgttagagtggcctttcgctcggagggtgacattcagtctgctcgatcagtcagatcctgggctcgctaaaccacagcatgttactgagactttccaccccgatccaaactggaagaatttccagaaaccaggtacttggagagggtcgctcgacgagtcatcgttggggttcggataccctaagttcatatctcaccaagatatccgcaagagaaattacgtgcgtgacgacgccgtgtttatccgagcagccgtcgaattgccccgcaaaatactgtcctag

SEQ ID NO: 144864 - DNA, 588 bp, Artificial Sequence
  derived and/or modified sequence
atgcccggcttcgactacaagttcctggagaagcccaagcggcggctgttgtgtcccctgtgtgggaaaccaatgcgagagccggtccaagtgagtacctgcggacacagattctgtgatacttgcctacaagagttccttagcgaaggcgttttcaagtgtccagaggaccagttgccgctggattacgctaaaatctaccctgatcccgaactcgaggtgcaggtactaggcctgcctatccgctgcattcattctgaagagggatgccgctggtcaggccccctccggcatctacagggccatctgaacacatgctcgttcaatgtcattccctgcccaaaccgctgcccaatgaagctctcgcgaagggacttgcccgcacatctgcaacacgactgccctaaacggcgtctcaagtgtgaattttgtggatgtgatttctcaggggaggcctatgagtcatcacttggtttcggttatcccaagttcatcagtcatcaggacatacgcaagcgcaattatgtgagggatgacgcggtgtttatccgcgctgccgtggagctcccaagaaagatcttgagttag

SEQ ID NO: 144865 - DNA, 1179 bp, Artificial Sequence
  derived and/or modified sequence
atgcccggcttcgactacaagttcctggagaagcccaagcggcggctcttatgtcccctgtgtggcaaacccatgagagaacctgtgcaggtgagtacttgcggccataggttttgtgatacctgcctgcaagagtttctgtcagagggtgtttttaagtgcccagaggaccagctgccactggactacgccaaaatctatccggatcccgaactcgaagtgcaggtccttggattgcccattcggtgcatccactccgaagaaggctgcagatggagcgggccactacggcatctgcagggccatctgaatacctgcagttttaacgtcatcccttgtcccaatcggtgcccgatgaagctgtctcgccgggacctccccgcgcatcttcagcacgattgcccaaaaaggcgcctcaaatgtgaattctgtggatgtgatttctcaggagaagcgtacgaaagtcatgaaggaatgtgtccacaggagtctgtttattgcgagaacaagtgcggcgcacgtatgatgcggcgcctccttgctcagcacgccactagtgaatgtcccaaaaggactcagccttgtacatactgtaccaaggaatttgtcttcgataccattcagtcacaccagtaccagtgcccgcgccttcctgtcgcctgtcctaatcagtgtggcgtaggtaccgtggcaagagaagacctgcctgggcatctcaaagactcatgtaatactgctctggtgctatgcccatttaaagactcgggttgtaaacatcgatgcccgaagcttgcaatggccaggcatgttgaagagagtgtgaagccccatttagctatgatgtgcgccttagtctccaggcagcgccaagagctgcaggagctgcggcgcgagctagaagagttgagcgtcggctctgacggtgtgcttatttggaaaattgggtcttatggcaggagactccaggaggcgaaagcgaagccgaacctagagtgctttagccctgcattttacactcacaagtacggttacaaactgcaagtctccgctttcctgaacggaaatggctctggggaagggacccacctctccctgtacatacgcgttctgcctggtgcattcgacaacctgctcgagtggcccttcgctaggcgggtgacattttcgcttctcggctag

SEQ ID NO: 144866 - DNA, 597 bp, Artificial Sequence
  derived and/or modified sequence
atgcccggcttcgactacaagttcctggagaagcccaagcggcggctcctgtgtcctctatgtggcaagcctatgcgagagcctgtgcaggtgtctacctgcgggcatcgcttttgtgacacttgcctgcaggaatttttaagcgaaggggtgtttaaatgcccagaggatcagctgcctctggactatgccaagatttacccagatccggaactggaagtccaggtccttggtctgccaatccgctgtatccactccgaggagggctgtagatggtctggacccttgcgacatctgcaagggcatctgaacacttgcagctttaacgttataccctgtcctaacaggtgccccatgaaactgagccgaagggatctccccgctcaccttcaacatgactgtccaaagcgacgcctgaagtgcgaattttgcgggtgcgatttctccggcgaagcttacgagagtcatgagtcttccctagggtttggctacccaaaatttatcagtcatcaggatattagaaagcgcaactatgttcgagatgacgccgtgttcatccgggcagccgtggagctgcctcggaaaatcctatcctag

SEQ ID NO: 144867 - DNA, 1413 bp, Artificial Sequence
  derived and/or modified sequence
atgcctggattcgattacaagttcctcgaaaaaccaaaaaggaggctgctgtgtccattgtgtggtaaacctatgcgggaaccagtccaggtctccacttgcggacatagattctgcgacacctgtcttcaggaatttctttctgagggggtttttaagtgccctgaagatcagctcccactggactacgccaaaatctaccccgacccagagttagaggtccaggtcctcggactgcctatcagatgcattcacagtgaggagggttgtcgatggtccggtcccctgcgccacctccagggacacctcaacacatgcagcttcaacgtgattccctgccccaaccgatgtcccatgaagctatcccgtagagatttgcctgcccacctgcagcacgattgcccaaaacgtcggctgaagtgcgagttttgcggctgtgacttttcaggcgaggcgtacgaaagtcacgaggggatgtgcccacaggaaagtgtttactgcgagaacaagtgtggggctcgaatgatgcgacgccttctggcacaacacgccacatcagagtgtccaaaacgaacacagccttgcacttattgcacgaaagaatttgtgttcgacaccatacaaagccatcagtatcaatgtcccaggcttccagtcgcatgccccaaccaatgtggagtcggcacagtcgccagggaggatttaccaggccacctcaaggatagttgtaacacggcactcgtgctatgtccatttaaagactcggggtgcaaacatcgttgccctaaacttgctatggcgagacacgtggaagagagcgtcaagccccatcttgccatgatgtgcgccctcgtaagccgacagcggcaggagttgcaggagttgcggcgtgaactggaggagctcagcgtaggctcagacggggtcctgatctggaagattggcagttatgggagacggctgcaggaggccaaggccaagcctaatctggaatgtttctcgcctgccttctatacccacaagtatgggtataagctgcaggtgagcgcctttctcaatgggaatggcagtggtgaaggcacccatctgtccctttacatccgagtcctcccgggagcattcgacaacctgctggagtggccgttcgccagaagggttacattttccctgctcgatcaatctgatccagggctcgctaaaccgcagcacgtgaccgagaccttccaccctgatcctaactggaaaaactttcagaaaccgggaacttggaggggaagcctggacgaatccagtctgggctttgggtatccaaagtttatcagccaccaggacatccgaaagagaaattatgtgagggatgacgctgtgttcatccgtgcggcagtggagctgcctcgcaagatactcagctag

SEQ ID NO: 144868 - DNA, 588 bp, Artificial Sequence
  derived and/or modified sequence
atgccaggtttcgattacaagtttctcgaaaaacctaaaaggcgcctactgtgccccctttgcggcaagcctatgcgggagcccgtacaggtgtcaacatgcggccacagattttgtgacacttgtctccaggaatttctctcagagggcgtttttaagtgtcctgaggatcaactgcccctggactacgccaaaatctacccagaccccgaactagaggtgcaggtcctgggacttcccattcggtgtattcactctgaagagggatgcaggtggagcggcccactgcgccatcttcagggccatctcaatacatgtagtttcaatgtcataccctgtcctaaccgctgtcccatgaagctgtcacgcagggacttgccagcccacttgcagcacgattgccccaagagaaggctgaagtgcgaattttgcggttgtgatttcagcggtgaggcctatgagagctcattaggttttgggtacccaaagtttatctcacatcaggatattcgtaagcgcaattatgtgagggatgatgccgttttcattcgagctgctgttgagctaccaagaaaaattctgtcctag

SEQ ID NO: 144869 - DNA, 1179 bp, Artificial Sequence
  derived and/or modified sequence
atgcccggattcgactacaaattcttggagaagcccaagcggcgactgttgtgtcctctatgcggcaagccaatgcgtgagccagtgcaggtgagcacctgtggtcacagattctgtgacacatgtctgcaggaatttctgtcagagggggtttttaagtgtccagaggatcaactgccactagactacgcaaagatttaccctgaccctgaattggaggttcaggtgctgggcttgccaattcgctgtatccacagcgaggagggctgccgttggagcgggcctctccgccacctgcagggccatctgaacacctgctcgtttaacgtgatcccgtgccccaataggtgccccatgaaactgtctcgacgggatcttcccgcacatctgcaacacgactgcccaaagcggaggctcaaatgtgagttctgcgggtgtgacttctctggggaagcctacgagtcacacgaaggcatgtgccctcaagagtccgtatactgtgagaataagtgtggcgcacgaatgatgagaaggctgctcgcccagcatgccaccagtgagtgtccaaagcggacgcagccctgcacatattgtaccaaggagtttgtcttcgacacgatccaatcgcaccagtatcagtgcccacgcctgcctgtagcttgccctaatcaatgcggcgtcggaacggtagcccgagaagaccttccaggccacctaaaggactcgtgcaatacggcattggtgctctgcccttttaaggacagtggatgtaagcatcgctgtccaaagctcgcaatggccagacatgttgaagaatcagttaaaccacacttggccatgatgtgcgctttagtatccagacagcggcaagagctgcaagaacttaggagggaactcgaagaactttctgtgggaagtgatggagtccttatatggaaaatcggctcctacggcagaagattgcaggaggccaaagctaagccgaacctggaatgttttagcccagccttttacacacacaaatatggctacaaattacaggttagcgccttcctgaatgggaatgggagtggcgagggtactcatctttctttgtacataagagttttgccaggcgcttttgacaacctcctggaatggccgttcgccaggcgggtcacattcagtctgctgggctag

SEQ ID NO: 144870 - DNA, 597 bp, Artificial Sequence
  derived and/or modified sequence
atgccaggattcgactacaaattcctcgaaaaaccaaagaggcggcttctctgccctttgtgtggcaaacctatgcgagagcctgtacaagtgagcacctgtggtcatagattctgcgacacatgcctccaggagtttttgtctgaaggcgtctttaagtgtcccgaggatcagctccccttggattacgcaaaaatttatccagacccagaattggaagtccaggttctgggtctccctattcgttgcatacactcagaagaaggatgtaggtggagtggtccattgcggcatctacaaggacatttgaacacgtgcagctttaacgtgattccttgcccgaataggtgcccaatgaagctgtccagaagggacctcccagctcatctgcagcacgactgccctaaacggagactaaaatgcgagttttgcggatgtgacttctcaggagaggcttacgaaagtcacgagagctctctcgggttcggatacccgaagttcatttcacatcaggatattcggaaacgcaattacgttcgggacgatgcagtgttcattagggcggctgtagagctgccaagaaagatcctgtcctag

SEQ ID NO: 144871 - DNA, 2885 bp, Artificial Sequence
  derived and/or modified sequence
cgcccggagccgggagcgccgctccagcgaggcgcgggctgtggggccgccgcgtgcctggccccgctcgcccgtgccggccgctcgcccgccatgcctggcttcgactacaagttcctggagaagcccaagcgacggctgctgtgcccactgtgcgggaagcccatgcgcgagcctgtgcaggtttccacctgcggccaccgtttctgcgatacctgcctgcaggagttcctcagtgaaggagtcttcaagtgccctgaggaccagcttcctctggactatgccaagatctacccagacccggagctggaagtacaagtattgggcctgcctatccgctgcatccacagtgaggagggctgccgctggagtgggccactacgtcatctacagggccacctgaatacctgcagcttcaatgtcattccctgccctaatcgctgccccatgaagctgagccgccgtgatctacctgcacacttgcagcatgactgccccaagcggcgcctcaagtgcgagttttgtggctgtgacttcagtggggaggcctatgagagccatgagggtatgtgcccccaggagagtgtctactgtgagaataagtgtggtgcccgcatgatgcggcggctgctggcccagcatgccacctctgagtgccccaagcgcactcagccctgcacctactgcactaaggagttcgtctttgacaccatccagagccaccagtaccagtgcccaaggctgcctgttgcctgccccaaccaatgtggtgtgggcactgtggctcgggaggacctgccaggccatctgaaggacagctgtaacaccgccctggtgctctgcccattcaaagactccggctgcaagcacaggtgccctaagctggcaatggcacggcatgtggaggagagtgtgaagccacatctggccatgatgtgtgccctggtgagccggcaacggcaggagctgcaggagcttcggcgagagctggaggagctatcagtgggcagtgatggcgtgctcatctggaagattggcagctatggacggcggctacaggaggccaaggccaagcccaaccttgagtgcttcagcccagccttctacacacataagtatggttacaagctgcaggtgtctgcattcctcaatggcaatggcagtggtgagggcacacacctctcactgtacattcgtgtgctgcctggtgcctttgacaatctccttgagtggccctttgcccgccgtgtcaccttctccctgctggatcagagcgaccctgggctggctaaaccacagcacgtcactgagaccttccaccccgacccaaactggaagaatttccagaagccaggcacgtggcggggctccctggatgagagttctctgggctttggttatcccaagttcatctcccaccaggacattcgaaagcgaaactatgtgcgggatgatgcagtcttcatccgtgctgctgttgaactgccccggaagatcctcagctgagtgcaggtggggttcgaggggaaaggacgatggggcatgacctcagtcaggcactggctgaacttggagagggggccggacccccgtcagctgcttctgctgcctaggttctgttaccccatcctccctcccccagccaccaccctcaggtgcctccaattggtgcttcagccctggcccctgtggggaacaggtcttggggtcatgaagggctggaaacaagtgaccccagggcctgtctcccttcttgggtagggcagacatgccttggtgccggtcacactctacacggactgaggtgcctgctcaggtgctatgtcccaagagccataagggggtgggaattggggagggagaaagggtagttcaaagagtctgtcttgagatctgattttttccccctttacctagctgtgccccctctggttatttatttccttagtgccaggagggcacagcaggggagccctgatttttaataaatccggaattgtatttattaatttgcttccagcctgacttacctgggttggttaggtccctgggaggctcaaccaaactgaaggcaaagaaaggaccagtcagagaagggccgctgcctgggtctggccccaggatccagcttacctgctggctcgccctctgatggacgccgggaaaactgcatcgggctttgtgtggaagacggtccctgccactgccctctgccgatgaaatgcgggaagtgtatggcctagatgtttcataaggctggagtccctggtcagccccaccagattagtgcttctaccctaggcagggctttcttggtctaatggtaataagcaccgacactgctaagcactttacgtgcattattatttcattgaaaagaactgtcaagtgaaatactttttagcacagtaactggctttgtgggctctagagaagagttaatgaggcagtgcatgttcttggcccagagtaagtgcttagtgaatgctttctaactccgaaccccagccacatccagggactgggtgttgagcaaaaggggccttcaagatgttcaaggcacttggattttctcctgtctctcatcggcttttcttaacgggcctcagtgggtgcatgtgattatccacgtttcacctatgaaacatgaacagaggagactgacttatcagtgattcttccgcgggttcggacagggcctcgattctgttttaaactccagtagtccctagaaattgtagctccctctagttgtggcaataggtgtgggtccttgtgcttgcttttggcaagtttctgagctacacagggcctccattaccgtcactggtgaaatgcggctcacctcccagatttgttgtaaagattaaatgaactggtcagca

SEQ ID NO: 144872 - DNA, 683 bp, Artificial Sequence
  derived and/or modified sequence
gctcgcccgtgccggccgctcgcccgccatgcctggcttcgactacaagttcctggagaagcccaagcgacggctgctgtgcccactgtgcgggaagcccatgcgcgagcctgtgcaggtttccacctgcggccaccgtttctgcgatacctgcctgcaggagttcctcagtgaaggagtcttcaagtgccctgaggaccagcttcctctggactatgccaagatctacccagacccggagctggaagtacaagtattgggcctgcctatccgctgcatccacagtgaggagggctgccgctggagtgggccactacgtcatctacagggccacctgaatacctgcagcttcaatgtcattccctgccctaatcgctgccccatgaagctgagccgccgtgatctacctgcacacttgcagcatgactgccccaagcggcgcctcaagtgcgagttttgtggctgtgacttcagtggggaggcctatgagagttctctgggctttggttatcccaagttcatctcccaccaggacattcgaaagcgaaactatgtgcgggatgatgcagtcttcatccgtgctgctgttgaactgccccggaagatcctcagctgagtgcaggtggggttcgaggggaaaggacgatggggcatgacctcagtcaggcactggctgaacttgg

SEQ ID NO: 144873 - DNA, 1457 bp, Artificial Sequence
  derived and/or modified sequence
gctccagcgaggcgcgggctgtggggccgccgcgtgcctggccccgctcgcccgtgccggccgctcgcccgccatgcctggcttcgactacaagttcctggagaagcccaagcgacggctgctgtgcccactgtgcgggaagcccatgcgcgagcctgtgcaggtttccacctgcggccaccgtttctgcgatacctgcctgcaggagttcctcagtgaaggagtcttcaagtgccctgaggaccagcttcctctggactatgccaagatctacccagacccggagctggaagtacaagtattgggcctgcctatccgctgcatccacagtgaggagggctgccgctggagtgggccactacgtcatctacagggccacctgaatacctgcagcttcaatgtcattccctgccctaatcgctgccccatgaagctgagccgccgtgatctacctgcacacttgcagcatgactgccccaagcggcgcctcaagtgcgagttttgtggctgtgacttcagtggggaggcctatgagagccatgagggtatgtgcccccaggagagtgtctactgtgagaataagtgtggtgcccgcatgatgcggcggctgctggcccagcatgccacctctgagtgccccaagcgcactcagccctgcacctactgcactaaggagttcgtctttgacaccatccagagccaccagtaccagtgcccaaggctgcctgttgcctgccccaaccaatgtggtgtgggcactgtggctcgggaggacctgccaggccatctgaaggacagctgtaacaccgccctggtgctctgcccattcaaagactccggctgcaagcacaggtgccctaagctggcaatggcacggcatgtggaggagagtgtgaagccacatctggccatgatgtgtgccctggtgagccggcaacggcaggagctgcaggagcttcggcgagagctggaggagctatcagtgggcagtgatggcgtgctcatctggaagattggcagctatggacggcggctacaggaggccaaggccaagcccaaccttgagtgcttcagcccagccttctacacacataagtatggttacaagctgcaggtgtctgcattcctcaatggcaatggcagtggtgagggcacacacctctcactgtacattcgtgtgctgcctggtgcctttgacaatctccttgagtggccctttgcccgccgtgtcaccttctcccttcttgggtagggcagacatgccttggtgccggtcacactctacacggactgaggtgcctgctcaggtgctatgtcccaagagccataagggggtgggaattggggagggagaaagggtagttcaaagagtctgtcttgagatctgattttttccccctttacctagctgtgccccctctggttatttatttccttagtgccaggagggcacagca

SEQ ID NO: 144874 - DNA, 689 bp, Artificial Sequence
  derived and/or modified sequence
gcccggagccgggagcgccgctccagcgaggcgcgggctgtggggccgccgcgtgcctggccccgctcgcccgtgccggccgctcgcccgccatgcctggcttcgactacaagttcctggagaagcccaagcgacggctgctgtgcccactgtgcgggaagcccatgcgcgagcctgtgcaggtttccacctgcggccaccgtttctgcgatacctgcctgcaggagttcctcagtgaaggagtcttcaagtgccctgaggaccagcttcctctggactatgccaagatctacccagacccggagctggaagtacaagtattgggcctgcctatccgctgcatccacagtgaggagggctgccgctggagtgggccactacgtcatctacagggccacctgaatacctgcagcttcaatgtcattccctgccctaatcgctgccccatgaagctgagccgccgtgatctacctgcacacttgcagcatgactgccccaagcggcgcctcaagtgcgagttttgtggctgtgacttcagtggggaggcctatgagagccatgagagttctctgggctttggttatcccaagttcatctcccaccaggacattcgaaagcgaaactatgtgcgggatgatgcagtcttcatccgtgctgctgttgaactgccccggaagatcctcagctga

SEQ ID NO: 144875 - protein, 355 aa, Artificial Sequence
  derived and/or modified sequence
MAGCCCLSAEEKESQRISAEIERQLRRDKKDARRELKLLLLGTGESGKSTFIKQMRIIHGSGYSDEDRKGFTKLVYQNIFTAMQAMIRAMDTLRIQYVCEQNKENAQIIREVEVDKVSMLSREQVEAIKQLWQDPGIQECYDRRREYQLSDSAKYYLTDIDRIATPSFVPTQQDVLRVRVPTTGIIEYPFDLENIIFRMVDVGGQRSERRKWIHCFESVTSIIFLVALSEYDQVLAECDNENRMEESKALFKTIITYPWFLNSSVILFLNKKDLLEEKIMYSHLISYFPEYTGPKQDVRAARDFILKLYQDQNPDKEKVIYSHFTCATDTDNIRFVFAAVKDTILQLNLREFNLV

SEQ ID NO: 144876 - DNA, 1068 bp, Artificial Sequence
  derived and/or modified sequence
atggccgggtgttgctgcttaagcgccgaggagaaggaatcacaaagaattagtgcagaaatcgagcggcagctgcgacgagacaaaaaggatgctcggagagaattgaaactgctgctactaggcaccggagagagcggaaagtccacctttataaaacaaatgcgcatcattcacgggagtggatattctgatgaggaccgcaaaggctttacaaaacttgtatatcaaaacatctttacagccatgcaggctatgatccgggcaatggataccttgagaattcaatatgtgtgcgaacagaacaaagaaaacgcccaaatcattagagaagtcgaagtggacaaggtgtctatgctgtccagagaacaagttgaggccattaaacagctttggcaagaccccggaatccaggagtgctacgaccgacgccgtgagtaccaactttcagattccgcaaaatattatctgaccgacatcgatcgcatagccacaccgtcgttcgtgccgacccagcaggacgtcctccgggtccgggtccccacaacagggattatcgagtacccattcgacctcgagaatatcatatttagaatggtggatgtgggaggccagcgtagcgaacggcggaaatggatccattgtttcgagagcgtgacaagcatcattttccttgtggccctaagcgaatacgatcaggtcctcgctgagtgtgataatgagaaccgtatggaggaatctaaagccctcttcaagacaatcatcacttatccatggttcctaaacagcagcgtaatcctttttctaaacaagaaagatctgcttgaggagaagatcatgtacagtcatctgatcagttatttcccagagtacaccggccccaagcaggatgtcagggcggctagggatttcatcctgaaactctaccaggaccaaaaccctgacaaagagaaagtgatttactcccattttacttgcgccaccgatacggataacatccggttcgtattcgctgctgtcaaagacacgatccttcaactgaacctcagagaatttaacctcgtgtag

SEQ ID NO: 144877 - DNA, 2482 bp, Artificial Sequence
  derived and/or modified sequence
ctgcggtcactgctgaggttttcagaactttccaggcaaaggccagccaggtcctttgcctccaacccactccgcgcctacctcccgcctggggacacccctaggcccaggagatcctactctcccccgagcaccgacgttccaactcgtctgcgcccccgactgctgtccggctcctgtgccaaggggcgcgcgcatcttcccggggccagcaacgctcccaacttctcgactcgccctcctcctccccagagcgagagtggggcgggctgagcccggatccggggtgcactcgagcgttcccagcgctcggcattcaccccgcctcagagccgactttcgaagggggattgagcctcggaggtccaggcgtcttactccaaagctcaagtcggcccccgtcttttctttccacacccctgtgcccgtcgcatgctggccgggtgagcggccgggccgaggattcgggtgcccggggccgcgtcgccccgtcgggtactgagctgagcgcaccatggccggctgctgctgcctgtccgcggaggagaaggagtcgcagcgcatcagcgcggagatcgagcgacagcttcgtcgggacaagaaggacgcgcgccgtgagcttaagctgctgctgctgggaactggtgaaagtgggaaaagcacctttatcaagcagatgagaattatccatgggtctggttacagcgacgaagacagaaaggggttcacgaagctggtttaccaaaacatattcaccgccatgcaagccatgatcagagcgatggacacgctaaggatacagtatgtgtgtgaacagaataaggaaaatgcccagataatcagagaagtggaagtggacaaggtctccatgctctccagggagcaggtggaggccatcaagcagctctggcaagatccaggcatccaggagtgttacgacaggaggagggagtaccagctgtcggactctgccaaatattacctgactgacattgaccgcatcgccacaccatcattcgtgcctacccaacaagatgtgcttcgcgtccgagtgcccaccaccggcatcattgagtatccatttgacttggaaaacatcatctttcggatggtggatgttggtggccaacgatcggaaagacggaagtggattcactgctttgagagtgtcacctccattattttcttggttgctctgagtgaatatgaccaggtcctggctgagtgtgacaacgagaatcgcatggaagagagcaaagccttatttaaaaccatcatcacctacccctggtttctgaattcgtctgtgattttattcttgaacaagaaggatcttttggaagagaaaatcatgtactctcatctaattagctatttcccagaatacacaggaccgaaacaggatgtcagagctgccagagactttatcctgaagctttaccaagatcagaatcctgacaaagagaaagtcatctactctcacttcacatgtgctacagatacagacaatattcgctttgtgtttgctgctgtcaaagacacaattctacagctaaacctaagggaattcaaccttgtctaaaagctgctgcccactcctcccctataacagaagatgtgatttgcaaactccttgttttatttgcaagtgcttctgacatcaccagagccagccccatgccaggaactaaggatgtcatgtagatcgtggggacagagatgggtgatggaacttggaagatatttgagtttaccaacatactttaaaagtccttacatcccaaattgtgtttataattattttcttgacttttggctataagattttgtgtaatttttgaatttggtgttttctagaatttttaaaagccactttgatttagttttaaatatgtttaaaaatagcgattaaaattatgtaagcaaggagcctgttagtttatagatcatgccttcaaacctctagagttaatttgggtgacttttttaaaaataagaatgttaatgggtttgaagctttttattaaaccttgtaatttagagacatttttaattgtgtttctcacctcatgctgaagggtgactcctttaacatgccaccaaagattttttttaaacacttggttctttttgtgtgttaactttctaagccaaattaatggatatataagtatatctaatttagctttgccacagtttgatcaccaagaagccaaagctgacatagagtaaatgggctctagatagcatatatgttttattggtgaaaaatgtgtgtgtgtgcacgtgtgtgtgtgtgtacatttttacccccaatgtatatgaccagatcttaaaaatgtatgaaatggctagaagtccacattgtttgacaaatgttacgtaaccctgccaaagttctgatggccaccacagatttgctgtttgaattatgtatgctgtgcctttctgaggaggctaagaatataccattctgctatta

SEQ ID NO: 144878 - DNA, 1068 bp, Artificial Sequence
  derived and/or modified sequence
atggccggctgctgctgcctgtctgctgaggagaaggagagccagaggatctctgctgagattgagcggcagctgcggcgggacaagaaggatgcccggcgggagctgaagctgctgctgctgggcactggagagagcggcaagagcaccttcatcaagcagatgaggatcatccacggcagcggctacagtgatgaggacaggaagggcttcaccaagctggtgtaccagaacatcttcaccgccatgcaggccatgatccgggccatggacaccctgcgcatccagtatgtgtgtgagcagaacaaggaaaatgcccagatcatccgggaggtggaggtggacaaggtgtccatgctgagccgggagcaggtggaggccatcaagcagctgtggcaggaccccggcatccaggagtgctatgacagaagaagagagtaccagctgagtgacagcgccaagtactacctgacagacatcgacagaattgccacccccagctttgtgcccacccagcaggatgtgctgcgggtgcgggtgcccaccaccggcatcatcgagtacccctttgacctggagaacatcatcttcaggatggtggatgtgggcggccagaggagtgaaagaaggaagtggatccactgctttgagagcgtgaccagcatcatcttcctggtggccctgtctgaatatgaccaggtgctggctgaatgtgacaatgaaaataggatggaggagagcaaggccctcttcaagaccatcatcacctacccctggttcctgaacagcagcgtcatcctcttcctgaacaagaaggacctgctggaggagaagatcatgtacagccacctgatctcctacttccctgagtacacaggccccaagcaggatgtgcgggccgcccgggacttcatcctgaagctgtaccaggaccagaacccagacaaggagaaggtgatctacagccacttcacctgtgccacagacacagacaacatccgctttgtgtttgctgctgtgaaggacaccatcctgcagctgaacctgcgggagttcaacctggtgtag

SEQ ID NO: 144879 - DNA, 1068 bp, Artificial Sequence
  derived and/or modified sequence
atggccggctgctgctgcctgagcgccgaggagaaggagagccagcgcatctctgccgagatcgaacggcaactcagacgggacaagaaggatgcccgaagagaactgaaactgcttcttcttgggaccggggaaagtggaaagtcaacatttatcaagcaaatgcgtatcatccacggctccggctatagtgacgaagataggaaaggtttcacgaaactggtctaccagaatatatttacagcgatgcaggcgatgatcagagccatggacaccttacgcatacagtatgtttgcgagcagaacaaggaaaacgcccagatcattagagaggtagaggtggacaaagtgagtatgctatcacgggaacaggtggaggcgattaaacagctgtggcaggacccgggtatccaggaatgctatgatcggaggcgagagtatcagctttcagattctgccaagtactatctgacggatattgacaggatagctacacccagtttcgtacccacacagcaagacgtgctacgcgtgagagttcctactactggcatcatcgagtacccatttgaccttgaaaatattatcttccgaatggtggatgtaggcggacagaggtctgagcggcgaaagtggattcactgtttcgagagcgttacgagcatcattttcctggtcgccctgagtgaatatgatcaggtactggccgaatgcgataacgagaaccgaatggaagaatccaaggcactcttcaagaccataatcacctacccttggttcttgaatagttcggtcatcttatttcttaataagaaagatctgctggaagaaaagattatgtactcccatctcatttcgtactttccagagtatacgggtccaaagcaggatgtacgggcagcacgtgacttcatcctgaagctctatcaagatcaaaaccctgacaaggaaaaagtgatttactcccattttacatgcgctacggacaccgacaacatccgtttcgtgttcgctgctgtcaaggatactatccttcagcttaacctgcgcgaatttaatttggtctag

SEQ ID NO: 144880 - DNA, 1068 bp, Artificial Sequence
  derived and/or modified sequence
atggccggatgttgttgcctgagtgcagaggagaaggagagccagcggatcagtgctgagattgagaggcagctaaggcgggacaaaaaagacgcaagacgggaattaaaactgcttctgttaggcaccggcgagagtggcaaaagtactttcatcaagcagatgaggattattcacggtagcggatactccgacgaagataggaaaggcttcaccaagctcgtgtatcagaatattttcaccgctatgcaggccatgattagagccatggacactctaagaatccaatatgtttgcgagcaaaacaaagaaaatgctcagatcattcgcgaggtggaggtcgacaaagtctcaatgttgagccgtgaacaggttgaggcgatcaaacagctctggcaggaccctggcatccaggaatgttacgaccggagacgggagtatcagcttagcgactctgcaaaatattaccttacagatatcgaccggatcgcaaccccttcatttgtgcccacgcagcaagacgttctgagagtccgggtgccaaccaccggcattatcgaatatccatttgacttggagaacatcatatttcggatggtggacgtgggagggcagagatctgagagaaggaagtggattcattgcttcgagtcagtgacctcaattatttttctagtggccctgtcagaatacgatcaggttcttgccgagtgcgataacgagaatcgaatggaagagtccaaggccctgtttaaaactataattacgtacccttggtttctgaattccagtgtaattttgttcctgaacaaaaaagacctgttggaagaaaagatcatgtacagccatttaataagctacttccccgaatatacagggcctaagcaggatgttcgggcagccagggactttattttgaagctttaccaggaccagaatcctgataaggagaaggtgatctactcccattttacttgtgctaccgatactgacaatattcgcttcgtgttcgctgcagtgaaagacaccatactccagctgaatctgcgagagtttaacttagtgtag

SEQ ID NO: 144881 - DNA, 1068 bp, Artificial Sequence
  derived and/or modified sequence
atggccggctgctgctgcctgagcgccgaggagaaggagagccagagaatcagcgccgagatcgagagacagctgagaagagacaagaaggacgccagaagagagctgaagctgctgctgctgggcaccggcgagagcggcaagagcaccttcatcaagcagatgagaatcatccacggcagcggctacagcgacgaggacagaaagggcttcaccaagctggtgtaccagaacatcttcaccgccatgcaggccatgatcagagccatggacaccctgagaatccagtacgtgtgcgagcagaacaaggagaacgcccagatcatcagagaggtggaggtggacaaggtgagcatgctgagcagagagcaggtggaggccatcaagcagctgtggcaggaccccggcatccaggagtgctacgacagaagaagagagtaccagctgagcgacagcgccaagtactacctgaccgacatcgacagaatcgccacccccagcttcgtgcccacccagcaggacgtgctgagagtgagagtgcccaccaccggcatcatcgagtaccccttcgacctggagaacatcatcttcagaatggtggacgtgggcggccagagaagcgagagaagaaagtggatccactgcttcgagagcgtgaccagcatcatcttcctggtggccctgagcgagtacgaccaggtgctggccgagtgcgacaacgagaacagaatggaggagagcaaggccctgttcaagaccatcatcacctacccctggttcctgaacagcagcgtgatcctgttcctgaacaagaaggacctgctggaggagaagatcatgtacagccacctgatcagctacttccccgagtacaccggccccaagcaggacgtgagagccgccagagacttcatcctgaagctgtaccaggaccagaaccccgacaaggagaaggtgatctacagccacttcacctgcgccaccgacaccgacaacatcagattcgtgttcgccgccgtgaaggacaccatcctgcagctgaacctgagagagttcaacctggtgtag

SEQ ID NO: 144882 - DNA, 3999 bp, Artificial Sequence
  derived and/or modified sequence
atgagtgacatggactatcctctgcagggtcccggactgctgtccgtccccaatctcccagaaataagtagtatccgcagggtcccccttccaccagagctggttgagcagttcgggcacatgcagtgcaactgcatgatgggtgtattccctccgatttctcgggcttggctgaccatcgactcggatattttcatgtggaactacgaggacggcggagacctcgcttattttgacggcttgagcgaaacaatactcgccgtgggtttggtaaagccaaaggcaggcatattccagccacacgtgcggcacttgttagtgctggccacaccagtagacatcgtgattcttggactgtcttacgctaatttgcagaccggaagcggggtgttgaatgattccctttcaggcggcatgcagttgcttcctgatcctctctattctttgccgaccgacaatacctaccttctgacaatcacttcgacagataatggccgcatattcctggccggcaaggacgggtgtctgtatgaggtcgcatatcaagctgaagcagggtggtttagtcagcggtgtcgcaaaattaaccattcaaaatccagcctatcattcctcgtccccagtctgctgcaattcaccttttcagaagatgacccaattcttcagatcgccatcgacaacagccggaatatcctctacaccagaagcgaaaagggagtgatccaggtttacgacttggggcaggatggccagggaatgagcagagtcgcttccgtctctcagaacgcgatagttagcgctgctggcaatatcgcgaggacgatcgatcgttccgtttttaaacctatagttcagatcgccgtgattgaaaattccgaatctcttgattgccagttgttggccgtcacccatgccggtgttagactctatttctcaacctgtccgttccggcagcctttagctagaccgaatacattgaccctggttcatgttcgcttaccacccggcttctcggcctcgagcactgtagaaaagcccagtaaagttcatagggcactgtactccaaggggatccttctcatggcggccagcgagaatgaggataacgatatcctgtggtgtgtaaaccacgataccttcccgttccagaagccaatgatggaaactcagatgaccgccggtgtcgatggacatagctgggcacttagtgctattgacgaactcaaggttgataagattataacacccctgaacaaagaccacatcccaataactgacagtcccgtggtggttcagcagcatatgctgccgcctaaaaagttcgtcttgcttagcgctcagggctctttgatgttccacaaattgcgaccagtggatcagctgcggcatctgctggtcagcaacgtgggcggagatggggaggaaattgagaggttttttaagctgcaccaagaagatcaggcttgcgctacatgcttaatcctggcctgtagcacagcagcatgcgaccgggaagtgagcgcatgggcaacccgggccttctttcgctacggcggcgaagctcagatgagatttcccaccaccctgcctccaccaagcaacgtcggcccaatcttgggttcccctgtatattcaagctcaccagtcccttctggaagcccttaccccaacccttcattcctgggaacaccctcacacgggattcaaccccccgccatgtcaacgcctgtctgtgctctgggcaatcccgctacccaggcaacaaatatgtcctgcgtcaccggtccagagatcgtctatagtggaaaacacaatggcatatgtatttatttctctaggatcatggggaatatttgggacgcgtcacttgtggttgagcggatctttaaaagcggaaatagagagatcacggccatcgagtctagcgtcccatgtcagttattggaatctgttctgcaggagctgaagggcctgcaagagttcctcgatcgcaattcgcagtttgccgggggtcccctgggaaacccgaatacaacagccaaggtacagcagaggctgattggatttatgcgcccagagaatgggaacccacagcaaatgcagcaggagcttcagcgaaaattccatgaagcccagttatctgaaaagatttccctccaggctattcaacagctggttagaaagtcctatcaggctctggcattatggaaattactctgcgaacatcagtttacaataatcgtcgccgaattacagaaagagcttcaggagcagctgaagattaccacattcaaggatctggtcatccgcgataaagagctgactggagccctcatcgccagccttatcaattgctacatccgggataatgctgccgttgatggtatttctctgcatctgcaggacatctgtccactattgtattccacagacgacgcaatctgcagcaaagctaacgagctgcttcaaaggagcaggcaggttcagaataaaacggaaaaagaacgaatgctgagggaatcattaaaagaatatcaaaaaattagcaatcaagtggatctgagtaatgtctgcgcacagtacaggcaagtgcgattttatgagggcgtggtggaactgtcgctgactgctgcggagaagaaagatccccaaggcctagggctacatttctataaacatggcgagcctgaggaagacatagtggggctgcaggcgtttcaggagaggctgaactcatacaaatgcatcacagatactttgcaggagctggtgaatcagtcaaaagccgctccccagtcgccatccgttccaaagaagcctggcccccctgtgttatcttctgacccaaatatgctaagcaacgaggaggctggccaccattttgaacaaatgcttaagctttcacaaagatctaaagatgaactgttctccatcgccctgtataattggctgatccaggtggatctagctgacaagctcctccaggtggcttcgccgttcctggaaccacatctggtgaggatggcaaaagtggaccaaaatcgggtcaggtacatggatctcctgtggaggtactatgagaaaaatcgaagcttctctaacgcagcccgagtgctcagccggctagcagacatgcactcgacggagatttcactccagcagaggctcgagtacattgctagggccattttatctgcgaagtcttccactgctatctccagtatcgctgctgatggtgagtttttgcatgagttggaagagaagatggaggtggctcgcattcagctgcagattcaggagactctccagcgccaatattctcaccattcctccgtgcaggacgccgtcagccagcttgattctgagctgatggacatcactaaactctacggagagttcgcagatcctttcaagttagctgaatgtaagctggcgattatccactgtgcgggctacagtgatcctattctggtacaaaccctgtggcaggatattatcgaaaaggagctcagtgatagcgttactctgtccagttcggacagaatgcatgctctgtctctgaaaatcgtcctcctcggcaagatctacgccggcaccccccggttctttcctctggacttcatagttcagttcctcgagcagcaggtgtgtactctgaactgggacgttggctttgttattcagacgatgaatgaaatcggtgtgccattgcctagacttttggaggtgtatgatcagttatttaagagtcgggatcccttctggaaccggatgaagaaacctctccacctgcttgactgcatccacgtgctgctaattagatacgtggaaaatccctctcaggtactgaattgcgagaggcggcgtttcactaacctatgtctggacgccgtgtgtggctacctcgtggagctacaaagtatgtcttccagcgtcgccgtccaagctattacgggtaatttcaaatccctacaagctaagctggaacggctgcattag

SEQ ID NO: 144883 - DNA, 3999 bp, Artificial Sequence
  derived and/or modified sequence
atgtctgacatggactaccccctgcagggccctggcctgctgtctgtgcccaacctgcctgagatcagcagcatccggcgggtgcccctgcccccagagctggtggagcagtttggccacatgcagtgcaactgcatgatgggcgtcttcccccccatcagccgggcctggctgaccatcgacagcgacatcttcatgtggaactatgaagatggaggagacctggcctactttgatggcctgtctgagaccatcctggccgtgggcctggtgaagcccaaggccggcatcttccagccccacgtgcgccacctgctggtgctggccacccctgtggacatcgtcatcctgggcctgtcctatgccaacctgcagacaggcagcggcgtgctgaatgacagcctgagcggcggcatgcagctgctgcctgaccccctgtacagcctgcccacagacaacacctacctgctgaccatcaccagcacagacaatggccgcatcttcctggccggcaaggatggctgcctgtatgaggtggcctaccaggccgaggccggctggttcagccagcgctgcaggaagatcaaccacagcaagagcagcctgtccttcctggtgcccagcctgctgcagttcaccttctctgaagatgaccccatcctgcagatcgccatcgacaacagcaggaacatcctgtacaccaggtctgagaagggcgtcatccaggtgtatgacctgggccaggacggccagggcatgagccgggtggcctctgtgtcccagaatgccatcgtgtctgctgctggcaacatcgcccggaccatcgacaggagcgtcttcaagcccatcgtgcagattgctgtgattgagaacagcgagagcctggactgccagctgctggccgtgacccatgctggggtgcggctgtacttcagcacctgccccttccggcagcccctggcccggcccaacaccctgaccctggtgcacgtgcggctgcccccaggcttcagcgccagcagcacagtggagaagcccagcaaggtgcaccgggccctgtacagcaagggcatcctgctgatggccgcctctgaaaatgaagataatgacatcctgtggtgtgtgaaccacgacaccttccccttccagaagcccatgatggagacccagatgacagctggggtggatggccacagctgggccctgagcgccattgatgagctgaaggtggacaagatcatcacccccctgaacaaggaccacatccccatcacagacagccctgtggtggtgcagcagcacatgctgccccccaagaagtttgtgctgctgagcgcccagggcagcctgatgttccacaagctgcggcctgtggaccagctgcggcacctgctggtgtccaatgtgggcggagatggagaggagattgagcgcttcttcaagctgcaccaggaggaccaggcctgtgccacctgcctgatcctggcctgcagcacagctgcctgtgaccgggaggtgtctgcctgggccacccgggccttcttccgctatggaggagaggcccagatgaggttccccaccaccctgcccccacccagcaatgtgggccccatcctgggcagccctgtgtacagcagcagccctgtgcccagcggcagcccctaccccaaccccagcttcctgggcacccccagccacggcatccagcccccagccatgagcacccctgtgtgtgccctgggcaacccagccacccaggccaccaacatgagctgtgtgacaggccctgagatcgtgtacagcggcaagcacaacggcatctgcatctacttcagccgcatcatgggcaacatctgggatgccagcctggtggtggagcgcatcttcaagagcggcaaccgggagatcacagccatcgagagctctgtgccctgccagctgctggagagcgtgctgcaggagctgaagggcctgcaggagttcctggacaggaacagccagtttgctgggggccccctgggcaaccccaacaccacagccaaggtgcagcagaggctgattggcttcatgaggccagaaaatggaaacccccagcagatgcagcaggagctgcagaggaagttccacgaggcccagctgtctgagaagatcagcctgcaggccatccagcagctggtgaggaagagctaccaggccctggccctgtggaagctgctgtgtgagcaccagttcaccatcatcgtggccgagctgcagaaggagctgcaggagcagctgaagatcaccaccttcaaggacctggtgatccgggacaaggagctgactggagccctgattgccagcctcatcaactgctacatccgggacaatgctgctgtggatggcatcagcctgcacctgcaggacatctgccccctgctgtacagcacagatgatgccatctgcagcaaggccaatgagctgctgcagaggagccggcaggtgcagaacaagacagagaaggagaggatgctgcgggagagcctgaaggagtaccagaagatcagcaaccaggtggacctgagcaatgtgtgtgcccagtaccggcaggtgcgcttctatgaaggagtggtggagctgagcctgacagctgctgagaagaaggacccccagggcctgggcctgcacttctacaagcatggagagcctgaggaggacatcgtgggcctgcaggccttccaggagcggctgaacagctacaagtgcatcacagacaccctgcaggagctggtgaaccagagcaaggccgccccccagagccccagcgtgcccaagaagccaggcccccctgtgctgagcagtgaccccaacatgctgagcaatgaggaggccggccaccactttgagcagatgctgaagctgagccagaggagcaaggatgagctgttcagcatcgccctgtacaactggctgatccaggtggacctggccgacaagctgctgcaggtggccagccccttcctggagccccacctggtgaggatggccaaggtggaccagaacagagtgcgctacatggacctgctgtggagatactatgagaagaacagaagcttcagcaatgctgcccgggtgctgagccggctggccgacatgcacagcacagagatcagcctgcagcagaggctggagtacatcgcccgggccatcctgagcgccaagagcagcacagccatcagcagcattgctgctgatggagagttcctgcacgagctggaggagaagatggaggtggcccgcatccagctgcagatccaggagaccctgcagaggcagtacagccaccacagctctgtgcaggatgctgtgtcccagctggacagcgagctgatggacatcaccaagctgtatggagaatttgctgaccccttcaagctggccgagtgcaagctggccatcatccactgtgccggctacagcgaccccatcctggtgcagaccctgtggcaggacatcatcgagaaggagctgagtgacagcgtgaccctgagcagcagtgacaggatgcacgccctgagcctgaagatcgtgctgctgggcaagatctatgccggcaccccccgcttcttccccctggacttcatcgtgcagttcctggagcagcaggtgtgcaccctgaactgggatgtgggctttgtgatccagaccatgaatgaaattggagtgcccctgccccggctgctggaggtgtatgaccagctgttcaagagccgggaccccttctggaacaggatgaagaagcccctgcacctgctggactgcatccacgtgctgctgatccgctacgtggagaaccccagccaggtgctgaactgtgaaagaagacgcttcaccaacctgtgcctggatgctgtgtgtggctacctggtggagctgcagagcatgagcagctctgtggccgtgcaggccatcaccggcaacttcaagagcctgcaggccaagctggagcggctgcactag

SEQ ID NO: 144884 - DNA, 3999 bp, Artificial Sequence
  derived and/or modified sequence
atgagcgacatggactaccccctgcagggccccggcctgctgagcgtgccaaatctgcccgagatctcctcaattcgccgtgtgcccctccccccggagttagtcgagcagtttggacatatgcaatgcaattgtatgatgggtgtgtttccgcctatctcaagggcatggctgacaatcgactctgatatctttatgtggaactacgaagacggcggcgacctagcttattttgacggccttagcgaaaccatactggctgtcggcctggttaagccgaaggccggcatctttcaacctcacgtccgacatttactcgtcttggccacccctgtggatatcgtcatcctaggcttgtcctacgccaatctacaaacagggtccggagtgttgaacgatagcctcagcggcggtatgcagctgctgcctgatcccttgtattccctgccaactgacaatacatacctcttgaccattacatctacagataacggccgcattttcctagcaggcaaagatggatgcttgtacgaggtcgcatatcaagcggaagcgggctggttttcacagcgttgtcggaagataaaccactcgaagagtagcctgtcttttcttgtgccgtccctgctgcagttcaccttctcagaggacgaccccatcctccagattgccatcgacaatagccggaatatcctttacacaagaagtgaaaaaggggtgatacaggtctacgacctcggacaagatgggcaagggatgagccgggttgcctcagtgagtcagaacgccatagtgagtgccgcgggcaacatcgccagaactatagaccgcagcgtctttaaacccatcgtccaaatagccgtcatcgaaaattcagagtctttggactgtcaactgcttgccgtgacccatgccggtgtgcggttatatttcagtacctgtccttttcggcaaccgctggccaggccaaacaccctgactctggttcatgtgcgtttaccacccggtttctctgcatcatccaccgtggagaagccttcaaaggttcaccgagccctgtacagtaaaggcatcctcctgatggctgctagcgagaacgaggacaatgacatattatggtgtgtcaaccacgatactttccccttccagaaaccaatgatggagactcagatgacagctggtgttgacgggcactcgtgggctttgagcgcaattgatgagttgaaggtagataaaattatcacacctctgaataaggatcatattcccatcacagactcccctgtggtagtacaacagcatatgctgcccccgaagaagttcgtgctactcagtgcccaaggttctctcatgtttcacaagctgaggccagtggaccagcttcgtcatcttcttgtgtctaacgttggtggggatggagaggagatcgaaaggttcttcaagctgcaccaggaggaccaggcttgtgctacttgcctgattctcgcatgctccacggccgcctgcgatcgggaagtgagcgcgtgggccactcgtgcatttttccgatatgggggcgaagcacagatgcggtttcctaccactttaccccctcctagtaacgtggggccgattcttgggagcccagtgtattcatcttctcctgtgccgagtggtagcccctaccctaatccaagcttcttaggcactcctagccacggaatccagccacccgccatgtcgactccggtttgcgccctcgggaatcccgctactcaggctaccaatatgtcttgcgtgacagggcctgaaatcgtatattccggaaaacataacgggatctgtatctatttttcacgcatcatgggtaacatctgggatgcatcattggttgttgaacggatatttaagtctggcaatcgcgaaattactgctatcgagagttctgtaccatgccaacttctggaatctgtgctgcaggaactgaagggtctgcaggaatttcttgacagaaattcgcagtttgccggcggccccctcggaaatcccaatactacagccaaggtccagcagagactcatcggctttatgagacctgagaacggaaatccccagcaaatgcagcaggaattgcagagaaagttccatgaggcccagctgagcgagaaaatcagcttacaggctatccaacagctggtgaggaagagttatcaggcactcgcattgtggaaacttctctgtgaacaccagttcaccataattgtcgcagagttgcaaaaggagctgcaggaacagctcaagattacgacgttcaaggatctggtgatccgtgataaggagcttactggggcactgattgcaagcctgattaactgctatatccgcgacaacgccgccgtggacgggatatcactgcatttacaggatatctgtcccctgctctatagcaccgatgacgctatttgttcaaaagccaatgagcttctacagagatccagacaggttcagaacaagacagaaaaagaaagaatgctacgagaaagcctgaaggagtaccagaagatttctaatcaggtcgacctcagcaacgtgtgtgcacaataccgtcaggtcagattctacgagggcgtggtggaactgagtctgactgcagcagagaaaaaagaccctcaggggctgggcctgcacttctataagcacggcgaacccgaggaagacatcgtaggactccaggctttccaggaacgcctgaattcctataaatgtataacagataccctccaagagctggtaaaccagtccaaagccgcgccgcagtctcccagcgtgccgaagaagcccggaccccctgtgctgagttctgatcccaacatgctgagtaatgaggaggctggccaccactttgagcagatgctgaaactctcacagagatctaaagatgagctatttagtattgcattgtataactggctcatacaggtggacctcgccgataagttattgcaggtggccagtccttttctcgagccccatttagtgcggatggccaaagtagatcaaaacagagtgcgctacatggacttgttgtggagatattacgaaaaaaacaggagtttttccaatgctgcccgcgtcctgtctaggctagctgatatgcatagtacagagatatccttgcagcagaggcttgagtatatcgctcgcgctatcctgagtgctaagtcctcgaccgccatttcttcaattgctgcagatggcgaattcctccacgaattggaggagaaaatggaggtagcacgtatccagcttcagattcaggaaactctgcaacgccaatacagtcaccactcaagcgtccaggacgctgtcagtcagcttgactccgagttgatggacattaccaagctgtatggcgaattcgcagatccctttaagcttgctgagtgtaaactcgcgattatacactgcgccggttactctgatccgatactcgtgcagaccctgtggcaggatattatagaaaaggaattgtcagattcggtgacactttcaagcagcgataggatgcatgcccttagcctaaaaattgtcctcctaggaaaaatttacgccggaacccctcgcttctttccacttgactttattgtccagttccttgagcagcaggtctgcacattgaactgggatgtgggtttcgtcatacagaccatgaacgagattggggtgccattaccaaggcttctcgaagtgtacgaccagctgttcaaatcgcgggaccccttctggaatcgcatgaagaaaccattgcacctgctagattgtatccacgtccttctgatccgctacgtagagaacccatctcaggtccttaattgcgagcgccgcagatttacaaatctttgtctggacgccgtctgtggctacctggtggaactacagtcaatgtctagcagcgtggcagtacaggccatcacgggaaatttcaaatccctgcaggcgaagctcgagagactgcattag

SEQ ID NO: 144885 - DNA, 3999 bp, Artificial Sequence
  derived and/or modified sequence
atgtctgacatggactaccctcttcaagggccaggcctcctttcggttcccaatctccccgagatcagttctatccgcagggtgccgctccctccagagctagtggaacagttcggtcacatgcagtgcaattgcatgatgggcgtatttccccctataagccgcgcatggttgactatcgacagtgatatttttatgtggaactatgaagatgggggagacctcgcctactttgatggtctgagcgaaacaatcctcgcggtggggctggtgaagcccaaggccggtatctttcaaccccacgtgcggcatctgctggtccttgccacacctgtggatatcgtaatcctgggtctctcatatgccaatctgcagacaggctccggagtgctgaacgatagcctttccggcggtatgcagctactgccggacccactctattccctgcctacagataacacctatctccttacgattacatctaccgataatggcaggatttttctggcaggtaaggatggatgcctgtacgaggtcgcataccaagctgaggccggttggttctcccagaggtgtagaaaaatcaaccattccaaatccagcctttcttttttggtgccttcgctactccaattcaccttcagcgaagacgaccccattctgcagatagccatagataattcacgcaatattctgtacactaggagtgagaaaggcgtgatccaggtgtatgatctgggacaggatggccagggaatgtcccgagtggcgtcagtgtcccagaatgcgatagtgtccgctgccggtaatattgcccgaacaattgaccggagtgtgtttaaacccatcgtgcaaatagcagttatcgaaaattctgaatctctggactgtcagctgttagccgttacgcacgctggggtccgtttatacttctcaacttgccccttccggcagcccctggccagacctaataccctgacccttgttcacgttcgactgcctcctggattctcagcaagttctacagtcgagaagccctccaaggtacatcgagccctctactcaaaggggatactgttaatggccgctagcgaaaacgaggacaacgacatattgtggtgcgtgaatcacgatacatttccttttcaaaagcccatgatggagactcagatgaccgccggagtggatggccattcttgggcgctttccgcgattgatgagctcaaggtagataagatcattacccccctgaataaggaccatatcccgatcaccgatagtcctgtcgtggttcaacagcacatgttgccgcctaagaagtttgtactgctctctgcgcagggcagcctgatgtttcacaaactgcgacctgtggatcagctgcggcatctgcttgtcagtaatgtcggcggtgacggagaggagatcgaacgattcttcaaactgcaccaggaagaccaggcatgcgctacgtgtctaatcctggcctgcagcacagcagcttgtgaccgggaagtttccgcgtgggcgactagagcattttttcgctacggcggagaagcccagatgcgtttccccacaacacttccgccacctagcaacgtaggccctatactgggaagccccgtttactccagctcccccgtgcccagtggaagcccctatccaaatccttccttcctggggacgcctagtcatggcatacagcctccggctatgtcaactccggtgtgcgcactagggaatccggcaactcaagcgacgaatatgagctgtgtgacgggtccagaaatcgtctacagcgggaaacataacggaatatgcatttatttctccaggatcatgggcaacatttgggacgccagcttggtggtggaaaggattttcaagtcagggaacagagagatcacggcaatcgagtccagtgtcccctgtcagctcctggagagtgtcctccaagaacttaaaggtttgcaggaattcttggataggaattcccagtttgcaggtggaccactgggcaacccaaacaccaccgcgaaagtacagcaacggctgataggcttcatgcgccctgagaatggcaacccgcagcagatgcaacaggaactgcagcgtaaattccatgaggcacaactgagtgagaaaatctcgttgcaagctatccagcagttggttcggaaatcctaccaggccctggcgctgtggaagctgctgtgtgagcaccagtttactatcattgtggccgagctgcaaaaggaactgcaagagcagctcaagattaccaccttcaaggacctggtgatccgggacaaagagctcaccggggctctgatcgcctccttgattaattgttacatacgggataacgcagctgttgatggaataagcctccatctacaggacatttgccctttgctgtactctacagatgacgccatatgcagcaaggctaacgagctgttacagcgatcccgacaggtacagaacaagaccgaaaaggaaaggatgctgcgggagagtttgaaagaataccagaaaatctccaatcaagttgacctgtcaaacgtttgcgcgcagtatcgacaggtccgattctatgagggggtggtcgagttgtctttgacagctgctgagaaaaaagacccgcaaggcctcgggttgcatttttacaagcacggggagcctgaagaggacattgttggcctgcaggcctttcaggagcggctgaacagctataaatgcattacagatacactccaggaattggtcaatcagagtaaagcagcgcctcagagcccctctgtccccaaaaagccaggccctccagtgctatcttctgatcccaatatgctgagtaatgaggaggctggccaccacttcgagcaaatgctgaagttatcccaaaggtccaaagacgaactcttctccatcgcgctttataactggctgatccaggtggatctggccgataagctgctgcaggtggcttccccgtttttagaaccgcacctggtgaggatggctaaagtcgaccagaaccgggtgaggtacatggacttactgtggagatattacgagaaaaataggagcttctccaacgctgccagagtgctctccaggttggcagatatgcacagcacagagatcagcttacagcagagactggaatatatcgcacgggcaattctcagcgctaagtcctctactgcaatctccagtatcgcagcagatggtgaatttcttcacgagctggaggaaaagatggaagtcgcaagaatccaactgcagatacaggaaaccctccaacggcagtactcacatcactcaagcgtccaagatgctgtctctcagttagactccgagcttatggacattaccaagttatatggggaattcgcagatccttttaaactcgcagaatgtaagcttgcaattatccattgcgcaggctattctgaccctatcttggtccagaccctgtggcaggacatcattgagaaagaacttagcgactcagtgacacttagtagttcagaccgcatgcatgccctatcgttgaagatcgtgttactgggcaaaatctatgccggtactcctcgctttttcccgctcgactttattgtgcaatttctggagcagcaagtctgtacgctgaattgggacgtagggttcgtgatacaaaccatgaacgaaatcggagttccattgccacgactcttggaggtctatgatcagctatttaagagccgtgacccattctggaacaggatgaagaaacccttgcacctcttggattgcatccatgtgctgctgattagatacgtggaaaacccctcgcaggttttgaattgtgagcggaggcgctttacaaacctgtgcctggacgccgtatgtggctatctggtggaattacagtctatgtcttcgagcgtggccgtgcaggcgattacagggaacttcaaatccttgcaagcgaaactcgagaggctgcattag

SEQ ID NO: 144886 - DNA, 3999 bp, Artificial Sequence
  derived and/or modified sequence
atgagcgacatggactaccccctgcagggccccggcctgctgagcgtgcccaacctgcccgagatcagcagcatcagaagagtgcccctgccccccgagctggtggagcagttcggccacatgcagtgcaactgcatgatgggcgtgttcccccccatcagcagagcctggctgaccatcgacagcgacatcttcatgtggaactacgaggacggcggcgacctggcctacttcgacggcctgagcgagaccatcctggccgtgggcctggtgaagcccaaggccggcatcttccagccccacgtgagacacctgctggtgctggccacccccgtggacatcgtgatcctgggcctgagctacgccaacctgcagaccggcagcggcgtgctgaacgacagcctgagcggcggcatgcagctgctgcccgaccccctgtacagcctgcccaccgacaacacctacctgctgaccatcaccagcaccgacaacggcagaatcttcctggccggcaaggacggctgcctgtacgaggtggcctaccaggccgaggccggctggttcagccagagatgcagaaagatcaaccacagcaagagcagcctgagcttcctggtgcccagcctgctgcagttcaccttcagcgaggacgaccccatcctgcagatcgccatcgacaacagcagaaacatcctgtacaccagaagcgagaagggcgtgatccaggtgtacgacctgggccaggacggccagggcatgagcagagtggccagcgtgagccagaacgccatcgtgagcgccgccggcaacatcgccagaaccatcgacagaagcgtgttcaagcccatcgtgcagatcgccgtgatcgagaacagcgagagcctggactgccagctgctggccgtgacccacgccggcgtgagactgtacttcagcacctgccccttcagacagcccctggccagacccaacaccctgaccctggtgcacgtgagactgccccccggcttcagcgccagcagcaccgtggagaagcccagcaaggtgcacagagccctgtacagcaagggcatcctgctgatggccgccagcgagaacgaggacaacgacatcctgtggtgcgtgaaccacgacaccttccccttccagaagcccatgatggagacccagatgaccgccggcgtggacggccacagctgggccctgagcgccatcgacgagctgaaggtggacaagatcatcacccccctgaacaaggaccacatccccatcaccgacagccccgtggtggtgcagcagcacatgctgccccccaagaagttcgtgctgctgagcgcccagggcagcctgatgttccacaagctgagacccgtggaccagctgagacacctgctggtgagcaacgtgggcggcgacggcgaggagatcgagagattcttcaagctgcaccaggaggaccaggcctgcgccacctgcctgatcctggcctgcagcaccgccgcctgcgacagagaggtgagcgcctgggccaccagagccttcttcagatacggcggcgaggcccagatgagattccccaccaccctgcccccccccagcaacgtgggccccatcctgggcagccccgtgtacagcagcagccccgtgcccagcggcagcccctaccccaaccccagcttcctgggcacccccagccacggcatccagccccccgccatgagcacccccgtgtgcgccctgggcaaccccgccacccaggccaccaacatgagctgcgtgaccggccccgagatcgtgtacagcggcaagcacaacggcatctgcatctacttcagcagaatcatgggcaacatctgggacgccagcctggtggtggagagaatcttcaagagcggcaacagagagatcaccgccatcgagagcagcgtgccctgccagctgctggagagcgtgctgcaggagctgaagggcctgcaggagttcctggacagaaacagccagttcgccggcggccccctgggcaaccccaacaccaccgccaaggtgcagcagagactgatcggcttcatgagacccgagaacggcaacccccagcagatgcagcaggagctgcagagaaagttccacgaggcccagctgagcgagaagatcagcctgcaggccatccagcagctggtgagaaagagctaccaggccctggccctgtggaagctgctgtgcgagcaccagttcaccatcatcgtggccgagctgcagaaggagctgcaggagcagctgaagatcaccaccttcaaggacctggtgatcagagacaaggagctgaccggcgccctgatcgccagcctgatcaactgctacatcagagacaacgccgccgtggacggcatcagcctgcacctgcaggacatctgccccctgctgtacagcaccgacgacgccatctgcagcaaggccaacgagctgctgcagagaagcagacaggtgcagaacaagaccgagaaggagagaatgctgagagagagcctgaaggagtaccagaagatcagcaaccaggtggacctgagcaacgtgtgcgcccagtacagacaggtgagattctacgagggcgtggtggagctgagcctgaccgccgccgagaagaaggacccccagggcctgggcctgcacttctacaagcacggcgagcccgaggaggacatcgtgggcctgcaggccttccaggagagactgaacagctacaagtgcatcaccgacaccctgcaggagctggtgaaccagagcaaggccgccccccagagccccagcgtgcccaagaagcccggcccccccgtgctgagcagcgaccccaacatgctgagcaacgaggaggccggccaccacttcgagcagatgctgaagctgagccagagaagcaaggacgagctgttcagcatcgccctgtacaactggctgatccaggtggacctggccgacaagctgctgcaggtggccagccccttcctggagccccacctggtgagaatggccaaggtggaccagaacagagtgagatacatggacctgctgtggagatactacgagaagaacagaagcttcagcaacgccgccagagtgctgagcagactggccgacatgcacagcaccgagatcagcctgcagcagagactggagtacatcgccagagccatcctgagcgccaagagcagcaccgccatcagcagcatcgccgccgacggcgagttcctgcacgagctggaggagaagatggaggtggccagaatccagctgcagatccaggagaccctgcagagacagtacagccaccacagcagcgtgcaggacgccgtgagccagctggacagcgagctgatggacatcaccaagctgtacggcgagttcgccgaccccttcaagctggccgagtgcaagctggccatcatccactgcgccggctacagcgaccccatcctggtgcagaccctgtggcaggacatcatcgagaaggagctgagcgacagcgtgaccctgagcagcagcgacagaatgcacgccctgagcctgaagatcgtgctgctgggcaagatctacgccggcacccccagattcttccccctggacttcatcgtgcagttcctggagcagcaggtgtgcaccctgaactgggacgtgggcttcgtgatccagaccatgaacgagatcggcgtgcccctgcccagactgctggaggtgtacgaccagctgttcaagagcagagaccccttctggaacagaatgaagaagcccctgcacctgctggactgcatccacgtgctgctgatcagatacgtggagaaccccagccaggtgctgaactgcgagagaagaagattcaccaacctgtgcctggacgccgtgtgcggctacctggtggagctgcagagcatgagcagcagcgtggccgtgcaggccatcaccggcaacttcaagagcctgcaggccaagctggagagactgcactag

SEQ ID NO: 144887 - protein, 753 aa, Artificial Sequence
  derived and/or modified sequence
MALLAMHSWRWAAAAAAFEKRRHSAILIRPLVSVSGSGPQWRPHQLGALGTARAYQQIPESLKSITWQRLGKGNSGQFLDAAKALQVWPLIEKRTCWHGHAGGGLHTDPKEGLKDVDTRKIIKAMLSYVWPKDRPDLRARVAISLGFLGGAKAMNIVVPFMFKYAVDSLNQMSGNMLNLSDAPNTVATMATAVLIGYGVSRAGAAFFNEVRNAVFGKVAQNSIRRIAKNVFLHLHNLDLGFHLSRQTGALSKAIDRGTRGISFVLSALVFNLLPIMFEVMLVSGVLYYKCGAQFALVTLGTLGTYTAFTVAVTRWRTRFRIEMNKADNDAGNAAIDSLLNYETVKYFNNERYEAQRYDGFLKTYETASLKSTSTLAMLNFGQSAIFSVGLTAIMVLASQGIVAGTLTVGDLVMVNGLLFQLSLPLNFLGTVYRETRQALIDMNTLFTLLKVDTQIKDKVMASPLQITPQTATVAFDNVHFEYIEGQKVLSGISFEVPAGKKVAIVGGSGSGKSTIVRLLFRFYEPQKGSIYLAGQNIQDVSLESLRRAVGVVPQDAVLFHNTIYYNLLYGNISASPEEVYAVAKLAGLHDAILRMPHGYDTQVGERGLKLSGGEKQRVAIARAILKDPPVILYDEATSSLDSITEETILGAMKDVVKHRTSIFIAHRLSTVVDADEIIVLDQGKVAERGTHHGLLANPHSIYSEMWHTQSSRVQNHDNPKWEAKKENISKEEERKKLQEEIVNSVKGCGNCSC

SEQ ID NO: 144888 - DNA, 2262 bp, Artificial Sequence
  derived and/or modified sequence
atggcactgctggccatgcattcctggcggtgggccgccgccgcagctgctttcgaaaaacggaggcattccgcaatcctgattcgccccctcgtgtctgttagcggtagcggacctcaatggagaccacaccagctcggggccctgggtaccgcccgagcatatcagcagattcctgaatcattgaagtccatcacttggcaacggttagggaaaggcaactccggtcagttcctggacgccgctaaggctctgcaagtgtggcccctgatcgagaaacgcacctgctggcatggccacgccggcggcgggctgcacaccgatccaaaggaggggctgaaggatgttgacactcgtaagattattaaggccatgctttcctacgtatggcccaaggacaggccagacctgagggcaagagttgctatatcactgggatttttggggggagccaaagcaatgaatatagtggtcccctttatgttcaaatatgccgtcgattctctcaatcagatgtcaggtaatatgctgaacctgtccgatgcacctaacacggtggcaaccatggcaacagcggtcctcataggatatggggtgtcacgtgccggagctgcgttctttaacgaggtgaggaatgcagtgtttggtaaggtcgcccagaattctataaggagaatcgccaagaatgttttcctacacctgcacaacctcgatttggggttccacctcagtcggcagactggcgccctctccaaagctatagacaggggcaccaggggaatttctttcgttctctccgctttggtttttaacctgctccccatcatgttcgaagtgatgctagtgtccggcgtgctctactataaatgcggcgcccaatttgcgcttgtgacactgggaactctcggcacctacactgcattcacggttgcagtgacaagatggcggacaaggtttagaatcgagatgaataaggccgacaacgacgcagggaatgccgctattgactcccttcttaactacgaaaccgtcaagtattttaataacgaacggtacgaggcacagcgctatgatgggtttctcaagacctatgagactgcctctttgaaatctactagcaccttggcaatgttgaatttcggccagagtgctattttctccgtgggcctgactgcaattatggttctggcaagtcagggaatcgtcgccggcacgctgactgtcggggacttggtgatggtgaacggcttgctattccagctgagtctgcctctgaactttttgggcaccgtgtacagggagaccaggcaggcactcatcgatatgaatacactgttcacattgcttaaagtcgatacccagatcaaagacaaagttatggcatctcctctgcagatcacaccccagaccgcaacagtggcattcgataatgtgcatttcgagtacatcgagggccagaaggttctcagcggtatctctttcgaggtgccagctggaaaaaaggtggcaatcgttggcggatctggcagcgggaagtcgaccatcgttcgtctactgttcagattttacgagccccagaagggaagcatctatcttgccggccagaacatccaggacgtatcacttgaatctctgaggagggctgtcggagtcgttccgcaggacgccgtcttgtttcacaacacaatttattacaatctcctctatgggaatatcagtgccagtcccgaagaagtgtatgcagttgccaaactcgcaggactgcacgatgcaattctacgtatgccccacggatacgacacccaggtcggagagcgtgggctaaaactgagtggtggagagaagcaacgggtcgcaatagcgcgagcaattctaaaggaccctcccgtaatcttatacgatgaggctacttcctccttggatagtatcactgaggagactattcttggggccatgaaagacgtagttaagcacagaaccagtatcttcatagctcatagactatccactgtagtggacgccgacgagatcattgtccttgaccagggcaaggtagcagaaaggggcacgcaccatggcctgcttgctaaccctcacagcatctatagtgagatgtggcacactcagtcaagtagagtgcagaaccatgacaacccaaagtgggaggcgaagaaggagaatatcagcaaggaagaggagagaaaaaagttacaagaggaaatcgtcaacagcgtcaaagggtgtggcaattgctcttgttag

SEQ ID NO: 144889 - DNA, 2262 bp, Artificial Sequence
  derived and/or modified sequence
atggccctgctggccatgcacagctggcgctgggccgctgctgctgctgcctttgagaagagaagacacagcgccatcctgatccggcccctggtgtctgtgtctggcagcggcccccagtggaggccccaccagctgggcgccctgggcacagcccgggcctaccagcagatccctgagagcctgaagagcatcacctggcagaggctgggcaagggcaacagcggccagttcctggatgctgccaaggccctgcaggtgtggcccctgattgagaagaggacctgctggcacggccatgctgggggcggcctgcacacagaccccaaggagggcctgaaggatgtggacaccaggaagatcatcaaggccatgctgtcctatgtgtggcccaaggacagaccagacctgcgggcccgggtggccatcagcctgggcttcctgggcggggccaaggccatgaacatcgtggtgcccttcatgttcaagtatgctgtggacagcctgaaccagatgagcggcaacatgctgaacctgagtgatgcccccaacacagtggccaccatggccacagctgtgctgattggctatggagtgtcccgggccggggccgccttcttcaatgaggtgagaaatgctgtgtttgggaaggtggcccagaacagcatccgccgcatcgccaagaatgtgttcctgcacctgcacaacctggacctgggcttccacctgagccggcagacaggagccctgagcaaggccatcgaccggggcacccggggcatcagctttgtgctgagcgccctggtgttcaacctgctgcccatcatgtttgaggtgatgctggtgtctggagtgctgtactacaagtgtggggcccagtttgccctggtgaccctgggcaccctgggcacctacacagccttcaccgtggccgtgacccgctggaggacccgcttcagaattgagatgaacaaggctgacaatgatgctggaaatgctgccatcgacagcctgctgaactatgaaacagtgaagtacttcaacaatgaaagatatgaggcccagagatatgatggcttcctgaagacctatgaaacagccagcctgaagagcaccagcaccctggccatgctgaactttggccagagcgccatcttctctgtgggcctgacagccatcatggtgctggccagccagggcatcgtggccggcaccctgactgtgggggacctggtgatggtgaatggcctgctcttccagctgagcctgcccctgaacttcctgggcaccgtgtaccgggagacccggcaggccctgattgacatgaacaccctcttcaccctgctgaaggtggacacccagatcaaggacaaggtgatggccagccccctgcagatcaccccccagacagccaccgtggcctttgacaacgtgcactttgagtacatcgagggccagaaggtgctgagcggcatcagctttgaggtgcctgctgggaagaaggtggccatcgtgggcggcagcggcagcggcaagagcaccatcgtgcggctgctcttccgcttctatgagccccagaagggcagcatctacctggccggccagaacatccaggatgtgtccctggagagcctgcggcgggctgtgggcgtggtgccccaggatgctgtgctcttccacaacaccatctactacaacctgctgtatggcaacatcagcgccagccctgaggaggtgtatgctgtggccaagctggccggcctgcatgatgccatcctgaggatgcctcatggctatgacacccaggtgggggagcggggcctgaagctgtctggaggagagaagcagagggtggccatcgcccgggccatcctgaaggacccccctgtgatcctgtatgatgaggccaccagcagcctggacagcatcacagaggagaccatcctgggcgccatgaaggatgtggtgaagcacaggaccagcatcttcatcgcccaccggctgagcacagtggtggatgctgatgagatcatcgtgctggaccagggcaaggtggccgagcggggcacccaccacggcctgctggccaacccccacagcatctacagcgagatgtggcacacccagagcagccgggtgcagaaccacgacaaccccaagtgggaggccaagaaggagaacatcagcaaggaggaggagaggaagaagctgcaggaggagatcgtgaacagcgtgaagggctgcggcaactgcagctgctag

SEQ ID NO: 144890 - DNA, 2262 bp, Artificial Sequence
  derived and/or modified sequence
atggccctgctggccatgcacagctggcggtgggccgccgccgccgccgcatttgaaaaacgtagacatagcgcaattctgattagacccttggtcagtgtatccggcagtgggccccagtggcggccacatcaactgggggccctcggaacggcacgggcctatcagcagatcccagaatcgctgaaatccattacatggcagcgccttggcaaggggaatagcgggcagtttctggacgccgctaaggccttgcaggtttggcctctgatcgagaagcgtacctgttggcatggccacgcaggcggcggactgcacactgaccctaaagagggactgaaagatgtggacactcgaaaaatcatcaaagcgatgttgtcgtacgtatggcccaaggatcggcccgatcttagagccagggtggccatctcgctgggctttctgggtggcgccaaggccatgaacatcgtggtcccatttatgttcaaatacgccgtcgattctctgaaccagatgagcggtaacatgctgaacctgagtgatgctccaaacacagtcgccactatggctaccgcagtgcttataggctacggagtgagccgcgccggcgccgcttttttcaacgaggtcagaaatgcagtctttggcaaggtcgcacagaactccatccgtcgaatcgcgaagaatgtgttcctccacctgcacaacctagacttaggattccatctaagcaggcagacaggagcattaagcaaggccattgataggggtacccgtggcatttcttttgtactaagcgccctcgtctttaatctacttcctatcatgtttgaagtgatgctggtgtccggcgtactgtattataagtgcggcgcccagtttgctcttgtgactcttggaaccctggggacctacactgcttttacggtcgcagtgacccggtggcgcacccgttttcgaattgagatgaacaaggccgacaacgacgctggcaatgccgctatagatagcctgcttaactacgagaccgtgaagtatttcaacaacgagcgctacgaagcacagaggtacgacggctttctcaaaacttacgagacagcctcccttaagtccacgtcgactctggccatgctcaactttggccagagtgcaattttcagcgtgggcctgacagcaatcatggtcctggcttctcaggggattgtcgccggaactctgacagttggcgacctggtgatggtgaatggtcttctgtttcagttgtccctgcctctgaatttccttggcaccgtgtatcgcgaaacacgccaggccctgattgacatgaacacgttattcacgctgttgaaagtggacacgcagatcaaagataaggtcatggctagcccacttcaaatcaccccccaaacagcaaccgttgcatttgataatgtacacttcgaatacatagaaggccagaaagttttaagtggcatttctttcgaggtcccagctggcaagaaagtggctatcgttggtggatcggggtcagggaagagtaccatcgtgcgcctgctgttcagattttatgagccacagaagggctccatttacctggccggacagaacattcaggacgtgagcctggaatccctgagaagggctgtgggcgtagtccctcaggacgctgttctgttccacaacacaatctactacaatctgctttacgggaatatcagtgcctcgcctgaagaagtatacgccgtagcaaaattagctgggctgcatgacgcaatcttgagaatgccccatgggtatgacacccaggtgggggagcgcggtctgaaactgagtggaggagaaaagcagagggtggccattgccagggccattcttaaagatccccccgtgattctttatgacgaggctacctctagcctggacagtattacagaggagacaatactcggggctatgaaagacgtggttaagcatcggacaagtatcttcattgcacaccgcctgtcgacagtagttgatgcggacgagataattgtgttggaccaaggcaaggtcgccgaaagaggaacacaccacggactgctggcaaatccccactctatatattccgaaatgtggcacactcagagcagcagagtgcagaaccacgacaatccaaaatgggaggcaaagaaagagaacatatcaaaggaagaagaaagaaaaaagctccaggaggaaattgtcaattctgtcaagggttgcggtaactgctcatgctag

SEQ ID NO: 144891 - DNA, 2262 bp, Artificial Sequence
  derived and/or modified sequence
atggcactgctcgccatgcacagttggaggtgggccgctgcagccgcagcatttgagaaaagaaggcattctgcaatcctgatacggcctctagtgtccgtgtctgggtcagggccacagtggcggcctcaccaactgggtgctttagggacggcccgtgcatatcagcagattccagaatcccttaagtctattacctggcagaggctgggcaaagggaactcgggacaattcttggatgccgctaaggccctacaggtttggcccctgattgagaagagaacatgctggcacggtcatgccggaggagggcttcacacagatcccaaagagggcctcaaagatgtcgacactcgtaagattattaaggcaatgctcagttatgtgtggcctaaagaccggcctgatcttagagctcgagttgccataagcctcggcttcctggggggagccaaggctatgaacattgttgtgccgtttatgttcaagtacgccgttgacagcttgaatcaaatgtctggtaatatgctgaacttgtctgacgctccgaatactgtcgccacgatggctaccgccgtcctcattgggtacggcgtctccagagccggagcagcgtttttcaatgaggttcgaaacgcagtatttggtaaggtagctcagaactcaatccgacggatcgccaagaacgtttttctgcatctgcataacctggatctgggctttcacctctcccggcaaaccggcgcactgtctaaggcaattgatcgagggactaggggcatctcctttgttctgtcagcactggtgttcaatcttcttcctattatgtttgaggtcatgctagtgtccggggtgctgtattataagtgcggagctcagttcgcactggttaccctcggtacccttggaacttatactgcctttacagtcgcagtaactcggtggagaactagattcagaatcgagatgaacaaggccgacaacgatgcgggaaacgccgcaatagacagcctcctcaactacgagacggtgaaatatttcaacaacgagcgctacgaggcgcagcgatacgatggtttcttaaagacctatgagacggcatccttgaagtcaactagcactctggccatgttgaacttcggacagtccgcgattttcagtgtgggcttgacggccatcatggtgctcgcctcacaaggtatcgtggccggaactctcactgtcggcgacctggtgatggtgaacgggctcctcttccagctaagtctgcccttaaattttctaggaacggtgtacagggaaacccggcaggccctgattgatatgaacaccctcttcacgctccttaaggtggacacccaaatcaaggacaaggtgatggccagcccattacagatcactccgcagaccgcaaccgtcgctttcgataacgtccatttcgagtatattgagggccaaaaggtcctatccggaatctcgttcgaggttcctgcaggaaaaaaagttgccatcgtagggggaagcggcagtggcaagagtaccatagtgcggctactgttccggttctatgagccccagaagggttcaatttatctggccggtcagaacatccaggacgtcagccttgagagcttacggagggccgttggggtcgtaccacaggacgcggttctttttcacaacaccatctattataacctcctgtatggtaatatcagcgccagccctgaagaagtgtacgctgttgccaaactggctgggttgcatgacgccattcttaggatgccccacggttatgatactcaggttggtgagaggggattgaagctctccggtggggaaaagcagcgcgtggctattgcacgggctatccttaaggacccacctgtaatcctctacgatgaggctactagtagcctagatagcatcaccgaagaaacaatcctgggagcaatgaaagacgttgtaaaacatcgaacttcaatcttcatcgcgcaccgtctgtccacagtcgtggacgccgacgagatcattgtgctggatcaggggaaagtggccgagaggggcacccatcacgggctcctggccaatccccatagcatttattccgagatgtggcacacccagtcctctcgtgttcagaatcatgacaatccaaagtgggaggctaagaaggagaatatttcgaaagaggaagaaagaaagaagcttcaggaagaaattgtaaacagcgtcaagggctgcggaaactgttcttgttag

SEQ ID NO: 144892 - DNA, 2377 bp, Artificial Sequence
  derived and/or modified sequence
ctcggttcctctttcctcgctcaagatggcgctgctcgcgatgcattcttggcgctgggcggccgcggcggctgctttcgaaaagcgccggcactccgcgattctgatccggcctttagtctctgttagcggctcaggtccgcagtggaggccacatcaactcggcgccttgggaaccgctcgagcctaccagcagattccagagtcattaaaaagtatcacatggcagagattgggaaaaggcaattcaggacagttcttagatgctgcaaaggctctccaggtatggccactgatagaaaagaggacatgttggcatggtcatgcaggaggaggactccacacagacccaaaagaagggttaaaagatgttgatactcggaaaatcataaaagcaatgctttcttatgtgtggcccaaagacaggccagatctacgagctagagttgccatttcgctgggatttttgggtggtgcaaaggccatgaatattgtggttcccttcatgtttaaatatgctgtagacagcctcaaccagatgtcgggaaacatgctgaacctgagtgatgcaccaaatacagttgcaaccatggcaacagcagttctgattggctatggtgtatcaagagctggagctgctttttttaacgaagttcgaaatgcagtatttggcaaggtagcccagaattcaatccgaagaatagccaaaaatgtctttctccatcttcacaacctggatctgggttttcacctgagcagacagacgggagctttatctaaggctattgacagaggaacaaggggtatcagttttgtcctgagtgctttggtatttaatcttcttcccatcatgtttgaagtgatgcttgtcagtggtgttttgtattacaaatgcggtgcccagtttgctttggtaacccttggaacacttggtacatacacagcattcacagttgcagtcacacggtggagaactagatttagaatagaaatgaacaaagcagataatgatgcaggtaatgctgctatagactcactgctgaattatgaaactgtgaagtattttaataatgaaagatatgaagcacagagatatgatggatttttgaagacgtatgagactgcttcattgaaaagtacctctactctggctatgctgaactttggtcaaagtgctattttcagtgtcggtttaacagctataatggtgctcgccagtcagggaattgtggcaggtacccttactgttggagatctagtaatggtgaatggactgctttttcagctttcattacccctgaactttctgggaactgtatatagagagactagacaagcactcatagatatgaacaccttgtttactctactcaaggtagacacccaaattaaagacaaagtgatggcatctccccttcagatcacaccacagacagctaccgtggcctttgataatgtgcattttgaatacattgagggccagaaagtccttagtggaatatcctttgaagtccctgcaggaaagaaagtggccattgtaggaggtagtgggtcagggaaaagcacaatagtgaggctattatttcgcttctatgagcctcaaaagggtagcatttatcttgctggtcaaaatatacaagatgtgagcctggaaagccttcggagggcagtgggagtggtacctcaggatgctgtcctcttccataatactatttattacaacctcttatatggaaacatcagtgcttcacctgaggaagtgtatgcagtggcaaaattagctggacttcatgatgcaattcttcgaatgccacatggatatgacacccaagtaggggaacgaggactcaagctttcaggaggagaaaagcaaagagtagcaattgcaagagccattttgaaggaccccccagtcatactctatgatgaagctacttcatcgttagattcgattactgaagagactattcttggtgccatgaaggatgtggtcaaacacagaacttctattttcattgcacacagattgtcaacagtggttgatgcagatgaaatcattgtcttggatcagggtaaggtagccgaacgtggtacccaccatggtttgcttgctaaccctcatagtatctattcagaaatgtggcatacacagagcagccgtgtgcagaaccatgataaccccaaatgggaagcaaagaaagaaaatatatccaaagaggaggaaagaaagaaactacaagaagaaattgtcaatagtgtgaaaggctgtggaaactgttcgtgctaagtcacataagacattttctttttttgttgttttggactacatatttgcactgaagcagaattgttttattaaaaaaatcatacattccca

SEQ ID NO: 144893 - DNA, 2262 bp, Artificial Sequence
  derived and/or modified sequence
atggccctgctggccatgcacagctggagatgggccgccgccgccgccgccttcgagaagagaagacacagcgccatcctgatcagacccctggtgagcgtgagcggcagcggcccccagtggagaccccaccagctgggcgccctgggcaccgccagagcctaccagcagatccccgagagcctgaagagcatcacctggcagagactgggcaagggcaacagcggccagttcctggacgccgccaaggccctgcaggtgtggcccctgatcgagaagagaacctgctggcacggccacgccggcggcggcctgcacaccgaccccaaggagggcctgaaggacgtggacaccagaaagatcatcaaggccatgctgagctacgtgtggcccaaggacagacccgacctgagagccagagtggccatcagcctgggcttcctgggcggcgccaaggccatgaacatcgtggtgcccttcatgttcaagtacgccgtggacagcctgaaccagatgagcggcaacatgctgaacctgagcgacgcccccaacaccgtggccaccatggccaccgccgtgctgatcggctacggcgtgagcagagccggcgccgccttcttcaacgaggtgagaaacgccgtgttcggcaaggtggcccagaacagcatcagaagaatcgccaagaacgtgttcctgcacctgcacaacctggacctgggcttccacctgagcagacagaccggcgccctgagcaaggccatcgacagaggcaccagaggcatcagcttcgtgctgagcgccctggtgttcaacctgctgcccatcatgttcgaggtgatgctggtgagcggcgtgctgtactacaagtgcggcgcccagttcgccctggtgaccctgggcaccctgggcacctacaccgccttcaccgtggccgtgaccagatggagaaccagattcagaatcgagatgaacaaggccgacaacgacgccggcaacgccgccatcgacagcctgctgaactacgagaccgtgaagtacttcaacaacgagagatacgaggcccagagatacgacggcttcctgaagacctacgagaccgccagcctgaagagcaccagcaccctggccatgctgaacttcggccagagcgccatcttcagcgtgggcctgaccgccatcatggtgctggccagccagggcatcgtggccggcaccctgaccgtgggcgacctggtgatggtgaacggcctgctgttccagctgagcctgcccctgaacttcctgggcaccgtgtacagagagaccagacaggccctgatcgacatgaacaccctgttcaccctgctgaaggtggacacccagatcaaggacaaggtgatggccagccccctgcagatcaccccccagaccgccaccgtggccttcgacaacgtgcacttcgagtacatcgagggccagaaggtgctgagcggcatcagcttcgaggtgcccgccggcaagaaggtggccatcgtgggcggcagcggcagcggcaagagcaccatcgtgagactgctgttcagattctacgagccccagaagggcagcatctacctggccggccagaacatccaggacgtgagcctggagagcctgagaagagccgtgggcgtggtgccccaggacgccgtgctgttccacaacaccatctactacaacctgctgtacggcaacatcagcgccagccccgaggaggtgtacgccgtggccaagctggccggcctgcacgacgccatcctgagaatgccccacggctacgacacccaggtgggcgagagaggcctgaagctgagcggcggcgagaagcagagagtggccatcgccagagccatcctgaaggacccccccgtgatcctgtacgacgaggccaccagcagcctggacagcatcaccgaggagaccatcctgggcgccatgaaggacgtggtgaagcacagaaccagcatcttcatcgcccacagactgagcaccgtggtggacgccgacgagatcatcgtgctggaccagggcaaggtggccgagagaggcacccaccacggcctgctggccaacccccacagcatctacagcgagatgtggcacacccagagcagcagagtgcagaaccacgacaaccccaagtgggaggccaagaaggagaacatcagcaaggaggaggagagaaagaagctgcaggaggagatcgtgaacagcgtgaagggctgcggcaactgcagctgctag

SEQ ID NO: 144894 - protein, 158 aa, Artificial Sequence
  derived and/or modified sequence
MAEQATKSVLFVCLGNICRSPIAEAVFRKLVTDQNISENWRVDSAATSGYEIGNPPDYRGQSCMKRHGIPMSHVARQITKEDFATFDYILCMDESNLRDLNRKSNQVKTCKAKIELLGSYDPQKQLIIEDPYYGNDSDFETVYQQCVRCCRAFLEKAH

SEQ ID NO: 144895 - DNA, 477 bp, Artificial Sequence
  derived and/or modified sequence
atggctgagcaggcaacgaaatccgtactgtttgtgtgtctcggcaacatttgcaggtccccaatcgcagaggcagtgtttcgaaagctcgttactgaccagaacatatccgaaaactggcgcgtggacagcgccgccacgagcggctacgaaattggaaatccccctgattacaggggacagagttgtatgaaacgccacgggatccctatgagccatgtcgccagacagataactaaggaggactttgctaccttcgattacattttgtgcatggatgagtcaaacctccgcgacttaaatcgcaaatctaaccaggtgaaaacctgtaaagcaaagatagagttactgggttcctatgaccctcagaaacaactgatcattgaagacccatattacggaaatgacagcgactttgagaccgtgtatcagcagtgtgttaggtgttgtagggccttcctcgagaaggcccactag

SEQ ID NO: 144896 - DNA, 477 bp, Artificial Sequence
  derived and/or modified sequence
atggccgagcaggccaccaagtctgtgctgtttgtgtgcctgggcaacatctgccgcagccccatcgccgaggccgtgttcaggaagctggtgacagaccagaacatcagcgagaactggagggtggacagcgctgccaccagcggctatgagatcggcaaccccccagactaccggggccagagctgcatgaagagacatggcatccccatgagccacgtggcccggcagatcaccaaggaggactttgccacctttgactacatcctgtgcatggatgagagcaacctgcgggacctgaacaggaagagcaaccaggtgaagacctgcaaggccaagattgagctgctgggcagctatgacccccagaagcagctgatcatcgaggacccctactatggaaatgacagcgactttgaaacagtgtaccagcagtgtgtgcgctgctgccgggccttcctggagaaggcccactag

SEQ ID NO: 144897 - DNA, 477 bp, Artificial Sequence
  derived and/or modified sequence
atggccgagcaggccaccaagagcgtgctgttcgtgtgcctgggcaatatctgtcgtagtcctattgccgaggccgtcttcagaaagctggtcaccgatcaaaatatatctgagaactggcgggttgattcggctgccacaagcgggtacgagattggaaatcctcccgactatcgtggtcaatcctgtatgaagcgccatgggattccaatgagtcacgttgccagacagatcacaaaggaagacttcgccacttttgactatatcctctgtatggatgagtccaacttacgcgacctaaatcggaagtctaatcaggtgaagacctgcaaagcgaagattgagctgttagggtcctatgatccccaaaagcagttgattatcgaggatccctactacgggaatgactccgactttgaaaccgtgtaccaacagtgtgtgcgctgttgccgggcgttcctggagaaggctcactag

SEQ ID NO: 144898 - DNA, 477 bp, Artificial Sequence
  derived and/or modified sequence
atggccgagcaggcaaccaaatccgttttattcgtttgtttaggcaatatctgcaggtctcctatcgcagaggccgtgtttcggaagctagtaactgaccagaacatcagcgaaaattggcgcgtcgactccgccgcaacgagtggctacgagatcggaaaccctcctgactaccgcggtcagtcatgcatgaagcgccacggtatccccatgagtcatgttgcccgtcagattacgaaagaggattttgctacgttcgactacattttgtgtatggacgagtccaatctgcgagatctgaacaggaagagcaatcaagtcaagacctgtaaagcaaagatcgaactcctgggtagctacgacccacaaaagcaactgattatcgaggacccatattacggcaatgactcggactttgagactgtgtaccagcaatgtgtaagatgctgccgcgcatttctggaaaaagcacactag

SEQ ID NO: 144899 - DNA, 1549 bp, Artificial Sequence
  derived and/or modified sequence
gcgcaggcgcgcggggcaagagggtggcagtgcgcctgcgccgcgtcggcgtgcggaacgccgcggtgtctcggcgcctctgcgcgcgggaagatggcggaacaggctaccaagtccgtgctgtttgtgtgtctgggtaacatttgtcgatcacccattgcagaagcagttttcaggaaacttgtaaccgatcaaaacatctcagagaattggagggtagacagcgcggcaacttccgggtatgagatagggaacccccctgactaccgagggcagagctgcatgaagaggcacggcattcccatgagccacgttgcccggcagattaccaaagaagattttgccacatttgattatatactatgtatggatgaaagcaatctgagagatttgaatagaaaaagtaatcaagttaaaacctgcaaagctaaaattgaactacttgggagctatgatccacaaaaacaacttattattgaagatccctattatgggaatgactctgactttgagacggtgtaccagcagtgtgtcaggtgctgcagagcgttcttggagaaggcccactgaggcaggttcgtgccctgctgcggccagcctgactagaccccaccctgaggtcctgcatttctcagtcggtgtgtaatcacgttccagggcccaaagcccagctctttgttcagttgacttactgtttcttaccttaaaaagtaattgtagatggaaatcagttgtgtttggcaggagaatcaataaaaatctttgattcagacagcttatggggtattttaagcattcttagactagttgaacatctcactttgccccagttacaaaaatagtagaacaagcaacataaaacaatgaaggaaaacctcacttgaaggcccaggtcaacatctaagcctgttgagacttagataatcgagtctacctcttcagtaggtttgtgtggatggcctggagggcaggtgccctctgctccccagtgctacctctctcttccctagggccttttgtggattgacagtagtcccctccgtaggagctcacagtctagattagaagtgttttaatttctacacacccatagtgcacacttgtatattgaaaagatagggaagagagaaacatttatggaatcagtcgttggcaccttcaatacttcatgatttttgtcgagtttacttcatgaggaggtcagcccattggctcccatctgaaccactttgcctctgaaacttaattacatccagaaagaaggacacttgtatgctagtctatggtcagttgaggaatatgactgtttttatatgcacatgtaacccaaatgtccaatataaattggcttattttttaaaataattttaaaagttgggaaaagtgttattatttggcatgcttaaatattgaataagtattcttcatcagcatttaataaatgtataggcagatgtaaggtaatttctgtgtattttgagataatgtcaaaatcatgaatatttcaaaataaactggggagttataaaaatacaactagagatataaa

SEQ ID NO: 144900 - DNA, 477 bp, Artificial Sequence
  derived and/or modified sequence
atggccgagcaggccaccaagagcgtgctgttcgtgtgcctgggcaacatctgcagaagccccatcgccgaggccgtgttcagaaagctggtgaccgaccagaacatcagcgagaactggagagtggacagcgccgccaccagcggctacgagatcggcaacccccccgactacagaggccagagctgcatgaagagacacggcatccccatgagccacgtggccagacagatcaccaaggaggacttcgccaccttcgactacatcctgtgcatggacgagagcaacctgagagacctgaacagaaagagcaaccaggtgaagacctgcaaggccaagatcgagctgctgggcagctacgacccccagaagcagctgatcatcgaggacccctactacggcaacgacagcgacttcgagaccgtgtaccagcagtgcgtgagatgctgcagagccttcctggagaaggcccactag

SEQ ID NO: 144901 - protein, 429 aa, Artificial Sequence
  derived and/or modified sequence
MSGGVYGGDEVGALVFDIGSYTVRAGYAGEDCPKVDFPTAIGMVVERDDGSTLMEIDGDKGKQGGPTYYIDTNALRVPRENMEAISPLKNGMVEDWDSFQAILDHTYKMHVKSEASLHPVLMSEAPWNTRAKREKLTELMFEHYNIPAFFLCKTAVLTAFANGRSTGLILDSGATHTTAIPVHDGYVLQQGIVKSPLAGDFITMQCRELFQEMNIELVPPYMIASKEAVREGSPANWKRKEKLPQVTRSWHNYMCNCVIQDFQASVLQVSDSTYDEQVAAQMPTVHYEFPNGYNCDFGAERLKIPEGLFDPSNVKGLSGNTMLGVSHVVTTSVGMCDIDIRPGLYGSVIVAGGNTLIQSFTDRLNRELSQKTPPSMRLKLIANNTTVERRFSSWIGGSILASLGTFQQMWISKQEYEEGGKQCVERKCP

SEQ ID NO: 144902 - DNA, 1290 bp, Artificial Sequence
  derived and/or modified sequence
atgagcggcggcgtgtacggcggcgacgaggtgggcgccctggtgttcgacatcggcagctacaccgtgagagccggctacgccggcgaggactgccccaaggtggacttccccaccgccatcggcatggtggtggagagagacgacggcagcaccctgatggagatcgacggcgacaagggcaagcagggcggccccacctactacatcgacaccaacgccctgagagtgcccagagagaacatggaggccatcagccccctgaagaacggcatggtggaggactgggacagcttccaggccatcctggaccacacctacaagatgcacgtgaagagcgaggccagcctgcaccccgtgctgatgagcgaggccccctggaacaccagagccaagagagagaagctgaccgagctgatgttcgagcactacaacatccccgccttcttcctgtgcaagaccgccgtgctgaccgccttcgccaacggcagaagcaccggcctgatcctggacagcggcgccacccacaccaccgccatccccgtgcacgacggctacgtgctgcagcagggcatcgtgaagagccccctggccggcgacttcatcaccatgcagtgcagagagctgttccaggagatgaacatcgagctggtgcccccctacatgatcgccagcaaggaggccgtgagagagggcagccccgccaactggaagagaaaggagaagctgccccaggtgaccagaagctggcacaactacatgtgcaactgcgtgatccaggacttccaggccagcgtgctgcaggtgagcgacagcacctacgacgagcaggtggccgcccagatgcccaccgtgcactacgagttccccaacggctacaactgcgacttcggcgccgagagactgaagatccccgagggcctgttcgaccccagcaacgtgaagggcctgagcggcaacaccatgctgggcgtgagccacgtggtgaccaccagcgtgggcatgtgcgacatcgacatcagacccggcctgtacggcagcgtgatcgtggccggcggcaacaccctgatccagagcttcaccgacagactgaacagagagctgagccagaagaccccccccagcatgagactgaagctgatcgccaacaacaccaccgtggagagaagattcagcagctggatcggcggcagcatcctggccagcctgggcaccttccagcagatgtggatcagcaagcaggagtacgaggagggcggcaagcagtgcgtggagagaaagtgcccctag

SEQ ID NO: 144903 - DNA, 1899 bp, Artificial Sequence
  derived and/or modified sequence
gccagcaagtgtggctgagctccggggtgtgtggacgccgctttgttgcctgaggtgggtggcggtggaagttaagggagtcaggggctatcgctcctcgagactcgcagtcgcggccactgcagtcacttcgccagttagcccttagggtaggagtcgcgccggcagcagccatgagcggcggcgtgtacgggggaggtgagtgagtgcggccggacgagagagcgcgccttttcggcgtgtgggatgaagttggagcccttgtttttgacattggatcctatactgtgagagctggttatgctggtgaggactgccccaaggtggattttcctacagctattggtatggtggtagaaagagatgacggaagcacattaatggaaatagatggcgataaaggcaaacaaggcggtcccacctactacatagatactaatgctctgcgtgttccgagggagaatatggaggccatttcacctctaaaaaatgggatggttgaagactgggatagtttccaagctattttggatcatacctacaaaatgcatgtcaaatcagaagccagtctccatcctgttctcatgtcagaggcaccgtggaatactagagcaaagagagagaaactgacagagttaatgtttgaacactacaacatccctgccttcttcctttgcaaaactgcagttttgacagcatttgctaatggtcgttctactgggctgattttggacagtggagccactcataccactgcaattccagtccacgatggctatgtccttcaacaaggcattgtgaaatcccctcttgctggagactttattactatgcagtgcagagaactcttccaagaaatgaatattgaattggttcctccatatatgattgcatcaaaagaagctgttcgtgaaggatctccagcaaactggaaaagaaaagagaagttgcctcaggttacgaggtcttggcacaattatatgtgtaattgtgttatccaggattttcaagcttcggtacttcaagtgtcagattcaacttatgatgaacaagtggctgcacagatgccaactgttcattatgaattccccaatggctacaattgtgattttggtgcagagcggctaaagattccagaaggattatttgacccttccaatgtaaaggggttatcaggaaacacaatgttaggagtcagtcatgttgtcaccacaagtgttgggatgtgtgatattgacatcagaccaggtctctatggcagtgtaatagtggcaggaggaaacacactaatacagagttttactgacaggttgaatagagagctgtctcagaaaactcctccaagtatgcggttgaaattgattgcaaataatacaacagtggaacggaggtttagctcatggattggcggctccattctagcctctttgggtacctttcaacagatgtggatttccaagcaagaatatgaagaaggagggaagcagtgtgtagaaagaaaatgcccttgagaaagagttcccaagcttctaccttccttttgtcaccttacgtttcatagctttagtatactcaggaaaagaatgaccatcttttgtagaatgtttatacatttttgcatatttcaatttccacttaaattttttaaagctttaactggctctataaattaagtttgtgctttccttgaaatgcacttattcttattacaagcattttataattttgtataaatgtctattttctctaaatattttgctttcagtaaaatgctttccaactctgtttagtgtattaattaccagtggattggtagaactgctttttattgactagtaaaagttactgcctatgctttttaccttaggcttacagaattaaataaaaattagccattcc

SEQ ID NO: 144904 - DNA, 1901 bp, Artificial Sequence
  derived and/or modified sequence
agacttaggcctggaccctagtgattggctgataggaggagccagcaagtgtggctgagctccggggtgtgtggacgccgctttgttgcctgaggtgggtggcggtggaagttaagggagtcaggggctatcgctcctcgagactcgcagtcgcggccactgcagtcacttcgccagttagcccttagggtaggagtcgcgccggcagcagccatgagcggcggcgtgtacgggggagatgaagttggagcccttgtttttgacattggatcctatactgtgagagctggttatgctggtgaggactgccccaaggtggattttcctacagctattggtatggtggtagaaagagatgacggaagcacattaatggaaatagatggcgataaaggcaaacaaggcggtcccacctactacatagatactaatgctctgcgtgttccgagggagaatatggaggccatttcacctctaaaaaatgggatggttgaagactgggatagtttccaagctattttggatcatacctacaaaatgcatgtcaaatcagaagccagtctccatcctgttctcatgtcagaggcaccgtggaatactagagcaaagagagagaaactgacagagttaatgtttgaacactacaacatccctgccttcttcctttgcaaaactgcagttttgacagcatttgctaatggtcgttctactgggctgattttggacagtggagccactcataccactgcaattccagtccacgatggctatgtccttcaacaaggcattgtgaaatcccctcttgctggagactttattactatgcagtgcagagaactcttccaagaaatgaatattgaattggttcctccatatatgattgcatcaaaagaagctgttcgtgaaggatctccagcaaactggaaaagaaaagagaagttgcctcaggttacgaggtcttggcacaattatatgtgtaattgtgttatccaggattttcaagcttcggtacttcaagtgtcagattcaacttatgatgaacaagtggctgcacagatgccaactgttcattatgaattccccaatggctacaattgtgattttggtgcagagcggctaaagattccagaaggattatttgacccttccaatgtaaaggggttatcaggaaacacaatgttaggagtcagtcatgttgtcaccacaagtgttgggatgtgtgatattgacatcagaccaggtctctatggcagtgtaatagtggcaggaggaaacacactaatacagagttttactgacaggttgaatagagagctgtctcagaaaactcctccaagtatgcggttgaaattgattgcaaataatacaacagtggaacggaggtttagctcatggattggcggctccattctagcctctttgggtacctttcaacagatgtggatttccaagcaagaatatgaagaaggagggaagcagtgtgtagaaagaaaatgcccttgagaaagagttcccaagcttctaccttccttttgtcaccttacgtttcatagctttagtatactcaggaaaagaatgaccatcttttgtagaatgtttatacatttttgcatatttcaatttccacttaaattttttaaagctttaactggctctataaattaagtttgtgctttccttgaaatgcacttattcttattacaagcattttataattttgtataaatgtctattttctctaaatattttgctttcagtaaaatgctttccaactctgtttagtgtattaattaccagtggattggtagaactgctttttattgactagtaaaagttactgcctatgctttttaccttaggcttacagaattaaataaaaattagccattccagaaatatat

SEQ ID NO: 144905 - DNA, 1750 bp, Artificial Sequence
  derived and/or modified sequence
aggcctggaccctagtgattggctgataggaggagccagcaagtgtggctgagctccggggtgtgtggacgccgctttgttgcctgagatgaagttggagcccttgtttttgacattggatcctatactgtgagagctggttatgctggtgaggactgccccaaggtggattttcctacagctattggtatggtggtagaaagagatgacggaagcacattaatggaaatagatggcgataaaggcaaacaaggcggtcccacctactacatagatactaatgctctgcgtgttccgagggagaatatggaggccatttcacctctaaaaaatgggatggttgaagactgggatagtttccaagctattttggatcatacctacaaaatgcatgtcaaatcagaagccagtctccatcctgttctcatgtcagaggcaccgtggaatactagagcaaagagagagaaactgacagagttaatgtttgaacactacaacatccctgccttcttcctttgcaaaactgcagttttgacagcatttgctaatggtcgttctactgggctgattttggacagtggagccactcataccactgcaattccagtccacgatggctatgtccttcaacaaggcattgtgaaatcccctcttgctggagactttattactatgcagtgcagagaactcttccaagaaatgaatattgaattggttcctccatatatgattgcatcaaaagaagctgttcgtgaaggatctccagcaaactggaaaagaaaagagaagttgcctcaggttacgaggtcttggcacaattatatgtgtaattgtgttatccaggattttcaagcttcggtacttcaagtgtcagattcaacttatgatgaacaagtggctgcacagatgccaactgttcattatgaattccccaatggctacaattgtgattttggtgcagagcggctaaagattccagaaggattatttgacccttccaatgtaaaggggttatcaggaaacacaatgttaggagtcagtcatgttgtcaccacaagtgttgggatgtgtgatattgacatcagaccaggtctctatggcagtgtaatagtggcaggaggaaacacactaatacagagttttactgacaggttgaatagagagctgtctcagaaaactcctccaagtatgcggttgaaattgattgcaaataatacaacagtggaacggaggtttagctcatggattggcggctccattctagcctctttgggtacctttcaacagatgtggatttccaagcaagaatatgaagaaggagggaagcagtgtgtagaaagaaaatgcccttgagaaagagttcccaagcttctaccttccttttgtcaccttacgtttcatagctttagtatactcaggaaaagaatgaccatcttttgtagaatgtttatacatttttgcatatttcaatttccacttaaattttttaaagctttaactggctctataaattaagtttgtgctttccttgaaatgcacttattcttattacaagcattttataattttgtataaatgtctattttctctaaatattttgctttcagtaaaatgctttccaactctgtttagtgtattaattaccagtggattggtagaactgctttttattgactagtaaaagttactgcctatgctttttaccttaggcttacagaattaaataaaaattagccattccagaaatata

SEQ ID NO: 144906 - DNA, 459 bp, Artificial Sequence
  derived and/or modified sequence
gctttgttgcctgaggtgggtggcggtggaagttaagggagtcaggggctatcgctcctcgagactcgcagtcgcggccactgcagtcacttcgccagttagcccttagggtaggagtcgcgccggcagcagccatgagcggcggcgtgtacgggggaggtgagtgagtgcggccggacgagagagcgcgccttttcggcgtgtgggatgaagttggagcccttgtttttgacattggatcctatactgtgagagctggttatgctggtgaggactgccccaaggtggattttcctacagctattggtatggtggtagaaagagatgacggaagcacattaatggaaatagatggcgataaaggcaaacaaggcggtcccacctactacatagatactaatgctctgcgtgttccgagggagaatatggaggccatttcacctctaaaaaatgggatgg

SEQ ID NO: 144907 - DNA, 1290 bp, Artificial Sequence
  derived and/or modified sequence
atgtctggtggcgtgtatggaggcgatgaggtgggggctttagtgtttgacattggctcttatactgttagagcagggtacgcaggcgaggactgtcctaaggttgatttccccactgctatcggaatggtggttgagagagatgacggatcgacgctgatggaaatcgacggggataagggtaagcagggcggcccaacatactatattgataccaatgccctccgggtcccccgcgaaaacatggaagccatttcacccctgaaaaacgggatggttgaggattgggacagttttcaggctattctagatcacacgtataagatgcatgtcaagtccgaggcgagcttacacccagtgctgatgagtgaggcaccatggaacacaagagccaagcgggaaaaacttaccgagctgatgttcgagcactacaacattcccgcctttttcctgtgtaaaactgcggtgcttactgcgtttgcaaatgggagatccacgggcttgatcctagattccggcgcaactcacaccacagccatccccgtgcacgacggctacgtcctgcaacaggggatcgtaaaatcccctctagctggcgattttatcacaatgcagtgtagggagctttttcaagaaatgaatatcgaacttgtgccaccttacatgatcgctagtaaggaagctgtgagagagggatcacccgcaaactggaaaaggaaggagaaattgccgcaggtgaccaggtcttggcataattacatgtgtaattgcgtgatccaggattttcaagcctctgtgctgcaggtgtcggattccacctatgatgaacaggtcgccgctcaaatgcccacagttcactacgaattccccaacggctacaactgtgattttggggctgagcgtcttaagattcccgagggactgttcgatccaagcaacgtgaagggtctcagcgggaataccatgctcggcgtgtcacatgtcgtaacaactagtgtggggatgtgcgacatcgacatccgaccaggtctttatggctccgtgatcgtggcaggcggaaataccctgatccaatcctttacagacagactaaaccgcgagctgagccagaagaccccgccgagcatgaggctgaagctgatagcaaacaacacgactgtggaacgccgcttttcatcatggattggtggctccatattagcctcattaggcacgtttcaacagatgtggataagtaagcaggaatacgaagaaggaggcaaacagtgtgtggagcgaaagtgtccttag

SEQ ID NO: 144908 - DNA, 1290 bp, Artificial Sequence
  derived and/or modified sequence
atgtctgggggcgtgtatggaggagatgaggtgggcgccctggtgtttgacatcggcagctacacagtgcgggccggctacgccggggaggactgccccaaggtggacttccccacagccatcggcatggtggtggagagagatgatggcagcaccctgatggagattgatggagacaagggcaagcagggcggccccacctactacatcgacaccaatgccctgcgggtgccccgggagaacatggaggccatcagccccctgaagaatggcatggtggaggactgggacagcttccaggccatcctggaccacacctacaagatgcacgtgaagtctgaggccagcctgcaccctgtgctgatgtctgaggccccctggaacacccgggccaagcgggagaagctgacagagctgatgtttgagcactacaacatcccagccttcttcctgtgcaagacagctgtgctgacagcctttgccaacggccgcagcacaggcctcatcctggacagcggggccacccacaccacagccatccctgtgcatgatggctacgtgctgcagcagggcatcgtgaagagccccctggccggggacttcatcaccatgcagtgccgggagctgttccaggagatgaacatcgagctggtgcccccctacatgattgccagcaaggaggccgtgcgggagggcagccctgccaactggaagaggaaggagaagctgccccaggtgaccaggtcctggcacaactacatgtgcaactgtgtgatccaggacttccaggcctctgtgctgcaggtgtctgacagcacctatgatgagcaggtggccgcccagatgcccaccgtgcactatgagttccccaacggctacaactgtgactttggagctgagcggctgaagatccctgagggcctgtttgaccccagcaatgtgaagggcctgagcggcaacaccatgctgggcgtgagccacgtggtgaccacctctgtgggcatgtgtgacatcgacatccggcccggcctgtatggctctgtgattgtggccggcggcaacaccctcatccagagcttcacagaccggctgaaccgggagctgagccagaagaccccacccagcatgaggctgaagctgattgccaacaacaccaccgtggagcggcgcttcagctcctggattggaggcagcatcctggccagcctgggcaccttccagcagatgtggatcagcaagcaggagtatgaggagggcggcaagcagtgtgtggagaggaaatgtccctag

SEQ ID NO: 144909 - DNA, 1290 bp, Artificial Sequence
  derived and/or modified sequence
atgagcggcggcgtgtacggcggcgacgaggtgggcgccctggtgtttgatataggctcatacaccgtgagagcagggtacgctggcgaagattgccccaaggtcgactttcctacagccataggaatggtggtggaacgcgacgatggttccacgctcatggaaatcgacggagacaaaggtaagcaaggggggccaacgtattacatcgacacgaatgcactcagggttccccgcgagaacatggaagccataagccctctcaagaacgggatggtggaggactgggactcattccaggccatcctggaccacacctacaagatgcacgttaaatctgaagcctcattgcatcctgttctgatgtcagaggcgccatggaatacccgtgccaagagggaaaagcttacggaactcatgttcgaacactacaacattcccgcctttttcctttgcaaaacagccgtactgactgcattcgctaatggacggtccaccgggctgatcctcgactccggagcaactcatactactgccataccagtgcacgacggctatgtgctgcaacaggggattgtgaagtccccacttgcaggggatttcataactatgcaatgccgcgagctatttcaggaaatgaatatcgagctggtccccccctatatgattgcctctaaggaggcagtgagagaggggtcgcccgcaaactggaagaggaaagaaaagttgccgcaggttactcgctcctggcacaattatatgtgcaattgtgtgattcaggatttccaggctagcgttctgcaggtgtccgactctacctacgatgagcaggtagcagcccaaatgccaactgtccactatgaatttcccaatggctacaactgcgacttcggcgctgagcgcctcaagattccagaggggctatttgatccaagcaatgtgaaagggctgtctgggaacacgatgctgggcgtttcacacgtggtgactacttctgtggggatgtgcgatatagacatccgacctgggctttatggctctgtgattgttgccggcggaaataccctgatccagtccttcactgatcgcctcaaccgggaattgtctcagaaaactccaccaagtatgcgcctgaagctgatcgctaataacacaacggtagaacggcgattcagctcatggataggggggagcatactcgctagcctgggtacttttcagcagatgtggatctccaagcaggagtacgaggagggagggaagcagtgcgtggagcggaagtgcccatag

SEQ ID NO: 144910 - DNA, 1290 bp, Artificial Sequence
  derived and/or modified sequence
atgtccggcggagtttatgggggtgatgaagttggagcactggtgtttgacatcggctcttacacggtgagagctgggtacgctggtgaggactgcccgaaagtcgactttccgactgcgatcggaatggttgtggagcgcgacgacggctccacattgatggagatcgacggcgataagggcaaacagggcggtcccacgtattatatagacaccaacgcacttagagtaccacgcgagaacatggaagccatttcaccgctgaaaaatggcatggtggaggactgggactcctttcaggcaatcctagatcacacatataagatgcacgtgaaaagcgaagctagcctgcaccctgtgctgatgagcgaagccccatggaatactcgggctaaaagagagaagctgaccgagctgatgttcgaacactacaacatccccgctttttttctttgcaaaactgcggttttgactgcgttcgccaatggcaggtccacagggctgattcttgacagcggggcaacacataccaccgctatcccagtacatgatggttatgtcctgcagcagggcatagtgaaatctcctctggccggtgatttcatcactatgcagtgtagggagctctttcaggagatgaatatcgagctcgttcctccctatatgattgctagcaaagaggctgtgcgggagggaagccccgcaaattggaaaagaaaggagaagcttcctcaagttacacgatcctggcataactatatgtgtaactgtgtcatccaagactttcaggctagcgttttacaagtttctgattctacctacgacgaacaggtggccgctcagatgcctaccgtgcactacgagttccctaatggctacaactgcgatttcggagctgaaaggttgaagatcccggaggggcttttcgacccatcaaacgtcaaaggcctgagcgggaacaccatgctgggagtgtcccatgttgtgacgacgtccgtcggcatgtgcgatatcgacatacgcccaggcctctatggttccgtcatagttgccggagggaacaccctgatacagagcttcaccgatagacttaacagagagctgtctcaaaagaccccgcctagtatgaggcttaagctcatcgccaacaacacaaccgtggagcgacgcttttcctcatggattgggggatccattttggccagcctcggaaccttccaacaaatgtggatcagcaaacaggaatacgaggagggaggcaaacagtgcgtggagagaaaatgcccctag

SEQ ID NO: 144911 - protein, 505 aa, Artificial Sequence
  derived and/or modified sequence
MAESAGASSFFPLVVLLLAGSGGSGPRGVQALLCACTSCLQANYTCETDGACMVSIFNLDGMEHHVRTCIPKVELVPAGKPFYCLSSEDLRNTHCCYTDYCNRIDLRVPSGHLKEPEHPSMWGPVELVGIIAGPVFLLFLIIIIVFLVINYHQRVYHNRQRLDMEDPSCEMCLSKDKTLQDLVYDLSTSGSGSGLPLFVQRTVARTIVLQEIIGKGRFGEVWRGRWRGGDVAVKIFSSREERSWFREAEIYQTVMLRHENILGFIAADNKDNGTWTQLWLVSDYHEHGSLFDYLNRYTVTIEGMIKLALSAASGLAHLHMEIVGTQGKPGIAHRDLKSKNILVKKNGMCAIADLGLAVRHDAVTDTIDIAPNQRVGTKRYMAPEVLDETINMKHFDSFKCADIYALGLVYWEIARRCNSGGVHEEYQLPYYDLVPSDPSIEEMRKVVCDQKLRPNIPNWWQSYEALRVMGKMMRECWYANGAARLTALRIKKTLSQLSVQEDVKI

SEQ ID NO: 144912 - protein, 487 aa, Artificial Sequence
  derived and/or modified sequence
MAESAGASSFFPLVVLLLAGSGGSGPRGVQALLCACTSCLQANYTCETDGACMVSIFNLDGMEHHVRTCIPKVELVPAGKPFYCLSSEDLRNTHCCYTDYCNRIDLRVPSGHLKEPEHPSMWGPVELVGIIAGPVFLLFLIIIIVFLVINYHQRVYHNRQRLDMEDPSCEMCLSKDKTLQDLVYDLSTSGSGSGLPLFVQRTVARTIVLQEIIGKGRFGEVWRGRWRGGDVAVKIFSSREERSWFREAEIYQTVMLRHENILGFIAADNKDNGTWTQLWLVSDYHEHGSLFDYLNRYTVTIEGMIKLALSAASGLAHLHMEIVGTQGKPGIAHRDLKSKNILVKKNGMCAIADLGLAVRHDAVTDTIDIAPNQRVGTKRYMAPEVLDETINMKHFDSFKCADIYALGLVYWEIARRCNSGGTFLFCLCSYLPFQDAGSPKAVLLPPFFLQPVGCLLPEPESSFKVAIKGVEVAVLRVRLFFRDQFVE

SEQ ID NO: 144913 - protein, 476 aa, Artificial Sequence
  derived and/or modified sequence
MAESAGASSFFPLVVLLLAGSGGSGPRGVQALLCACTSCLQANYTCETDGACMVSIFNLDGMEHHVRTCIPKVELVPAGKPFYCLSSEDLRNTHCCYTDYCNRIDLRVPSGHLKEPEHPSMWGPVELVGIIAGPVFLLFLIIIIVFLVINYHQRVYHNRQRLDMEDPSCEMCLSKDKTLQDLVYDLSTSGSGSGLPLFVQRTVARTIVLQEIIGKGRFGEVWRGRWRGGDVAVKIFSSREERSWFREAEIYQTVMLRHENILGFIAADNKDNGTWTQLWLVSDYHEHGSLFDYLNRYTVTIEGMIKLALSAASGLAHLHMEIVGTQGKPGIAHRDLKSKNILVKKNGMCAIADLGLAVRHDAVTDTIDIAPNQRVGTKRYMAPEVLDETINMKHFDSFKCADIYALGLVYWEIARRCNSGGVHEEYQLPYYDLVPSDPSIEEMRKVVCDQKLRPNIPNWWQSYEVRSWPPAAFPSA

SEQ ID NO: 144914 - protein, 453 aa, Artificial Sequence
  derived and/or modified sequence
MVSIFNLDGMEHHVRTCIPKVELVPAGKPFYCLSSEDLRNTHCCYTDYCNRIDLRVPSGHLKEPEHPSMWGPVELVGIIAGPVFLLFLIIIIVFLVINYHQRVYHNRQRLDMEDPSCEMCLSKDKTLQDLVYDLSTSGSGSGLPLFVQRTVARTIVLQEIIGKGRFGEVWRGRWRGGDVAVKIFSSREERSWFREAEIYQTVMLRHENILGFIAADNKDNGTWTQLWLVSDYHEHGSLFDYLNRYTVTIEGMIKLALSAASGLAHLHMEIVGTQGKPGIAHRDLKSKNILVKKNGMCAIADLGLAVRHDAVTDTIDIAPNQRVGTKRYMAPEVLDETINMKHFDSFKCADIYALGLVYWEIARRCNSGGVHEEYQLPYYDLVPSDPSIEEMRKVVCDQKLRPNIPNWWQSYEALRVMGKMMRECWYANGAARLTALRIKKTLSQLSVQEDVKI

SEQ ID NO: 144915 - DNA, 1518 bp, Artificial Sequence
  derived and/or modified sequence
atggccgagagcgcaggcgcatctagctttttcccactggttgtgctactgctggccggatcagggggctctgggccccggggagtgcaggctctgctgtgtgcctgcacaagctgcctccaggccaattatacatgcgagacagatggcgcctgcatggtttcgatatttaacctcgatggcatggagcaccatgtacggacctgcattccaaaggtggagctagtccctgcaggtaagcctttttattgtctgtcctccgaagacttaaggaatacccactgttgttacactgattattgtaatcggatcgacctgagagtgcccagcggccatcttaaggaacccgagcatccaagtatgtggggtccagtggagctggttggcataatagccggtcctgtgttccttctgttcctcattataatcattgtctttctggtgatcaattaccaccaacgggtgtaccacaatagacagcgtttggacatggaggacccaagttgcgagatgtgcctgtccaaagacaaaacgctgcaggacttggtgtacgacctgagtaccagcgggtccggatcaggtctgccactattcgtacagcggactgttgcacgaacaatagttctgcaggagatcatcggtaaaggccggttcggagaggtgtggagaggaagatggagaggtggtgatgttgccgtaaaaattttttcctcacgggaagagagatcctggtttcgcgaggccgaaatctatcagacagtgatgctgcgacacgaaaacattctcggcttcattgctgccgacaataaggacaacggcacctggactcaactctggctggtctccgattaccatgaacacggcagcctattcgattatttaaacaggtacaccgtgaccattgaagggatgatcaaactggcactgtccgctgccagcggcttagcacatttgcacatggaaattgtcggcacccagggcaaacccggcattgcccacagggacttaaaatctaaaaacatcttagtgaaaaagaatgggatgtgtgctatagccgatctgggcctggctgtgagacatgacgcggtaacagacacaatagacattgcgcccaatcagagagtcggcaccaagcgttacatggctcccgaggttctggatgaaactatcaatatgaaacactttgactccttcaagtgtgccgacatatatgctctgggactcgtatactgggaaatcgccagacgctgtaactctggaggcgtccatgaggagtaccagctgccatactacgacctggtgcctagtgatccatccattgaagagatgaggaaggtcgtgtgcgaccagaagctccgaccaaacatccctaattggtggcagtcctacgaggcacttagagtcatgggcaagatgatgcgggagtgttggtacgccaatggggctgcaaggctgactgcccttcgcattaagaaaacactttcacagctcagtgtgcaggaggatgtgaaaatctag

SEQ ID NO: 144916 - DNA, 1464 bp, Artificial Sequence
  derived and/or modified sequence
atggcagaatccgccggggcttcttccttttttcccctcgttgtgcttttactggccggatctgggggttcgggccctaggggagttcaagccttattgtgtgcctgtacatcttgcctccaggctaactacacctgtgaaactgatggggcgtgcatggtttcgatatttaacttagatggaatggagcaccacgtaagaacctgtatccctaaggtggagcttgtgcccgccggcaaacccttctactgtctcagcagtgaggacctgcgcaacacgcattgctgctacactgactattgcaatcggatcgatttgcgcgtcccttcgggacaccttaaagagcctgagcatccttcgatgtggggccctgtcgaactggtgggcataattgccgggcctgttttcttgctgtttctgatcatcattatcgttttccttgtgattaattaccaccagcgggtctatcataataggcagaggcttgacatggaggatccctcttgtgaaatgtgcctgtcaaaagataagacactgcaggacctagtgtacgatttgagtactagcggatcagggagcggattgcctctatttgtacagaggacggtcgcgcggacaatcgtgctgcaagaaatcataggcaagggcaggtttggggaggtgtggagagggcgctggcgcggcggcgatgttgccgttaaaatcttcagctccagagaggagagatcctggtttcgggaagcggagatataccagacagttatgctgaggcatgaaaacatactgggctttatcgcagccgacaataaagataatgggacctggacgcaactttggctggtcagcgactatcatgagcatgggtcattatttgattatctcaataggtacaccgtgactatcgagggaatgattaaactggcactatccgcagcctcagggcttgctcatcttcacatggagatcgtgggtacacaaggtaagcccgggatcgcccatcgtgacctcaagtccaaaaacattttagttaaaaaaaacggcatgtgcgcaatcgccgaccttggtcttgcggtgaggcacgacgcagtgacagatactattgatattgcccccaaccagcgtgtgggcaccaaaaggtatatggctcccgaggtgctagatgaaactatcaacatgaaacacttcgacagctttaaatgcgccgacatttatgcactgggtctcgtgtattgggaaatcgccagaagatgcaactccggaggcacattcctcttctgtctatgttcttatctgcccttccaggatgctggcagccctaaggccgtgctactgccgcccttcttcctgcagcccgttgggtgcttgcttccagagcctgagtcgtccttcaaggtcgctattaagggggtcgaagttgccgtgctgcgggtcagactgtttttcagagatcagttcgttgaatag

SEQ ID NO: 144917 - DNA, 1431 bp, Artificial Sequence
  derived and/or modified sequence
atggctgaatccgcaggcgcctcaagcttctttccactagttgtattgttactggctgggtccggtggatctgggcccaggggggttcaggccctcttatgcgcttgtactagctgtctgcaggcgaattacacgtgcgaaactgacggagcctgtatggtcagcatctttaatttggacggaatggaacaccatgtgagaacatgcatccccaaagtggagctcgttcctgccggcaagccattttattgtttgtctagtgaggacttgaggaatacacattgctgttatacagattactgtaacaggatagatctacgagtccctagcgggcacctgaaagagcctgagcatccctcaatgtggggtcccgtagagcttgtcgggatcatcgcaggtccagttttccttctgttcctgattatcatcatagtgttcctggtcatcaactatcaccagcgcgtctatcacaaccggcaacggttggacatggaagatccatcctgcgagatgtgcctctcaaaggataagaccctccaggatctggtgtatgatctgagtacctcgggttccggtagtggtctgcccttgtttgttcagagaacagtcgcaaggacgattgtgcttcaggagataatcggaaaaggcagatttggagaggtgtggagggggaggtggcggggcggtgacgttgcggttaaaatttttagctccagagaggagaggtcctggttccgcgaagctgagatataccaaacagtaatgttgaggcacgaaaacatattgggatttatcgccgcagataacaaagacaatggaacgtggacacaactatggctggtctctgattatcatgaacacggttcactgtttgactacctaaatcgctacactgtgacaatcgagggaatgattaaactggcgctgagcgcagccagcggtctggcccatctccacatggaaatcgtgggtactcaggggaaaccaggaattgcgcaccgggacctgaagtccaagaatatcctggtaaaaaagaacggcatgtgcgcaatagcagatctgggcctggccgttcgccatgatgccgtgactgacacaattgatattgcccccaaccagcgtgtgggcacgaagcgctatatggcccccgaagtcctggatgagactatcaatatgaagcactttgatagctttaagtgcgctgatatttacgccttaggcctggtgtattgggagatcgcccgcagatgtaattccggtggcgtgcacgaggaatatcagctgccatactatgatttggtgcctagtgatcccagcatcgaagagatgaggaaggtggtgtgcgatcaaaaactaagaccgaatatacccaactggtggcagtcctatgaagtccggagctggcccccagctgcctttccaagcgcctag

SEQ ID NO: 144918 - DNA, 1518 bp, Artificial Sequence
  derived and/or modified sequence
atggccgagagcgctggggccagcagcttcttccccctggtggtgctgctgctggccggcagcggcggcagcggcccccggggcgtgcaggccctgctgtgtgcctgcaccagctgcctgcaggccaactacacctgtgaaacagatggagcctgcatggtgtccatcttcaacctggatggcatggagcaccacgtgaggacctgcatccccaaggtggagctggtgcctgctgggaagcccttctactgcctgagcagcgaggacctgaggaacacccactgctgctacacagactactgcaacagaattgacctgcgggtgcccagcggccacctgaaggagcctgagcaccccagcatgtggggccctgtggagctggtgggcatcatcgccggccctgtgttcctgctcttcctgatcatcatcatcgtgttcctggtgatcaactaccaccagagggtgtaccacaaccggcagaggctggacatggaggaccccagctgtgagatgtgcctgagcaaggacaagaccctgcaggacctggtgtatgacctgagcaccagcggcagcggcagcggcctgcccctgtttgtgcagaggacagtggcccggaccatcgtgctgcaggagatcatcggcaagggccgctttggagaggtgtggaggggccgctggagaggaggagatgtggccgtgaagatcttcagcagccgggaggagaggtcctggttccgggaggccgagatctaccagacagtgatgctgcggcatgagaacatcctgggcttcatcgctgctgacaacaaggacaatggcacctggacccagctgtggctggtgtctgactaccatgaacatggcagcctgtttgactacctgaaccgctacacagtgaccatcgagggcatgatcaagctggccctgtctgctgccagcggcctggcccacctgcacatggagatcgtgggcacccagggcaagccaggcatcgcccaccgggacctgaagagcaagaacatcctggtgaagaagaatggcatgtgtgccatcgctgacctgggcctggccgtgagacatgatgctgtgacagacaccattgatattgcccccaaccagagggtgggcaccaagcgctacatggcccctgaggtgctggatgagaccatcaacatgaagcactttgacagcttcaagtgtgccgacatctatgccctgggcctggtgtactgggagatcgcccggcgctgcaacagcggaggagtgcatgaggagtaccagctgccctactatgacctggtgcccagcgaccccagcattgaggagatgaggaaggtggtgtgtgaccagaagctgcggcccaacatccccaactggtggcagagctatgaggccctgcgggtgatgggcaagatgatgagggagtgctggtacgccaacggggccgcccggctgacagccctgcgcatcaagaagaccctgagccagctgtctgtgcaggaggatgtgaagatctag

SEQ ID NO: 144919 - DNA, 1464 bp, Artificial Sequence
  derived and/or modified sequence
atggccgagagcgctggggccagcagcttcttccccctggtggtgctgctgctggccggcagcggcggcagcggcccccggggcgtgcaggccctgctgtgtgcctgcaccagctgcctgcaggccaactacacctgtgaaacagatggagcctgcatggtgtccatcttcaacctggatggcatggagcaccacgtgaggacctgcatccccaaggtggagctggtgcctgctgggaagcccttctactgcctgagcagcgaggacctgaggaacacccactgctgctacacagactactgcaacagaattgacctgcgggtgcccagcggccacctgaaggagcctgagcaccccagcatgtggggccctgtggagctggtgggcatcatcgccggccctgtgttcctgctcttcctgatcatcatcatcgtgttcctggtgatcaactaccaccagagggtgtaccacaaccggcagaggctggacatggaggaccccagctgtgagatgtgcctgagcaaggacaagaccctgcaggacctggtgtatgacctgagcaccagcggcagcggcagcggcctgcccctgtttgtgcagaggacagtggcccggaccatcgtgctgcaggagatcatcggcaagggccgctttggagaggtgtggaggggccgctggagaggaggagatgtggccgtgaagatcttcagcagccgggaggagaggtcctggttccgggaggccgagatctaccagacagtgatgctgcggcatgagaacatcctgggcttcatcgctgctgacaacaaggacaatggcacctggacccagctgtggctggtgtctgactaccatgaacatggcagcctgtttgactacctgaaccgctacacagtgaccatcgagggcatgatcaagctggccctgtctgctgccagcggcctggcccacctgcacatggagatcgtgggcacccagggcaagccaggcatcgcccaccgggacctgaagagcaagaacatcctggtgaagaagaatggcatgtgtgccatcgctgacctgggcctggccgtgagacatgatgctgtgacagacaccattgatattgcccccaaccagagggtgggcaccaagcgctacatggcccctgaggtgctggatgagaccatcaacatgaagcactttgacagcttcaagtgtgccgacatctatgccctgggcctggtgtactgggagatcgcccggcgctgcaacagcggcggcaccttcctgttctgcctgtgcagctacctgcccttccaggatgctggcagccccaaggctgtgctgctgccccccttcttcctgcagcctgtgggctgcctgctgcctgagcctgagagcagcttcaaggtggccatcaagggcgtggaggtggccgtgctgcgggtgcggctcttcttccgggaccagtttgtggagtag

SEQ ID NO: 144920 - DNA, 1431 bp, Artificial Sequence
  derived and/or modified sequence
atggccgagagcgctggggccagcagcttcttccccctggtggtgctgctgctggccggcagcggcggcagcggcccccggggcgtgcaggccctgctgtgtgcctgcaccagctgcctgcaggccaactacacctgtgaaacagatggagcctgcatggtgtccatcttcaacctggatggcatggagcaccacgtgaggacctgcatccccaaggtggagctggtgcctgctgggaagcccttctactgcctgagcagcgaggacctgaggaacacccactgctgctacacagactactgcaacagaattgacctgcgggtgcccagcggccacctgaaggagcctgagcaccccagcatgtggggccctgtggagctggtgggcatcatcgccggccctgtgttcctgctcttcctgatcatcatcatcgtgttcctggtgatcaactaccaccagagggtgtaccacaaccggcagaggctggacatggaggaccccagctgtgagatgtgcctgagcaaggacaagaccctgcaggacctggtgtatgacctgagcaccagcggcagcggcagcggcctgcccctgtttgtgcagaggacagtggcccggaccatcgtgctgcaggagatcatcggcaagggccgctttggagaggtgtggaggggccgctggagaggaggagatgtggccgtgaagatcttcagcagccgggaggagaggtcctggttccgggaggccgagatctaccagacagtgatgctgcggcatgagaacatcctgggcttcatcgctgctgacaacaaggacaatggcacctggacccagctgtggctggtgtctgactaccatgaacatggcagcctgtttgactacctgaaccgctacacagtgaccatcgagggcatgatcaagctggccctgtctgctgccagcggcctggcccacctgcacatggagatcgtgggcacccagggcaagccaggcatcgcccaccgggacctgaagagcaagaacatcctggtgaagaagaatggcatgtgtgccatcgctgacctgggcctggccgtgagacatgatgctgtgacagacaccattgatattgcccccaaccagagggtgggcaccaagcgctacatggcccctgaggtgctggatgagaccatcaacatgaagcactttgacagcttcaagtgtgccgacatctatgccctgggcctggtgtactgggagatcgcccggcgctgcaacagcggaggagtgcatgaggagtaccagctgccctactatgacctggtgcccagcgaccccagcattgaggagatgaggaaggtggtgtgtgaccagaagctgcggcccaacatccccaactggtggcagagctatgaggtgcgctcctggcccccagctgccttccccagcgcctag

SEQ ID NO: 144921 - DNA, 1518 bp, Artificial Sequence
  derived and/or modified sequence
atggccgagagcgccggcgccagcagcttcttccccctggtggtgctcctcctggctggcagcggtgggtccggtcctaggggagttcaggccctgctgtgtgcctgtacatcgtgtttacaggctaattatacctgcgaaacagatggagcctgtatggtgagcattttcaatttagatggcatggagcaccatgtgaggacttgcatacctaaggttgagcttgtgcccgccggaaaacccttctattgcctttccagcgaggacctgcggaacactcactgctgctacacagactattgtaaccgcattgatcttagagtgccctcaggacacctgaaggagccagaacatccatctatgtgggggccggtggagttggttggtatcattgcaggccctgtgttcttgttgttcctgatcataatcattgtctttctggtaataaactaccaccagcgggtataccacaatcggcagagattagatatggaggatccttcgtgcgaaatgtgtttatctaaggacaaaaccctgcaggatctggtttacgacctgagcaccagcgggtcaggaagtggacttcctctgttcgtacagcggacggttgcaagaacaatcgtattgcaggagatcatcggcaagggccgcttcggagaggtttggcgcggacgttggcggggaggcgacgtggcagtaaagattttctcttctagagaggaaagatcttggtttcgtgaggccgagatttatcagacagtgatgctccgacatgagaacattctcggatttatcgccgcagataataaggataatggtacttggactcaactgtggcttgtttcagattatcacgaacatggcagcctgtttgactacttgaatcggtatactgttacaatcgaggggatgattaagctggcactctctgcagcctccggtctggcccatcttcacatggaaatagttggcacccagggcaagcctgggatcgcccacagggatctgaagtccaagaacatcctcgtcaaaaaaaacggtatgtgtgccatcgctgacctcggcctcgctgtgaggcatgatgccgtgacggataccattgacattgctcctaatcagagagtagggacaaagaggtacatggcccccgaagtgctggatgagacgatcaatatgaagcacttcgactctttcaagtgtgccgacatctatgctctgggccttgtgtactgggaaatcgctagacgctgtaattccggaggagtgcatgaagaataccaacttccatattatgacttagtgccatccgatccaagcatcgaggaaatgcgcaaagtggtttgtgatcagaagctgaggcccaatatacccaactggtggcagtcatacgaagcgctgagggttatgggcaagatgatgagggaatgctggtacgccaatggcgccgctcgattaactgcgctgaggattaaaaagaccctaagtcagttgagcgtccaagaagatgtgaagatatag

SEQ ID NO: 144922 - DNA, 1464 bp, Artificial Sequence
  derived and/or modified sequence
atggccgagagcgccggcgccagcagcttcttccccctggtggtgttgctgctggccggcagcggcgggagcggaccccgcggcgtgcaggctcttctttgcgcctgcacttcttgcctccaagccaactacacctgcgaaaccgacggagcctgcatggttagcatttttaatctggacggcatggaacatcacgtgaggacatgcatccccaaggtggagctcgttccagccggaaaacctttttactgcctgtcatccgaggacctgcggaacactcattgttgctacacagattactgcaatcgaatcgacctgcgcgtcccaagtggccacctgaaggagccagagcatccttcaatgtggggcccagtcgagttggttgggatcatcgcaggtccagtgtttctgctgttcctgataattattatagtgttccttgtgattaattatcatcagcgcgtgtaccacaaccgtcagagacttgacatggaagatccgtcatgtgaaatgtgtctctctaaagacaagactcttcaggacctggtgtacgacctctcaacttctgggagcgggagtggcttacctctcttcgttcagcggacagtggctaggaccatcgtactgcaggaaattatcggaaagggccggttcggagaggtttggcgcggccgatggcgaggcggcgacgtcgcagtgaaaattttttcatcccgagaagaacgctcatggtttcgtgaagccgagatataccaaactgtcatgttgagacatgaaaacatattaggctttattgcagccgataacaaggacaacggcacctggactcagctctggctggtcagcgattaccacgaacacggttccctgtttgactacctcaacaggtataccgttactattgagggaatgattaagctcgccctgagcgctgctagcgggctggcacacctccacatggagattgtagggacacaggggaagccggggattgctcatagggacttgaaatccaagaacatactggtgaagaaaaacggaatgtgcgctatcgctgaccttggcttagctgtaagacacgatgccgtaaccgacactattgatatcgccccaaatcagagggtcgggacaaagcggtacatggctccagaggtgctggatgaaaccatcaatatgaaacacttcgacagttttaagtgcgccgacatctacgccctgggactcgtgtactgggagatcgcccgccgctgcaacagtggcgggacgttcctcttttgtctttgctcttacctacccttccaggatgccggctccccaaaagctgtactgctgcctcctttcttcctgcagcccgtaggttgtttgctgcctgaaccagagagttcctttaaggttgccatcaaaggtgttgaagtcgctgtgttgagagttcgtttatttttccgggatcaattcgtggaatag

SEQ ID NO: 144923 - DNA, 1431 bp, Artificial Sequence
  derived and/or modified sequence
atggccgagagcgccggcgccagcagcttcttccccctggtggtgctcctcctagcaggatctggcggcagtggccctcggggtgttcaagccctgctgtgtgcatgcaccagctgtttgcaggctaattatacatgcgaaactgacggtgcctgtatggtaagcatttttaatctcgatggaatggaacaccacgtgaggacatgcataccgaaagttgagctggtgcccgccgggaagccgttttattgtctgtcgtccgaggacctacgaaatactcattgctgttacacggactattgcaaccggattgatttgcgcgtaccctccggccacctcaaggagcccgagcacccttccatgtggggcccagtggaactcgtgggcatcatagctggacctgtctttctgctgtttctaattataatcattgtatttctagtaatcaattaccatcagcgtgtctaccacaaccgacagcgccttgacatggaggatcctagttgcgagatgtgcctcagcaaagataaaacgttgcaagatttggtgtacgatctgtcgaccagtggcagcggatcagggctgcctctgtttgtacaacggaccgttgcacggaccattgttcttcaggagatcatcggcaaggggaggtttggtgaggtgtggagggggcggtggcggggcggggacgtggccgtcaaaatcttttcaagtcgcgaggagcggtcttggtttcgggaggcagaaatctaccagaccgtaatgctgcgccacgagaacattctaggctttatcgctgccgacaataaagataacggaacttggactcagctctggctggtaagcgattatcacgagcacggcagcctcttcgactatttgaatcgctacaccgtgacaattgaggggatgattaagttggcactgtctgcggctagcgggctcgcgcaccttcatatggagatcgttgggacccagggcaagccagggatcgcacacagggatctcaagtctaaaaatatcttggtgaagaagaacgggatgtgcgctattgccgaccttgggcttgccgtcaggcacgatgcggtaacggataccatcgacatcgctcctaatcagcgcgtgggaactaagcggtacatggcccctgaggtgttagatgagactatcaacatgaaacatttcgattcattcaaatgcgcagacatctacgccctggggctggtctactgggaaatcgcaagaagatgcaattcagggggagtccacgaagaataccagttgccatattatgacctggttccatctgacccttcaattgaggagatgcgcaaggtagtttgcgaccagaagttgaggcctaacatccccaactggtggcagtcctacgaggttcggtcctggcctccagcagctttcccctcagcctag

SEQ ID NO: 144924 - DNA, 1518 bp, Artificial Sequence
  derived and/or modified sequence
atggcagagagcgccggagcaagtagtttcttccctctggtggttctgcttcttgccggttctgggggttcaggacctagaggagtacaggccctgctatgcgcttgtacgagctgtttacaggcaaattatacctgcgaaactgacggagcctgcatggtgtcgatttttaatctggacgggatggagcaccatgtgcggacatgcatcccaaaagtggagttggttcccgctggaaagccattttattgcctttccagcgaggacctacgaaacacccactgctgctatacagactactgcaaccgaatagacctgcgggtgccaagcggccacctaaaggaacccgagcatccctctatgtggggccctgtggagcttgtgggcatcattgccggacctgtctttttgctttttctgatcataatcatagtcttccttgtcattaactatcatcaaagggtttatcacaatcggcagcggctggatatggaagatccctcctgcgaaatgtgcttgtcaaaagacaaaaccttgcaggaccttgtgtacgacctgtctacgagtggctctgggagtggactccccttattcgttcagaggactgttgccagaacaatcgttttacaagaaatcatagggaaaggcagatttggtgaagtttggcgcggtcgatggcgcggtggcgacgtggctgtcaagattttcagctccagagaggaacgatcatggttccgggaagctgagatttatcagacggttatgctgaggcacgagaatatcctggggttcatcgcagccgacaataaggacaatggaacgtggacccagctctggctagttagtgactaccatgagcacggtagcctgtttgactatttaaaccgctacaccgtgaccatcgaaggaatgattaagttagctttgtccgccgcatcgggcctcgcccacttacatatggagatagtggggactcaaggaaagcccggtatcgcccaccgagatctgaaatcaaagaatatcctggtgaaaaaaaacgggatgtgtgctatcgcggacttgggactggccgttagacacgacgcagtaacagatacaattgatattgcacccaatcagagagttggtaccaagagatacatggcacctgaggtgctcgacgaaacaataaatatgaagcacttcgatagtttcaagtgcgctgacatctatgctttgggactcgtgtactgggagatcgccagaaggtgcaactccggaggagtccatgaggaataccaactcccgtattatgatcttgtcccatccgatccaagtatagaggagatgagaaaagtggtgtgcgatcagaaactacggccaaatattccgaactggtggcaaagctacgaggcactgagagtaatgggaaagatgatgagagagtgctggtatgccaatggagcagcgcgactgacggcgttacgaataaagaagaccctctcacagttgagtgttcaagaggacgtgaagatctag

SEQ ID NO: 144925 - DNA, 1464 bp, Artificial Sequence
  derived and/or modified sequence
atggcagagagtgcaggtgcaagcagttttttccccctggtagtgctgctcttggcaggatccggcggatcaggacctaggggcgttcaggccctgctgtgcgcttgcacctcctgtctccaggctaattacacatgcgaaactgatggtgcctgtatggtttcgatctttaacctggatggtatggagcatcacgtaaggacttgcattcccaaggttgaactggtgccggcaggcaagcctttctattgtctttcatccgaggatctgcgaaacactcattgctgttacactgactattgcaatcgcatcgatttgcgggtgccgtccggccatctgaaagagccagaacatccttccatgtgggggccagtcgaattggtgggaatcatcgcaggtcccgtgttcttgctgtttttaatcattattattgtatttctggtcattaactaccaccagcgggtctatcacaaccggcagaggctggatatggaggatccaagctgcgagatgtgcctgagtaaagacaagactctgcaggatttggtttacgatctcagtacgtccgggtcgggctccggtctacctctgtttgttcagaggacagtagccagaacaatcgttttacaggaaatcatcggcaaaggtagattcggcgaggtttggcgcggtcggtggagaggaggggatgtggccgtgaaaatttttagtagccgtgaggaacgcagctggtttagagaggcagaaatctaccagactgtgatgctgaggcacgaaaacatcctggggttcatcgctgccgataataaagacaatggcacatggacacagctatggctcgtgtccgattatcacgagcatggttctttatttgattatttgaataggtatacggtcaccatcgaaggtatgataaaactggcactgtccgcagcgtcgggcttagcccacctgcatatggagatagtggggacccagggtaagcctggcatcgcccatagggatttaaagagtaagaatattctcgtcaaaaaaaatggcatgtgcgccatcgctgacctcggccttgcagttagacacgacgccgtgactgacaccatagacatcgcaccgaatcagcgagtgggcaccaaaagatatatggccccagaggttcttgatgagactataaatatgaagcatttcgactcttttaagtgtgctgatatttacgccctgggccttgtatattgggagattgccagacggtgcaattccggagggacttttttgttttgcttgtgtagttatctcccattccaggatgccggatcacccaaagctgtgctgcttccaccatttttcctgcaacctgttggttgtctgctccccgaaccggaatctagcttcaaggtggccataaagggggtggaagtggccgtgctcagggtccgtctgttcttcagagaccaatttgtggagtag

SEQ ID NO: 144926 - DNA, 1431 bp, Artificial Sequence
  derived and/or modified sequence
atggcggagtccgcgggtgcctcctcattcttcccactggtggtcctactgctggcgggaagtggaggatcaggccctagaggggtgcaagctctcctgtgcgcttgcaccagctgtctgcaggcgaactatacctgcgaaacagacggggcttgtatggtaagcatttttaacttggacggtatggagcaccatgtaaggacctgtatcccaaaagtcgaactggtgccggctggcaagccattctattgcctctcttctgaagacttacgcaatacacactgctgctataccgactattgcaacaggattgatctccgcgtgccttccggccacctcaaggagcccgagcacccctctatgtggggaccagtggagttggtgggcatcattgcaggacccgtttttctgcttttcttgatcatcattattgtgttcctggtgattaactaccaccagagggtctatcacaacaggcagagacttgacatggaagacccctcttgtgagatgtgcctgtcaaaggataaaacgcttcaggatttagtgtatgatctgtcaactagtggatcagggagcggactgccactgttcgtgcagaggaccgtggctagaaccatcgttctgcaggagatcattggtaaaggcagatttggagaggtttggagaggcagatggcggggtggcgacgtagctgtgaaaatattctcatccagagaagaacgctcttggttccgggaggcggagatctatcaaactgtgatgctgaggcacgagaacatcttgggatttattgccgctgataataaggataacgggacgtggacgcagctgtggctcgtgtccgattaccacgagcatggtagcctttttgactacttaaatcgttatacggtaacaatcgaaggcatgatcaaactggcactgtcagccgcatccggcctagcccatctgcatatggagattgtgggcacacagggcaagccaggaatcgcacaccgtgatctcaaaagcaaaaacatcctggtcaagaagaatggtatgtgcgccatcgccgatctcgggctggctgtgagacacgacgctgttacagataccattgacattgccccaaaccagagagtggggacgaaaagatatatggcgccagaggtcctcgatgagaccattaatatgaaacactttgactcattcaaatgcgccgacatctacgctcttgggcttgtatactgggaaatagccagacgatgcaacagcgggggtgtccacgaagagtatcagttaccctactatgatctcgtgccaagcgaccctagtattgaagagatgcggaaagtagtgtgtgaccagaaactgaggcccaacattcctaactggtggcaatcatacgaggtgagaagctggccacctgccgcattccccagcgcctag

SEQ ID NO: 144927 - DNA, 1518 bp, Artificial Sequence
  derived and/or modified sequence
atggccgagagcgccggcgccagcagcttcttccccctggtggtgctgctgctggccggcagcggcggcagcggccccagaggcgtgcaggccctgctgtgcgcctgcaccagctgcctgcaggccaactacacctgcgagaccgacggcgcctgcatggtgagcatcttcaacctggacggcatggagcaccacgtgagaacctgcatccccaaggtggagctggtgcccgccggcaagcccttctactgcctgagcagcgaggacctgagaaacacccactgctgctacaccgactactgcaacagaatcgacctgagagtgcccagcggccacctgaaggagcccgagcaccccagcatgtggggccccgtggagctggtgggcatcatcgccggccccgtgttcctgctgttcctgatcatcatcatcgtgttcctggtgatcaactaccaccagagagtgtaccacaacagacagagactggacatggaggaccccagctgcgagatgtgcctgagcaaggacaagaccctgcaggacctggtgtacgacctgagcaccagcggcagcggcagcggcctgcccctgttcgtgcagagaaccgtggccagaaccatcgtgctgcaggagatcatcggcaagggcagattcggcgaggtgtggagaggcagatggagaggcggcgacgtggccgtgaagatcttcagcagcagagaggagagaagctggttcagagaggccgagatctaccagaccgtgatgctgagacacgagaacatcctgggcttcatcgccgccgacaacaaggacaacggcacctggacccagctgtggctggtgagcgactaccacgagcacggcagcctgttcgactacctgaacagatacaccgtgaccatcgagggcatgatcaagctggccctgagcgccgccagcggcctggcccacctgcacatggagatcgtgggcacccagggcaagcccggcatcgcccacagagacctgaagagcaagaacatcctggtgaagaagaacggcatgtgcgccatcgccgacctgggcctggccgtgagacacgacgccgtgaccgacaccatcgacatcgcccccaaccagagagtgggcaccaagagatacatggcccccgaggtgctggacgagaccatcaacatgaagcacttcgacagcttcaagtgcgccgacatctacgccctgggcctggtgtactgggagatcgccagaagatgcaacagcggcggcgtgcacgaggagtaccagctgccctactacgacctggtgcccagcgaccccagcatcgaggagatgagaaaggtggtgtgcgaccagaagctgagacccaacatccccaactggtggcagagctacgaggccctgagagtgatgggcaagatgatgagagagtgctggtacgccaacggcgccgccagactgaccgccctgagaatcaagaagaccctgagccagctgagcgtgcaggaggacgtgaagatctag

SEQ ID NO: 144928 - DNA, 1464 bp, Artificial Sequence
  derived and/or modified sequence
atggccgagagcgccggcgccagcagcttcttccccctggtggtgctgctgctggccggcagcggcggcagcggccccagaggcgtgcaggccctgctgtgcgcctgcaccagctgcctgcaggccaactacacctgcgagaccgacggcgcctgcatggtgagcatcttcaacctggacggcatggagcaccacgtgagaacctgcatccccaaggtggagctggtgcccgccggcaagcccttctactgcctgagcagcgaggacctgagaaacacccactgctgctacaccgactactgcaacagaatcgacctgagagtgcccagcggccacctgaaggagcccgagcaccccagcatgtggggccccgtggagctggtgggcatcatcgccggccccgtgttcctgctgttcctgatcatcatcatcgtgttcctggtgatcaactaccaccagagagtgtaccacaacagacagagactggacatggaggaccccagctgcgagatgtgcctgagcaaggacaagaccctgcaggacctggtgtacgacctgagcaccagcggcagcggcagcggcctgcccctgttcgtgcagagaaccgtggccagaaccatcgtgctgcaggagatcatcggcaagggcagattcggcgaggtgtggagaggcagatggagaggcggcgacgtggccgtgaagatcttcagcagcagagaggagagaagctggttcagagaggccgagatctaccagaccgtgatgctgagacacgagaacatcctgggcttcatcgccgccgacaacaaggacaacggcacctggacccagctgtggctggtgagcgactaccacgagcacggcagcctgttcgactacctgaacagatacaccgtgaccatcgagggcatgatcaagctggccctgagcgccgccagcggcctggcccacctgcacatggagatcgtgggcacccagggcaagcccggcatcgcccacagagacctgaagagcaagaacatcctggtgaagaagaacggcatgtgcgccatcgccgacctgggcctggccgtgagacacgacgccgtgaccgacaccatcgacatcgcccccaaccagagagtgggcaccaagagatacatggcccccgaggtgctggacgagaccatcaacatgaagcacttcgacagcttcaagtgcgccgacatctacgccctgggcctggtgtactgggagatcgccagaagatgcaacagcggcggcaccttcctgttctgcctgtgcagctacctgcccttccaggacgccggcagccccaaggccgtgctgctgccccccttcttcctgcagcccgtgggctgcctgctgcccgagcccgagagcagcttcaaggtggccatcaagggcgtggaggtggccgtgctgagagtgagactgttcttcagagaccagttcgtggagtag

SEQ ID NO: 144929 - DNA, 1431 bp, Artificial Sequence
  derived and/or modified sequence
atggccgagagcgccggcgccagcagcttcttccccctggtggtgctgctgctggccggcagcggcggcagcggccccagaggcgtgcaggccctgctgtgcgcctgcaccagctgcctgcaggccaactacacctgcgagaccgacggcgcctgcatggtgagcatcttcaacctggacggcatggagcaccacgtgagaacctgcatccccaaggtggagctggtgcccgccggcaagcccttctactgcctgagcagcgaggacctgagaaacacccactgctgctacaccgactactgcaacagaatcgacctgagagtgcccagcggccacctgaaggagcccgagcaccccagcatgtggggccccgtggagctggtgggcatcatcgccggccccgtgttcctgctgttcctgatcatcatcatcgtgttcctggtgatcaactaccaccagagagtgtaccacaacagacagagactggacatggaggaccccagctgcgagatgtgcctgagcaaggacaagaccctgcaggacctggtgtacgacctgagcaccagcggcagcggcagcggcctgcccctgttcgtgcagagaaccgtggccagaaccatcgtgctgcaggagatcatcggcaagggcagattcggcgaggtgtggagaggcagatggagaggcggcgacgtggccgtgaagatcttcagcagcagagaggagagaagctggttcagagaggccgagatctaccagaccgtgatgctgagacacgagaacatcctgggcttcatcgccgccgacaacaaggacaacggcacctggacccagctgtggctggtgagcgactaccacgagcacggcagcctgttcgactacctgaacagatacaccgtgaccatcgagggcatgatcaagctggccctgagcgccgccagcggcctggcccacctgcacatggagatcgtgggcacccagggcaagcccggcatcgcccacagagacctgaagagcaagaacatcctggtgaagaagaacggcatgtgcgccatcgccgacctgggcctggccgtgagacacgacgccgtgaccgacaccatcgacatcgcccccaaccagagagtgggcaccaagagatacatggcccccgaggtgctggacgagaccatcaacatgaagcacttcgacagcttcaagtgcgccgacatctacgccctgggcctggtgtactgggagatcgccagaagatgcaacagcggcggcgtgcacgaggagtaccagctgccctactacgacctggtgcccagcgaccccagcatcgaggagatgagaaaggtggtgtgcgaccagaagctgagacccaacatccccaactggtggcagagctacgaggtgagaagctggccccccgccgccttccccagcgcctag

SEQ ID NO: 144930 - DNA, 4563 bp, Artificial Sequence
  derived and/or modified sequence
ggggaggcgccgggggcgcgcgcgcgcgcgctgggcgctgctgggctgcggcggcggcggcggcggcggtggttactatggcggagtcggccggagcctcctccttcttcccccttgttgtcctcctgctcgccggcagcggcgggtccgggccccggggggtccaggctctgctgtgtgcgtgcaccagctgcctccaggccaactacacgtgtgagacagatggggcctgcatggtttccattttcaatctggatgggatggagcaccatgtgcgcacctgcatccccaaagtggagctggtccctgccgggaagcccttctactgcctgagctcggaggacctgcgcaacacccactgctgctacactgactactgcaacaggatcgacttgagggtgcccagtggtcacctcaaggagcctgagcacccgtccatgtggggcccggtggagctggtaggcatcatcgccggcccggtgttcctcctgttcctcatcatcatcattgttttccttgtcattaactatcatcagcgtgtctatcacaaccgccagagactggacatggaagatccctcatgtgagatgtgtctctccaaagacaagacgctccaggatcttgtctacgatctctccacctcagggtctggctcagggttacccctctttgtccagcgcacagtggcccgaaccatcgttttacaagagattattggcaagggtcggtttggggaagtatggcggggccgctggaggggtggtgatgtggctgtgaaaatattctcttctcgtgaagaacggtcttggttcagggaagcagagatataccagacggtcatgctgcgccatgaaaacatccttggatttattgctgctgacaataaagataatggcacctggacacagctgtggcttgtttctgactatcatgagcacgggtccctgtttgattatctgaaccggtacacagtgacaattgaggggatgattaagctggccttgtctgctgctagtgggctggcacacctgcacatggagatcgtgggcacccaagggaagcctggaattgctcatcgagacttaaagtcaaagaacattctggtgaagaaaaatggcatgtgtgccatagcagacctgggcctggctgtccgtcatgatgcagtcactgacaccattgacattgccccgaatcagagggtggggaccaaacgatacatggcccctgaagtacttgatgaaaccattaatatgaaacactttgactcctttaaatgtgctgatatttatgccctcgggcttgtatattgggagattgctcgaagatgcaattctggaggagtccatgaagaatatcagctgccatattacgacttagtgccctctgacccttccattgaggaaatgcgaaaggttgtatgtgatcagaagctgcgtcccaacatccccaactggtggcagagttatgaggcactgcgggtgatggggaagatgatgcgagagtgttggtatgccaacggcgcagcccgcctgacggccctgcgcatcaagaagaccctctcccagctcagcgtgcaggaagacgtgaagatctaactgctccctctctccacacggagctcctggcagcgagaactacgcacagctgccgcgttgagcgtacgatggaggcctacctctcgtttctgcccagccctctgtggccaggagccctggcccgcaagagggacagagcccgggagagactcgctcactcccatgttgggtttgagacagacaccttttctatttacctcctaatggcatggagactctgagagcgaattgtgtggagaactcagtgccacacctcgaactggttgtagtgggaagtcccgcgaaacccggtgcatctggcacgtggccaggagccatgacaggggcgcttgggaggggccggaggaaccgaggtgttgccagtgctaagctgccctgagggtttccttcggggaccagcccacagcacaccaaggtggcccggaagaaccagaagtgcagcccctctcacaggcagctctgagccgcgctttcccctcctccctgggatggacgctgccgggagactgccagtggagacggaatctgccgctttgtctgtccagccgtgtgtgcatgtgccgaggtgcgtcccccgttgtgcctggttcgtgccatgcccttacacgtgcgtgtgagtgtgtgtgtgtgtctgtaggtgcgcacttacctgcttgagctttctgtgcatgtgcaggtcgggggtgtggtcgtcatgctgtccgtgcttgctggtgcctcttttcagtagtgagcagcatctagtttccctggtgcccttccctggaggtctctccctcccccagagcccctcatgccacagtggtactctgtgtctggcaggctactctgcccaccccagcatcagcacagctctcctcctccatctcagactgtggaaccaaagctggcccagttgtccatgacaaaagaggcttttgggccaaaatgtgagggtggtgggtgggatgggcagggaaggaatcctggtggaagtcttgggtgttagtgtcagccatgggaaatgagccagcccaagggcatcatcctcagcagcatcgaggaagggccgaggaatgtgaagccagatctcgggactcagattggaatgttacatctgtctttcatctcccagatcctggaaacagcagtgtatatttttggtggtggtgggtttggggtggggaagggaagggcgggcaaggagtggggagggagtctggggtgggagggaggcatctgcatgggtcttcttttactggactgtctgatcagggtggagggaaggtgagaggtttgcatccacttcaggagccctactgaagggaacagcctgagccgaacatgttatttaacctgagtatagtatttaacgaagcctagaagcacggctgtgggtggtgatttggtcagcatatcttaggtatataataactttgaagccataacttttaactggagtggtttgatttctttttttaattttattgggagggtttggattttaactttttttaatgttgttaaatattaagtttttgtaaaaggaaaaccatctctgtgattacctctcaatctatttgtttttaaagaaatccctaaaaaaaaaaattatccaattgaacgcacatagctcaatcacactggaaatgtttgtccttgcacctgagcctgttcccactcagcagtgagagttcctctttgccctgaggctcagtctctctcgtattttgtccccacccccaattccttgagtggtttttgctctagggccctttcttgcactgtccagctggttgtaccctctccaggcatttattcaacaaatgtgggtgaagtgcctgctgggtgccaggtgctgggaatacatctgtggacaagacatgcttgggtcctactcctggagcactgtaaaaagagctgattcaagtaagtagatgcctgttttgagaccagaaggtttcataattggttctacgacccttttgagcctagaattattgttcttatataagatcactgaagaaagaggaacccccacaaccccctccacaaagagaccaggggcgggtgatgagacctggggtttagaaccccaggtgagacctcaaatcactgcattcattctgagcccccttcctgtccccaggggaggtgtattgtgtatgtagccttagagcatctctgcctccaacccagcagttctctgccaaagcttgtggaggagggagagccctgtccctgccctcaggctccccagtgctcctggcccttctatttatttgactgattattgcttctttccttgcattaaaggagatcttcccctaacctttgggccaatttactggccactaatttcgtttaaataccattgtgtcattggggggaccgtctttacccctgctgacctcccacctatccgccctgcagcagaaccttggcggtttataggtaatgatggaacttagactcctcttcccagagtcacaagtagcctctgggatctgccaacacacgtccactcccaagccactagcccactccccagttggcccttctgcccttaccccacacacagtccaactcttccacctctggggaagatggagcaggtctttgggaagctcccacacccacctctgccactcttaacactaagtgagagttggggagaaactgaagccgtgtttttggccccccgaggctaaccctgatccatagtgctacctgcacctctggattctggattcacagaccaagtccaagcccgttcttacgtcgccataaaggcccccgaacggcattctcggtacttctgtttgtttttgtacattttattagaaaggactgtaaaatagccacttagacactttacctcttcagtatgcaaatgtaaataaattgtaatataggaaatcttttgttttaatataagaatgagcctgtccaatttctgctgtacattattaaaagttttattcacaga

SEQ ID NO: 144931 - DNA, 1665 bp, Artificial Sequence
  derived and/or modified sequence
atggcggagtcggccggagcctcctccttcttcccccttgttgtcctcctgctcgccggcagcggcgggtccgggccccggggggtccaggctctgctgtgtgcgtgcaccagctgcctccaggccaactacacgtgtgagacagatggggcctgcatggtttccattttcaatctggatgggatggagcaccatgtgcgcacctgcatccccaaagtggagctggtccctgccgggaagcccttctactgcctgagctcggaggacctgcgcaacacccactgctgctacactgactactgcaacaggatcgacttgagggtgcccagtggtcacctcaaggagcctgagcacccgtccatgtggggcccggtggagctggtaggcatcatcgccggcccggtgttcctcctgttcctcatcatcatcattgttttccttgtcattaactatcatcagcgtgtctatcacaaccgccagagactggacatggaagatccctcatgtgagatgtgtctctccaaagacaagacgctccaggatcttgtctacgatctctccacctcagggtctggctcagggttacccctctttgtccagcgcacagtggcccgaaccatcgttttacaagagattattggcaagggtcggtttggggaagtatggcggggccgctggaggggtggtgatgtggctgtgaaaatattctcttctcgtgaagaacggtcttggttcagggaagcagagatataccagacggtcatgctgcgccatgaaaacatccttggatttattgctgctgacaataaagataatggcacctggacacagctgtggcttgtttctgactatcatgagcacgggtccctgtttgattatctgaaccggtacacagtgacaattgaggggatgattaagctggccttgtctgctgctagtgggctggcacacctgcacatggagatcgtgggcacccaagggaagcctggaattgctcatcgagacttaaagtcaaagaacattctggtgaagaaaaatggcatgtgtgccatagcagacctgggcctggctgtccgtcatgatgcagtcactgacaccattgacattgccccgaatcagagggtggggaccaaacgatacatggcccctgaagtacttgatgaaaccattaatatgaaacactttgactcctttaaatgtgctgatatttatgccctcgggcttgtatattgggagattgctcgaagatgcaattctggaggtacctttcttttttgcctttgctcctacctcccattccaggatgctggatcacccaaagctgttttactgccccctttctttttacaacctgttggatgcctgttgccagagcctgaatcatcgtttaaggttgccatcaaaggtgtggaggtagctgtgcttagggtgcgtttattcttcagggatcagtttgttgaatagcgttgtgtgttatggtaaccattctgaaggctcgtttggctttataaacaaacaaacattgttttattagtccgtggcggggagtgccccggtgcgcatagcacgggattcatgcagtggtctccttcacatcagaagcagtatattctaacgcggtggctcccaagccacattcatgggaaaccctgctgtttcattgtt

SEQ ID NO: 144932 - DNA, 1782 bp, Artificial Sequence
  derived and/or modified sequence
cgctgctgggctgcggcggcggcggcggcggcggtggttactatggcggagtcggccggagcctcctccttcttcccccttgttgtcctcctgctcgccggcagcggcgggtccgggccccggggggtccaggctctgctgtgtgcgtgcaccagctgcctccaggccaactacacgtgtgagacagatggggcctgcatggtttccattttcaatctggatgggatggagcaccatgtgcgcacctgcatccccaaagtggagctggtccctgccgggaagcccttctactgcctgagctcggaggacctgcgcaacacccactgctgctacactgactactgcaacaggatcgacttgagggtgcccagtggtcacctcaaggagcctgagcacccgtccatgtggggcccggtggagctggtaggcatcatcgccggcccggtgttcctcctgttcctcatcatcatcattgttttccttgtcattaactatcatcagcgtgtctatcacaaccgccagagactggacatggaagatccctcatgtgagatgtgtctctccaaagacaagacgctccaggatcttgtctacgatctctccacctcagggtctggctcagggttacccctctttgtccagcgcacagtggcccgaaccatcgttttacaagagattattggcaagggtcggtttggggaagtatggcggggccgctggaggggtggtgatgtggctgtgaaaatattctcttctcgtgaagaacggtcttggttcagggaagcagagatataccagacggtcatgctgcgccatgaaaacatccttggatttattgctgctgacaataaagataatggcacctggacacagctgtggcttgtttctgactatcatgagcacgggtccctgtttgattatctgaaccggtacacagtgacaattgaggggatgattaagctggccttgtctgctgctagtgggctggcacacctgcacatggagatcgtgggcacccaagggaagcctggaattgctcatcgagacttaaagtcaaagaacattctggtgaagaaaaatggcatgtgtgccatagcagacctgggcctggctgtccgtcatgatgcagtcactgacaccattgacattgccccgaatcagagggtggggaccaaacgatacatggcccctgaagtacttgatgaaaccattaatatgaaacactttgactcctttaaatgtgctgatatttatgccctcgggcttgtatattgggagattgctcgaagatgcaattctggaggagtccatgaagaatatcagctgccatattacgacttagtgccctctgacccttccattgaggaaatgcgaaaggttgtatgtgatcagaagctgcgtcccaacatccccaactggtggcagagttatgaggtaagaagctggcctcctgcggctttcccatcagcctgatttctccaccttagaaaagggtttcttgacaatggggtcaggccccagaggagccccctgagagtgtcagttattatttactattacgtgctattttacatatcccaagccctttagggctacagtctcttgtcctggaccctgtagggtgccatttggagttcacagcctagaagaagaaaaggctttgggcctggtgtggtggcataggcctgtaatcgtagcgctttgagaggctgaggcaggaagatagcttgagctcagaagttcgagacaaacctgggcaatgtggggagaccccatctctac

SEQ ID NO: 144933 - DNA, 2362 bp, Artificial Sequence
  derived and/or modified sequence
aatgcttctcctaagcacctcgtgtgtgttcttcggcctcactgctctgtggcttaggtatctgtgctgtggggtttgagaaacatggtgaaggtgtatgaacagagcttgacatttgtgctctgctgtgtgcgtgcaccagctgcctccaggccaactacacgtgtgagacagatggggcctgcatggtttccattttcaatctggatgggatggagcaccatgtgcgcacctgcatccccaaagtggagctggtccctgccgggaagcccttctactgcctgagctcggaggacctgcgcaacacccactgctgctacactgactactgcaacaggatcgacttgagggtgcccagtggtcacctcaaggagcctgagcacccgtccatgtggggcccggtggagctggtaggcatcatcgccggcccggtgttcctcctgttcctcatcatcatcattgttttccttgtcattaactatcatcagcgtgtctatcacaaccgccagagactggacatggaagatccctcatgtgagatgtgtctctccaaagacaagacgctccaggatcttgtctacgatctctccacctcagggtctggctcagggttacccctctttgtccagcgcacagtggcccgaaccatcgttttacaagagattattggcaagggtcggtttggggaagtatggcggggccgctggaggggtggtgatgtggctgtgaaaatattctcttctcgtgaagaacggtcttggttcagggaagcagagatataccagacggtcatgctgcgccatgaaaacatccttggatttattgctgctgacaataaagataatggcacctggacacagctgtggcttgtttctgactatcatgagcacgggtccctgtttgattatctgaaccggtacacagtgacaattgaggggatgattaagctggccttgtctgctgctagtgggctggcacacctgcacatggagatcgtgggcacccaagggaagcctggaattgctcatcgagacttaaagtcaaagaacattctggtgaagaaaaatggcatgtgtgccatagcagacctgggcctggctgtccgtcatgatgcagtcactgacaccattgacattgccccgaatcagagggtggggaccaaacgatacatggcccctgaagtacttgatgaaaccattaatatgaaacactttgactcctttaaatgtgctgatatttatgccctcgggcttgtatattgggagattgctcgaagatgcaattctggaggagtccatgaagaatatcagctgccatattacgacttagtgccctctgacccttccattgaggaaatgcgaaaggttgtatgtgatcagaagctgcgtcccaacatccccaactggtggcagagttatgaggcactgcgggtgatggggaagatgatgcgagagtgttggtatgccaacggcgcagcccgcctgacggccctgcgcatcaagaagaccctctcccagctcagcgtgcaggaagacgtgaagatctaactgctccctctctccacacggagctcctggcagcgagaactacgcacagctgccgcgttgagcgtacgatggaggcctacctctcgtttctgcccagccctctgtggccaggagccctggcccgcaagagggacagagcccgggagagactcgctcactcccatgttgggtttgagacagacaccttttctatttacctcctaatggcatggagactctgagagcgaattgtgtggagaactcagtgccacacctcgaactggttgtagtgggaagtcccgcgaaacccggtgcatctggcacgtggccaggagccatgacaggggcgcttgggaggggccggaggaaccgaggtgttgccagtgctaagctgccctgagggtttccttcggggaccagcccacagcacaccaaggtggcccggaagaaccagaagtgcagcccctctcacaggcagctctgagccgcgctttcccctcctccctgggatggacgctgccgggagactgccagtggagacggaatctgccgctttgtctgtccagccgtgtgtgcatgtgccgaggtgcgtcccccgttgtgcctggttcgtgccatgcccttacacgtgcgtgtgagtgtgtgtgtgtgtctgtaggtgcgcacttacctgcttgagctttctgtgcatgtgcaggtcgggggtgtggtcgtcatgctgtccgtgcttgctggtgcctcttttcagtagtgagcagcatctagtttccctggtgcccttccctggaggtctctccctcccccagagcccctcatgccacagtggtactctgtgt

SEQ ID NO: 144934 - protein, 1620 aa, Artificial Sequence
  derived and/or modified sequence
MGAIGLLWLLPLLLSTAAVGSGMGTGQRAGSPAAGPPLQPREPLSYSRLQRKSLAVDFVVPSLFRVYARDLLLPPSSSELKAGRPEARGSLALDCAPLLRLLGPAPGVSWTAGSPAPAEARTLSRVLKGGSVRKLRRAKQLVLELGEEAILEGCVGPPGEAAVGLLQFNLSELFSWWIRQGEGRLRIRLMPEKKASEVGREGRLSAAIRASQPRLLFQIFGTGHSSLESPTNMPSPSPDYFTWNLTWIMKDSFPFLSHRSRYGLECSFDFPCELEYSPPLHDLRNQSWSWRRIPSEEASQMDLLDGPGAERSKEMPRGSFLLLNTSADSKHTILSPWMRSSSEHCTLAVSVHRHLQPSGRYIAQLLPHNEAAREILLMPTPGKHGWTVLQGRIGRPDNPFRVALEYISSGNRSLSAVDFFALKNCSEGTSPGSKMALQSSFTCWNGTVLQLGQACDFHQDCAQGEDESQMCRKLPVGFYCNFEDGFCGWTQGTLSPHTPQWQVRTLKDARFQDHQDHALLLSTTDVPASESATVTSATFPAPIKSSPCELRMSWLIRGVLRGNVSLVLVENKTGKEQGRMVWHVAAYEGLSLWQWMVLPLLDVSDRFWLQMVAWWGQGSRAIVAFDNISISLDCYLTISGEDKILQNTAPKSRNLFERNPNKELKPGENSPRQTPIFDPTVHWLFTTCGASGPHGPTQAQCNNAYQNSNLSVEVGSEGPLKGIQIWKVPATDTYSISGYGAAGGKGGKNTMMRSHGVSVLGIFNLEKDDMLYILVGQQGEDACPSTNQLIQKVCIGENNVIEEEIRVNRSVHEWAGGGGGGGGATYVFKMKDGVPVPLIIAAGGGGRAYGAKTDTFHPERLENNSSVLGLNGNSGAAGGGGGWNDNTSLLWAGKSLQEGATGGHSCPQAMKKWGWETRGGFGGGGGGCSSGGGGGGYIGGNAASNNDPEMDGEDGVSFISPLGILYTPALKVMEGHGEVNIKHYLNCSHCEVDECHMDPESHKVICFCDHGTVLAEDGVSCIVSPTPEPHLPLSLILSVVTSALVAALVLAFSGIMIVYRRKHQELQAMQMELQSPEYKLSKLRTSTIMTDYNPNYCFAGKTSSISDLKEVPRKNITLIRGLGHGAFGEVYEGQVSGMPNDPSPLQVAVKTLPEVCSEQDELDFLMEALIISKFNHQNIVRCIGVSLQSLPRFILLELMAGGDLKSFLRETRPRPSQPSSLAMLDLLHVARDIACGCQYLEENHFIHRDIAARNCLLTCPGPGRVAKIGDFGMARDIYRASYYRKGGCAMLPVKWMPPEAFMEGIFTSKTDTWSFGVLLWEIFSLGYMPYPSKSNQEVLEFVTSGGRMDPPKNCPGPVYRIMTQCWQHQPEDRPNFAIILERIEYCTQDPDVINTALPIEYGPLVEEEEKVPVRPKDPEGVPPLLVSQQAKREEERSPAAPPPLPTTSSGKAAKKPTAAEISVRVPRGPAVEGGHVNMAFSQSNPPSELHKVHGSRNKPTSLWNPTYGSWFTEKPTKKNNPIAKKEPHDRGNLGLEGSCTVPPNVATGRLPGASLLLEPSSLTANMKEVPLFRLRHFPCGNVNYGYQQQGLPLEAATAPGAGHYEDTILKSKNSMNQPGP

SEQ ID NO: 144935 - protein, 450 aa, Artificial Sequence
  derived and/or modified sequence
MGAIGLLWLLPLLLSTAAVGSGMGTGQRAGSPAAGPPLQPREPLSYSRLQRKSLAVDFVVPSLFRVYARDLLLPPSSSELKAGRPEARGSLALDCAPLLRLLGPAPGVSWTAGSPAPAEARTLSRVLKGGSVRKLRRAKQLVLELGEEAILEGCVGPPGEAAVGLLQFNLSELFSWWIRQGEGRLRIRLMPEKKASEVGREGRLSAAIRASQPRLLFQIFGTGHSSLESPTNMPSPSPDYFTWNLTWIMKDSFPFLSHRSRYGKERSPAAPPPLPTTSSGKAAKKPTAAEISVRVPRGPAVEGGHVNMAFSQSNPPSELHKVHGSRNKPTSLWNPTYGSWFTEKPTKKNNPIAKKEPHDRGNLGLEGSCTVPPNVATGRLPGASLLLEPSSLTANMKEVPLFRLRHFPCGNVNYGYQQQGLPLEAATAPGAGHYEDTILKSKNSMNQPGP

SEQ ID NO: 144936 - DNA, 4863 bp, Artificial Sequence
  derived and/or modified sequence
atgggggccatcgggttgttgtggttactgccacttctcctgagcaccgccgcagtcgggtccggcatggggacaggacagcgcgccggcagtccggcagcaggcccacccctccagcccagagagccgttaagctacagtcggctgcagcgtaagagtctggctgtcgatttcgttgtcccttctttgttcagggtctacgctagggatttgcttcttcccccttctagtagcgaactgaaagctgggcgtcccgaggcaagaggctccctggcattggattgtgccccactactaaggttacttggccctgcaccaggagtaagctggaccgccggtagtccagcacctgctgaggccaggacactgagccgggtactgaaagggggcagtgtaagaaagttgaggcgagccaaacagctggtcctggaactcggcgaggaagctatcctggaggggtgcgttgggccacccggggaggccgccgtgggacttcttcagtttaatctctccgagctatttagttggtggatccggcagggcgaaggccgactgcggatccgtctgatgccagagaaaaaagcgagcgaagtgggaagagaagggcggctctccgctgctatccgggcctcccaaccacggctgctctttcagattttcgggaccgggcattccagcctggagagtcctacgaatatgccttcaccgtcccctgattactttacatggaatctgacatggattatgaaggatagcttcccctttctgtctcaccggtcgcgatatgggttagaatgtagtttcgacttcccatgtgagctggaatactctccgccactccatgatttgagaaatcaatcatggtcttggcgccggatacctagcgaggaggcatcgcagatggacttgctagatggcccaggcgcggagcgaagtaaggagatgcctcgtgggtccttccttctgttaaatacttccgcagattccaaacatactatcctctctccctggatgcgtagcagctctgagcattgcactctcgctgtcagcgtgcatcgccacttgcagccctccgggcgctacatcgcccagctcctgccacacaatgaggcagcgcgggaaatcctgctgatgccaacacccggcaaacacggttggacagtgctgcagggtagaattggcagacctgataaccctttccgggtagcactggaatacatatcctcagggaacagatctcttagcgctgtggactttttcgctcttaaaaactgttcagaaggtacctcaccaggttctaagatggcactccagtcctctttcacatgctggaacggaaccgtacttcagctgggccaggcttgtgacttccaccaagattgtgcccaaggggaagacgaatcgcaaatgtgccgcaagctgccagtgggcttctactgcaacttcgaggacggattttgcggatggacacaaggaaccctttcgccgcatacgcctcagtggcaggttcgcacgctcaaagatgctcgattccaggatcaccaggaccacgccctgctgctctctacaacggatgttcctgcatccgagtcagccacagtgacttccgctacttttcctgcacccataaaaagctcgccctgtgagctgcgaatgagctggttaatccggggggtactgagggggaacgtgagcctggtgctcgtggaaaataaaacaggaaaggagcaggggaggatggtgtggcacgtggctgcctatgagggcttgtccctgtggcagtggatggtgttacccctactggacgttagtgaccgattttggctccagatggtggcttggtggggccaggggagtcgcgccattgtggcgttcgacaacatttccatatccctcgactgttatctgactatctctggagaagacaagattctgcaaaacactgctccaaagagccgtaatctgtttgagagaaaccctaacaaagaactgaagcccggagaaaattcccccaggcagacacccattttcgaccctaccgttcactggctctttactacttgcggtgcaagcgggccgcacggccctacacaagcacagtgcaacaacgcttatcagaattctaatttatcggtcgaggtgggatctgaaggaccattgaagggcatacagatctggaaagttcctgcaaccgacacatacagcatcagcggatacggtgctgccggaggaaagggaggcaaaaatacaatgatgagatcacatggcgtcagcgtactaggcatctttaatctggaaaaggatgacatgctttatatcctggtgggtcagcaaggagaggatgcctgtccctcaactaaccagctgattcaaaaggtttgtattggagagaataatgtgatcgaggaggagattcgtgtcaatcggagtgtgcacgaatgggccgggggggggggcggagggggcggcgccacatacgtgtttaagatgaaggacggagtgccagttcctctcatcatagcagccggggggggaggccgggcttacggcgcaaaaacagatacctttcaccctgaacgcctggagaataatagcagcgtgctcggactgaatgggaatagcggcgctgctggtggtggtggtggttggaatgataacaccagtcttctctgggccggaaaaagtctgcaagaaggcgcaaccggcggccatagttgccctcaggctatgaagaagtgggggtgggaaactcggggcggttttggtggcggtgggggcgggtgctcttctggcgggggcggggggggctatataggaggaaatgcagctagtaacaacgacccagagatggacggggaggatggcgtctcgttcatctctcctctggggatcctctacacccctgccctgaaggtgatggaaggacacggggaggtgaacataaagcattacctgaattgctctcactgcgaggtcgacgaatgtcacatggaccctgagagccacaaagttatttgcttctgcgaccacgggactgtgctcgccgaagacggggtttcttgcatcgtttcacccaccccagagccgcacctgcctctctccctgattctctccgtggtgacatcggccctggtcgcggccctggtgctcgctttctcaggcatcatgatagtgtatcgccggaaacaccaggaactgcaggctatgcaaatggaattgcagagccctgagtacaagctgtcaaaactgagaacaagtacgattatgacggactataaccccaattattgcttcgcggggaaaacgtcaagtatcagtgacttgaaggaagtcccccgcaagaatataacactcatcagggggcttggccacggtgcctttggggaggtttacgaaggccaggtttcagggatgccgaatgatccatcccccctccaggttgcggtgaaaacattgcccgaggtgtgcagtgagcaggacgaattggacttcctgatggaagccctgatcatttcaaagtttaaccaccagaatatagtgagatgtatcggagtctctctacagagcctcccacgctttatcctactcgaactcatggccgggggcgacctcaagtcatttttaagagagactcggccaaggcccagccagcccagctccctagctatgctggatttgttgcacgtcgctcgggacatcgcgtgcggttgtcagtacctggaggagaatcattttatccatcgagatatagccgcacgaaactgtttgttgacctgtcccgggcccggccgggtcgcgaagatcggggactttgggatggcgcgggacatctaccgggcatcctattacaggaaagggggctgtgctatgctacctgttaagtggatgccccctgaagccttcatggaaggaatcttcacaagcaaaaccgatacatggtcttttggcgtgctgttatgggagatatttagcctcggttatatgccatacccatcgaagtccaaccaagaagtgctggaatttgtgacaagtggcggacgtatggatccaccaaagaactgtccggggcccgtataccggatcatgacacagtgctggcagcaccagcctgaagataggcctaacttcgcaatcatactagagcgaattgagtattgcactcaggaccctgacgtcattaacactgccctgcctattgaatatgggccattggttgaagaggaggagaaggtacccgttcggccaaaggacccagagggagtccctcccttgttagtctcccagcaagccaaacgggaggaggaacgttcccctgccgctccccctcctcttccaacaacgtcctctggaaaggccgccaagaagcccactgccgctgagatttccgtgcgggttccaagaggccctgccgtggaggggggacatgtaaacatggctttcagtcaatcgaaccccccatccgagctgcacaaagtccacggctcgcggaataagcccacttccctatggaatcccacctacggcagctggtttaccgagaagcccacaaaaaaaaacaatcccatcgctaaaaaggagcctcacgaccggggcaatctggggttagagggatcctgcaccgtgccccccaatgtcgccaccgggagacttcccggtgcctcactgctccttgagcctagcagcctcacagcaaacatgaaggaggtccccttgttccgcctccggcacttcccgtgcggaaatgtgaattatggataccagcagcagggcctgccactggaagcagctaccgcacccggtgcaggccattatgaggacacgatacttaagtccaagaatagcatgaaccaacccggcccgtag

SEQ ID NO: 144937 - DNA, 1353 bp, Artificial Sequence
  derived and/or modified sequence
atgggcgcaattggactactgtggcttctaccactcctgctgagcacagcagcagtgggttccggtatgggtacgggacagcgggctggtagtccagccgctggacctcctctgcaacctcgggaacctctgagctactctcgcctccaacgtaaaagtttagcggtggactttgtggttccttctctgtttcgggtgtatgcacgagatttactgctacccccgtcaagttcggagttgaaagccgggagaccggaagcccgtggctctttggcgctggactgcgcacccctgctgcgattattgggacccgcacctggagttagttggacggccggaagccctgctccagcagaagcgaggactctttctagagtgctgaagggtggatcggtgcggaagctcaggcgggctaagcagctggtgctcgaactcggtgaggaggcaatcctagagggctgcgtggggccacctggagaggcggccgtggggttactgcagttcaacctatcagagctgttctcttggtggatccgacagggtgaaggacgtcttagaatccggcttatgccggaaaagaaggcgtccgaagttggtagagagggcagactgtcggccgccatcagagcctctcaaccaagacttctcttccagatttttgggactgggcactcctcactggaatctcccactaatatgcctagcccttctcccgattattttacttggaatttgacttggatcatgaaggacagctttcctttcttatctcataggtccagatatggcaaggagaggtctcccgcggcaccaccccctctcccaactactagttcggggaaagccgctaaaaagccgacagctgccgagattagcgtccgcgtgccacgaggaccagctgtcgagggtggccacgtgaatatggcctttagtcagtcaaatccaccatccgaacttcataaagtgcatggatcccggaacaaacctacctccctgtggaaccccacatacggctcatggttcacagagaagccgacaaagaagaacaacccaatagccaaaaaggagcctcatgaccgaggaaaccttgggctggagggaagttgtacagtcccaccgaacgtcgcgaccggcagactaccaggcgcttccctgctgcttgaaccatcaagcctcactgccaatatgaaggaggttccactatttagattgagacatttcccttgcggcaacgtgaattacggataccagcaacagggattgccgctggaagctgccactgctccaggagccggacattacgaggacaccattctgaagagtaaaaactccatgaatcagccaggaccctag

SEQ ID NO: 144938 - DNA, 4863 bp, Artificial Sequence
  derived and/or modified sequence
atgggcgccatcggcctgctgtggctgctgcccctgctgctgagcacagctgctgtgggcagcggcatgggcaccggccagagagctggcagccctgctgctggcccccccctgcagccccgggagcccctgagctacagccggctgcagaggaagagcctggccgtggactttgtggtgcccagcctcttccgggtgtatgcccgggacctgctgctgccccccagcagcagcgagctgaaggccggccggcctgaggcccggggcagcctggccctggactgtgcccccctgctgcggctgctgggccctgcccctggggtgtcctggacagctggcagccctgccccagctgaggcccggaccctgagccgggtgctgaagggcggctctgtgaggaagctgcggcgggccaagcagctggtgctggagctgggggaggaggccatcctggagggctgtgtgggccccccaggagaggccgctgtgggcctgctgcagttcaacctgtctgagctgttctcctggtggatccggcagggcgagggccgcctgcgcatccggctgatgcctgagaagaaggccagcgaggtgggccgggagggccgcctgtctgctgccatccgggccagccagccccggctgctcttccagatcttcggcaccggccacagcagcctggagagccccaccaacatgcccagccccagcccagactacttcacctggaacctgacctggatcatgaaggacagcttccccttcctgagccacaggagccgctatggcctggagtgcagctttgacttcccctgtgagctggagtacagcccccccctgcatgacctgaggaaccagagctggagctggaggcgcatccccagcgaggaggccagccagatggacctgctggatggccctggagctgagaggagcaaggagatgccccggggcagcttcctgctgctgaacaccagcgctgacagcaagcacaccatcctgagcccctggatgaggagcagcagcgagcactgcaccctggccgtgtctgtgcaccgccacctgcagcccagcggccgctacatcgcccagctgctgccccacaatgaagctgcccgggagatcctgctgatgcccaccccaggcaagcacggctggacagtgctgcagggcagaattggccgcccagacaaccccttccgggtggccctggagtacatcagcagcggcaacagaagcctgtctgctgtggacttctttgccctgaagaactgcagcgagggcaccagccctggcagcaagatggccctgcagagcagcttcacctgctggaatggaacagtgctgcagctgggccaggcctgtgacttccaccaggactgtgcccagggagaagatgagagccagatgtgcaggaagctgcctgtgggcttctactgcaactttgaagatggcttctgtggctggacccagggcaccctgagcccccacaccccccagtggcaggtgaggaccctgaaggatgcccgcttccaggaccaccaggaccacgccctgctgctgagcaccacagatgtgcctgccagcgagagcgccaccgtgaccagcgccaccttccctgcccccatcaagagcagcccctgtgagctgaggatgtcctggctgatccggggcgtgctgcggggaaatgtgtccctggtgctggtggagaacaagacaggcaaggagcagggccgcatggtgtggcacgtggccgcctatgagggcctgagcctgtggcagtggatggtgctgcccctgctggatgtgtctgaccgcttctggctgcagatggtggcctggtggggccagggcagccgggccatcgtggcctttgacaacatcagcatcagcctggactgctacctgaccatctctggagaggacaagatcctgcagaacacagcccccaagagcaggaacctgtttgagaggaaccccaacaaggagctgaagccaggagagaacagcccccggcagacccccatctttgaccccaccgtgcactggctgttcaccacctgtggggccagcggcccccacggccccacccaggcccagtgcaacaatgcctaccagaacagcaacctgtctgtggaggtgggcagcgagggccccctgaagggcatccagatctggaaggtgcctgccacagacacctacagcatcagcggctatggagctgctgggggcaaaggaggcaagaacaccatgatgaggagccatggagtgtctgtgctgggcatcttcaacctggagaaggatgacatgctgtacatcctggtgggccagcagggagaagatgcctgccccagcaccaaccagctgatccagaaggtgtgcattggagaaaataatgtgattgaggaggagatccgggtgaacagatctgtgcatgagtgggccggcggcggcggcggcggcggcggggccacctacgtgttcaagatgaaggatggagtgcctgtgcccctcatcatcgccgccggcggcggcggccgggcctatggagccaagacagacaccttccaccctgagcggctggagaacaacagctctgtgctgggcctgaatggaaacagcggggctgctgggggcggcggcggctggaatgacaacaccagcctgctgtgggccggcaagagcctgcaggagggcgccactggaggccacagctgcccccaggccatgaagaagtggggctgggagacccggggcggctttggaggcggcggcggcggctgcagcagcggcggcggcggcggcggctacatcggcggcaatgctgccagcaacaatgaccctgagatggatggagaagatggagtgtccttcatcagccccctgggcatcctgtacaccccagccctgaaggtgatggagggccacggggaggtgaacatcaagcactacctgaactgcagccactgtgaggtggatgagtgccacatggaccctgagagccacaaggtgatctgcttctgtgaccacggcaccgtgctggccgaggatggagtgtcctgcatcgtgagccccaccccagagccccacctgcccctgagcctcatcctgtctgtggtgaccagcgccctggtggccgccctggtgctggccttcagcggcatcatgattgtgtacagaaggaagcaccaggagctgcaggccatgcagatggagctgcagagccctgagtacaagctgagcaagctgcggaccagcaccatcatgacagactacaaccccaactactgctttgctgggaagaccagcagcatcagtgacctgaaggaggtgcccaggaagaacatcaccctcatccggggcctgggccacggggcctttggagaggtgtatgagggccaggtgtctggcatgcccaatgaccccagccccctgcaggtggccgtgaagaccctgcctgaggtgtgcagcgagcaggatgagctggacttcctgatggaggccctgatcatcagcaagttcaaccaccagaacatcgtgcgctgcattggagtgtccctgcagagcctgccccgcttcatcctgctggagctgatggccggcggggacctgaagagcttcctgcgggagacccggccccggcccagccagcccagcagcctggccatgctggacctgctgcacgtggcccgggacatcgcctgtggctgccagtacctggaggagaaccacttcatccaccgggacattgctgccaggaactgcctgctgacctgccccggccctggccgggtggccaagatcggggactttggcatggcccgggacatctaccgggccagctactacagaaaaggaggctgtgccatgctgcctgtgaagtggatgcctcctgaggccttcatggagggcatcttcaccagcaagacagacacctggagctttggagtgctgctgtgggagatcttcagcctgggctacatgccctaccccagcaagagcaaccaggaggtgctggagtttgtgaccagcggcggccgcatggacccccccaagaactgccccggccctgtgtaccgcatcatgacccagtgctggcagcaccagccagaagatcggcccaactttgccatcatcctggagagaattgagtactgcacccaggaccctgatgtgatcaacacagccctgcccattgaatatggccccctggtggaggaggaggagaaggtgcctgtgcggcccaaggaccctgagggcgtgccccccctgctggtgtcccagcaggccaagcgggaggaggagaggagccctgctgcccccccacccctgcccaccaccagcagcggcaaggccgccaagaagcccacagctgctgagatctctgtgcgggtgccccggggccctgctgtggagggcggccacgtgaacatggccttcagccagagcaaccccccatctgagctgcacaaggtgcacggcagcaggaacaagcccaccagcctgtggaaccccacctacggctcctggttcacagagaagcccaccaagaagaacaaccccatcgccaagaaggagccccatgaccggggcaacctgggcctggagggcagctgcaccgtgccccccaacgtggccaccggccgcctgcccggggccagcctgctgctggagcccagcagcctgacagccaacatgaaggaggtgcccctcttccggctgcggcacttcccctgtggaaatgtgaactacggctaccagcagcagggcctgcccctggaggccgccacagcccctggagctggccactatgaggacaccatcctgaagagcaagaacagcatgaaccagcccggcccctag

SEQ ID NO: 144939 - DNA, 1353 bp, Artificial Sequence
  derived and/or modified sequence
atgggcgccatcggcctgctgtggctgctgcccctgctgctgagcacagctgctgtgggcagcggcatgggcaccggccagagagctggcagccctgctgctggcccccccctgcagccccgggagcccctgagctacagccggctgcagaggaagagcctggccgtggactttgtggtgcccagcctcttccgggtgtatgcccgggacctgctgctgccccccagcagcagcgagctgaaggccggccggcctgaggcccggggcagcctggccctggactgtgcccccctgctgcggctgctgggccctgcccctggggtgtcctggacagctggcagccctgccccagctgaggcccggaccctgagccgggtgctgaagggcggctctgtgaggaagctgcggcgggccaagcagctggtgctggagctgggggaggaggccatcctggagggctgtgtgggccccccaggagaggccgctgtgggcctgctgcagttcaacctgtctgagctgttctcctggtggatccggcagggcgagggccgcctgcgcatccggctgatgcctgagaagaaggccagcgaggtgggccgggagggccgcctgtctgctgccatccgggccagccagccccggctgctcttccagatcttcggcaccggccacagcagcctggagagccccaccaacatgcccagccccagcccagactacttcacctggaacctgacctggatcatgaaggacagcttccccttcctgagccacaggagccgctatggcaaggagaggagccctgctgcccccccacccctgcccaccaccagcagcggcaaggccgccaagaagcccacagctgctgagatctctgtgcgggtgccccggggccctgctgtggagggcggccacgtgaacatggccttcagccagagcaaccccccatctgagctgcacaaggtgcacggcagcaggaacaagcccaccagcctgtggaaccccacctacggctcctggttcacagagaagcccaccaagaagaacaaccccatcgccaagaaggagccccatgaccggggcaacctgggcctggagggcagctgcaccgtgccccccaacgtggccaccggccgcctgcccggggccagcctgctgctggagcccagcagcctgacagccaacatgaaggaggtgcccctcttccggctgcggcacttcccctgtggaaatgtgaactacggctaccagcagcagggcctgcccctggaggccgccacagcccctggagctggccactatgaggacaccatcctgaagagcaagaacagcatgaaccagcccggcccctag

SEQ ID NO: 144940 - DNA, 4863 bp, Artificial Sequence
  derived and/or modified sequence
atgggcgccatcggcctgctgtggctgctgcccctgctgctgagcacagcagctgtaggctctggaatggggactggacagagagctggatctcccgcagccgggccacccctgcaacctcgcgaacctctctcttatagtaggctgcaaagaaagagcttggctgtcgacttcgtagtaccttcactatttcgcgtgtacgcacgggacctcctcctccctccaagctcttctgagctcaaagccggacgccccgaggccagaggttcactggctttggattgcgcgcctctcctacgcctgcttggcccagctcccggcgtgtcctggactgcagggtctccagcccccgccgaggccaggaccctatcacgggttctgaagggcgggtccgtccgcaagctccgccgggccaagcaactggttcttgagctgggcgaagaagctattttagagggttgtgtgggcccaccaggcgaggcagctgtgggacttttacaattcaatttaagcgagctgttctcttggtggatccggcaaggagaaggcaggttgaggattcggctgatgcctgagaagaaggcctcagaggtggggcgagagggcaggctgtcggcagcgataagggcctcccaaccccggttgctgttccagatatttggtacagggcactcgagtctggaaagtccgactaacatgccctctccctcccccgattacttcacctggaacctcacttggatcatgaaagactccttccctttcttgagccatcgaagtcggtacggactggagtgttcattcgacttcccttgtgagctggagtactccccccctctccacgatctgagaaatcagagctggagttggcggcgtattccaagcgaagaagccagtcaaatggatctattagacggccctggggcggaaagatcaaaagagatgccgcgcggttctttcctactgctcaatactagcgcggacagcaagcacactatcctgtccccatggatgaggtcctcttcagaacactgcacactggccgtgagtgtccatcgtcacttgcagccatcgggaagatatattgcccagctgctcccccacaatgaagcagcccgtgagattctgttaatgccaactcccgggaaacatggttggacagtgctgcagggacggataggcagacccgataaccccttcagagtggcgctggagtatatttcctctggcaacaggtccttgagcgctgtggacttcttcgcgctgaaaaactgtagcgaaggtacctccccaggaagtaaaatggctctgcagtcgtcttttacctgttggaacggcaccgtgctccagttaggccaagcatgcgactttcatcaggactgtgcccagggcgaggatgaaagccagatgtgtaggaagttaccagtcggattttactgcaacttcgaagacggcttttgtggctggacacagggcaccctgagtccgcacacaccccagtggcaagtgcgaacactaaaggatgcacgatttcaggaccaccaagatcacgcattgttgttgtcaacaacagatgtacctgctagcgaatccgccactgtcacgagtgccacatttccagccccaattaaaagcagcccctgcgaactgagaatgagttggctgatcaggggagtcctcaggggcaatgtgtcattggttctcgtcgaaaataaaactggcaaggaacaaggacgaatggtttggcacgttgcagcgtacgaagggctgtctctctggcagtggatggtgctgccactgctcgatgtctctgaccgtttttggctccagatggtggcttggtggggccagggcagcagagccattgtcgcctttgacaatatttccattagcctcgactgttaccttactatcagtggagaagataagatactgcagaacaccgcacctaagtcccgcaatctatttgagagaaatcccaacaaggaacttaagccaggtgaaaatagtccgcgacagacaccgatcttcgacccaactgtccactggctatttaccacgtgtggcgcctccggcccccatggaccgacccaggctcaatgcaacaacgcataccagaattccaatttgtctgtggaggtgggttccgagggcccattaaagggaattcagatttggaaggtgcctgcgaccgatacatattctattagcggttacggagccgcgggcggcaaagggggaaaaaacaccatgatgcgcagccacggagtctctgtcctggggatatttaacttagaaaaagatgacatgctttatatactcgtgggacagcagggtgaggatgcatgccccagtactaatcagcttatacagaaggtgtgcatcggtgaaaacaacgtcatcgaggaggaaattcgcgtcaataggtcggtccatgaatgggcggggggcggtggaggcggaggcggggccacatacgtgtttaagatgaaagatggggtgcctgtcccgcttattatagcagccgggggaggtgggcgggcgtatggcgccaaaacggacaccttccatcccgaacgactggagaacaatagttccgtgcttggacttaacggtaactcaggcgctgcaggtgggggcggagggtggaatgacaatacaagtctgctctgggctgggaagtccctgcaagagggggcaacgggaggtcactcgtgtcctcaggccatgaagaagtggggatgggaaactcgtggcggcttcggtggcggcggcggcggctgcagttcaggtggcggtggtggtggttatatcgggggaaacgccgcttcaaacaatgaccccgaaatggacggagaggatggggtctcctttatctcacctctgggtatcctgtacaccccagcattgaaggtgatggagggccacggtgaggttaacatcaagcactatctgaactgtagccactgtgaggtcgatgagtgccacatggatcccgagagccacaaggtgatttgcttctgtgatcatggtaccgtgttggccgaggatggagtgtcttgtatagtaagccccacgcccgaaccgcatctgccactgagtctgattctctccgtggtaacctcggctctggtcgccgccctcgtgttggctttctccgggataatgattgtgtatcggcgtaaacaccaagaattgcaagcaatgcaaatggagttgcagtcgcccgagtacaaattaagtaaactgcgtacttcgaccattatgacagattacaatcccaactactgcttcgcagggaagaccagcagtatttctgaccttaaggaggtccctcgtaagaacattacactcatcaggggcctgggtcacggtgcctttggtgaggtgtacgaaggacaggtgagtggaatgcctaatgacccgtcacccctgcaggttgctgtcaaaacccttcccgaggtctgttctgagcaggatgagctggattttctcatggaagcattgataatcagcaagtttaaccatcagaacatcgtaagatgcattggagttagtcttcagagcctccctcgcttcatcctcctggaactaatggcagggggggaccttaagtctttcttaagggagacccggcctagaccgagccagccatcctcgctcgccatgctagatctgttacacgtagcaagagatattgcctgtgggtgtcagtacttggaggagaaccacttcatccatcgcgacatcgccgccagaaactgcctgttaacgtgtccgggacctggacgggttgccaaaattggcgacttcgggatggcgcgcgacatctatcgcgcctcttactatcgtaagggcggttgcgctatgctaccagttaaatggatgccacctgaggcattcatggagggcatcttcacaagtaaaacagacacctggtcctttggtgttctgctatgggagattttttccctgggctatatgccatacccctcaaagagcaatcaggaagttctggaatttgtgaccagcggtgggagaatggatccacccaagaattgcccaggacccgtgtatcggatcatgacccaatgctggcagcatcagccagaggaccgcccgaacttcgctatcattcttgaacgcatcgaatattgtacacaggaccctgacgtgataaatacagctctgcctattgagtatgggcctttagtggaagaagaagagaaggtcccggtacgccctaaggaccccgaaggggtgcccccactgctggtgtcacagcaggccaaacgggaggaggagagaagtcccgccgctccaccccctcttcctaccacatccagcggcaaagctgccaagaagccaacggcagccgaaatcagcgtgcgggtccctcgcggtccagccgtcgagggaggtcacgttaacatggccttcagccaatccaatcccccatctgaactgcataaggtccatggatcccgaaataaacctacgtctctgtggaacccaacctatggatcctggtttacagaaaagccaaccaagaaaaacaatcccatagcaaaaaaagagccgcacgaccgggggaatttaggactggaaggctcctgcactgtgccacctaacgtcgccactgggaggcttccaggtgcaagcctcttgttagagccttctagtttgacagccaacatgaaagaggttcctctcttccggctgcggcatttcccgtgtggaaacgtgaactatggttatcagcaacagggtctgcccctggaggccgctacagcgccaggggctggacactacgaggacacaattctcaaatctaagaactctatgaaccaaccaggcccttag

SEQ ID NO: 144941 - DNA, 1353 bp, Artificial Sequence
  derived and/or modified sequence
atgggcgccatcggcctgctgtggctgctgcccctgctgctgagcacagccgctgttggcagcggcatgggaacagggcagcgggctggcagtcctgctgccggccctccgttgcagccgcgcgagccacttagttattctaggctacaaaggaagtcactggcagtcgacttcgtggttccttccttattccgagtctacgcacgcgatcttcttctgccaccatcctctagtgagctgaaggcggggagacccgaagcgagaggcagcctggctctcgactgtgctccgctcctgaggttgctgggccccgctccaggggtatcatggaccgccgggagccctgcacctgcggaagcacgaaccctctcacgggtcctcaaaggtggtagcgttcgaaagctgaggcgcgccaaacagctcgtcctagaactcggagaggaagccatactggagggctgtgtcggaccgcccggggaggccgctgtggggctgcttcagttcaatctttcggagctgttttcttggtggattaggcaaggggaggggaggcttcgaatccgactgatgcctgaaaaaaaagcttctgaggtaggcagggaaggcaggttgagcgctgccatcagggcatcccaaccgcggctgttatttcagatttttggaacgggccactccagcctggagagccccacgaatatgccgtccccttcgcctgattattttacttggaatctgacgtggattatgaaggacagcttcccgttcctgtctcacagaagtcgctatggcaaggagcggtctccagccgcccctccaccgctgccaactaccagcagcgggaaagctgcaaagaagcccacggccgctgagatatctgtgagagttccccgcggaccggccgtggagggagggcacgtgaacatggcttttagccagagcaatccaccatctgagctccataaggtccatggaagccgcaataagcccacgtccctctggaacccaacatacgggtcatggtttactgagaagcccaccaagaagaacaatcctatcgccaaaaaggagcctcacgaccgtggcaacctgggcctggaaggtagctgcactgtaccgccaaacgtcgccactggacggcttcccggggccagcttactgttggagccatctagtctcacggctaatatgaaagaagttcctcttttccgcctgaggcactttccctgtggaaatgtgaactacggctaccagcagcaagggctgccattggaagcagcgactgcacctggggcgggacactacgaggatacgatcctgaagtcaaagaactcgatgaatcaacccgggccgtag

SEQ ID NO: 144942 - DNA, 4863 bp, Artificial Sequence
  derived and/or modified sequence
atgggtgctattggtctgctgtggctgctgcctttattattgtccacggcagccgtcggatctggaatgggcacaggacagcgtgccggtagtcccgcagctggcccacctctgcagccacgtgaacctctgagctacagtaggttgcagcgaaaaagtctggccgtcgactttgtcgtaccgagcctgttccgggtttacgccagagacctgttgctgcccccatcttcctctgagctgaaggctggacggcctgaggctcgagggtctcttgccctagactgcgccccactgctgaggttgctggggcctgctcccggtgtgtcctggactgccggatcccctgcgcctgctgaggcacgcacattgagcagagtgctcaaggggggttctgtgagaaagcttaggcgggcaaaacagctggtactggagctgggtgaggaagccattcttgaggggtgtgtcggcccacccggtgaagctgcagtgggactgcttcagtttaacctgtctgagctttttagttggtggatccgtcagggcgaggggcgtcttagaatcagactgatgcccgaaaaaaaagccagcgaagtggggagggagggcagactctcagccgcaattagggcgtcacagccacgactgctgttccagatttttggcaccggacattctagtttggagagcccaactaatatgccgagcccctctccagactatttcacttggaatctgacttggataatgaaggacagcttcccattcttgtctcaccgcagcaggtatggtctcgaatgtagctttgatttcccatgtgaactcgagtattctcctcctcttcacgatctgaggaaccaatcctggagttggaggcgcatcccttcagaagaggcatcccagatggatctgctcgacggcccaggagcagaaagaagcaaggagatgccgagaggatccttcctgctgctaaacacttctgctgatagtaagcatactattctttctccttggatgcgctcttcaagcgagcattgcacactggccgtgtctgtacatcggcatctccagccaagcggccgatacatagcacagcttctaccacataatgaagcagcccgtgaaatcttgctaatgcccacacctgggaaacacggttggactgtgctgcaggggagaataggcagaccagacaatccttttcgcgtggcccttgagtatatcagcagcggcaaccggagcctttcggcggttgatttcttcgccctgaaaaactgttctgagggaacaagtcccggatccaagatggctctacagtcctcattcacatgttggaacggaaccgtgctccagctcggccaagcgtgtgacttccatcaggactgcgcccagggggaggacgaatctcagatgtgtcgaaaacttccagtgggcttttattgcaactttgaggacggtttctgcggctggacccaggggacacttagcccacataccccccagtggcaggttcgtaccttgaaggacgccaggttccaggatcaccaggaccatgccctcctgctatcgaccaccgatgtaccggctagcgagtctgctacggtgacaagtgcaacttttcccgcaccaatcaagagcagcccctgtgaacttcgcatgtcctggctgatccggggtgtgttaagggggaacgtgtctttggttctagtggaaaacaagaccggcaaagagcaaggaagaatggtctggcacgtcgctgcctatgagggcctttctctatggcaatggatggtgttgcccctgcttgatgtgtctgaccgcttctggctccagatggtcgcctggtgggggcagggatccagggccatagtggcattcgacaatataagcatctctttggattgctaccttacgattagtggagaggacaaaattcttcaaaacacagctcccaagagtaggaacttgtttgaaagaaaccctaacaaggagcttaagcccggtgagaactctcccagacagacaccgatattcgaccccaccgtccattggcttttcactacctgtggcgcatctggtccacatggcccaactcaggcacagtgtaacaatgcttatcagaatagtaacctgtctgtagaagtggggtcagaaggtcccctgaagggcatccagatctggaaggtgcccgcaaccgacacgtactcaatcagcggctatggagctgctgggggaaaaggaggaaaaaacaccatgatgcggtcccatggagtgagcgtgctaggtatcttcaatctggaaaaggatgatatgctctacatcttggtgggccagcagggtgaagatgcgtgtccatcaacgaaccagttgatccagaaagtgtgtatcggagaaaacaacgtcatcgaagaggagatccgggtgaaccgctctgttcacgaatgggctggcggaggtggagggggagggggtgccacctatgtatttaaaatgaaagacggagttccggtcccccttattatagcggcagggggtggcggtcgcgcttacggcgctaaaaccgatactttccaccctgagaggcttgagaacaacagctccgttctggggttgaatggtaattccggcgcagccggaggtgggggaggctggaatgacaacacctcactgctctgggctggtaagtcactgcaagagggcgctactggcggtcattcatgtccccaggctatgaaaaagtgggggtgggaaactagagggggttttggcggaggagggggaggctgcagtagcgggggtggcggagggggttatatcggtgggaacgcagcttccaacaatgatcctgagatggacggggaagacggggtgtcgttcatttccccattgggaattctgtatacccctgcgctcaaagtcatggaggggcacggcgaggtcaacatcaagcactatcttaattgtagccattgcgaggtcgacgagtgtcatatggaccctgaatctcataaggtaatttgtttctgtgatcatggcacagtgttagccgaagacggtgtgtcttgcatcgtgtccccaacaccagagcctcacttacctcttagtttaattctctctgtggtgacatcagctctggtggctgccctggtgcttgcattttcagggattatgatcgtctaccgcagaaaacaccaggagctgcaggctatgcagatggagcttcagtcccccgaatataaattgtctaaactgagaaccagcactataatgactgattacaatcctaactattgtttcgcaggtaagaccagtagcatttctgatcttaaagaggtgccaagaaaaaacattacactgatccgcggattgggccatggtgccttcggtgaggtgtatgagggccaagtgtctggtatgcccaacgatcccagcccactgcaggtagctgtaaagacattacctgaggtgtgcagcgaacaggacgaactggacttccttatggaggctctaatcatttctaaattcaaccatcagaatatcgtgcgttgtataggtgtgagtctgcagagccttcctcggttcattctccttgagctcatggcaggcggtgaccttaagtccttccttcgggaaactcgacctaggcccagccaaccttcatccctcgctatgctcgatctgctccacgtggccagggacatcgcctgcggctgtcagtaccttgaggaaaatcacttcatccatagggatatcgcagccagaaattgcttactgacgtgccccggtcctggaagagttgccaaaatcggcgattttggtatggcgagagatatttacagagcatcctattataggaaggggggatgcgcaatgttacccgtcaagtggatgcccccagaggcattcatggagggtatatttacgagcaagacggacacttggagtttcggcgttcttctctgggagatcttctcattggggtatatgccgtatccttccaaatccaatcaggaggttcttgagttcgtaacctccgggggtcgtatggaccccccaaagaattgccctggccctgtgtatagaatcatgacccagtgttggcaacatcagcccgaagaccgtccaaatttcgccatcatcttggagcgtatagagtactgcacccaggatcctgacgtgattaatacggccttacccattgagtatggtcctttggtcgaagaggaggagaaggtgccagtgcgacccaaggatcctgaaggcgtccccccattactggtgtctcagcaggcaaagcgagaggaagagaggtccccagccgctccaccccctttgccaacaacttcttctggaaaagccgctaaaaagccaacagcagccgaaattagcgtgagggtaccgagggggccagcagtcgaaggcggtcatgtaaatatggccttttctcagagcaatccccctagcgaactgcacaaggtgcacggctccagaaataagcccacaagcctttggaacccgacttatgggtcatggttcaccgagaaaccaactaaaaaaaataacccaattgccaagaaggaaccccacgataggggaaaccttgggcttgagggatcctgtacagtccctccaaacgttgcgactggcagactgcccggtgcaagccttctactggagccctcttcattaaccgcgaatatgaaggaggtgcccctgttccgtctcagacacttcccttgcggaaatgtgaattacggctatcagcaacagggccttccactggaagctgcaaccgcccctggagccggtcattacgaggacacaatcctgaaatccaagaatagcatgaaccaacccggtccatag

SEQ ID NO: 144943 - DNA, 1353 bp, Artificial Sequence
  derived and/or modified sequence
atgggtgccatcggtttgctctggctgcttcccctgttactgtccacagccgctgtggggtcagggatgggcaccgggcagcgtgctggcagccccgcagccggaccccctttacagcccagggagcctttatcttactcccggctccaacggaagtcattggcggtcgatttcgtcgtcccaagcctattccgggtctacgccagagatttactgcttccaccttctagcagtgagctcaaggcaggcaggcccgaagccagggggagtctggcactcgattgcgcacctctccttcgcctgctgggccctgccccaggagtgagttggactgctggcagcccagctcccgcagaagctaggactttgtcccgcgtgctcaaaggcggaagtgtgaggaaactcagacgcgctaaacaactagttctggagttgggcgaagaggccatcctggagggctgtgtcggaccacctggggaagcagctgtggggttgcttcagtttaatctgtctgaattgttttcctggtggatcagacagggtgagggcagattgcgcattcgcctcatgcccgaaaagaaggccagtgaagtgggccgagaaggcaggctttccgccgcaatcagggcatcacagcctaggcttctgttccaaatctttggaaccggacatagcagtctagaatcaccaaccaatatgccttcaccttctcctgattactttacctggaatctgacctggatcatgaaggacagcttcccgtttttaagtcacaggagcaggtatggtaaggaacggtcccctgcagcccctcctcctttgcctactacttcctcagggaaggcggctaagaaaccaacagccgctgagatttcggttagggtgcctcgaggtccagccgttgaaggtggtcatgtgaacatggcgttctcccagtcaaaccccccttccgaactgcacaaggtccacgggtccaggaacaagccaacatccttatggaatcctacctatggaagttggttcacagaaaaacccaccaaaaaaaataatcctatcgccaaaaaggagccgcatgaccggggaaatttaggtctggagggtagttgtactgtgccacccaacgttgccacaggcagattgcccggtgctagcctactgcttgaaccttcctcactcacggccaatatgaaggaagtccccctcttcagattgaggcactttccttgtggcaacgttaactatgggtaccagcaacaaggcctgcccctggaggccgctaccgccccaggcgcaggccattatgaggatacgattctgaagtctaaaaactcaatgaaccagcctgggccttag

SEQ ID NO: 144944 - DNA, 6220 bp, Artificial Sequence
  derived and/or modified sequence
gggggcggcagcggtggtagcagctggtacctcccgccgcctctgttcggagggtcgcggggcaccgaggtgctttccggccgccctctggtcggccacccaaagccgcgggcgctgatgatgggtgaggagggggcggcaagatttcgggcgcccctgccctgaacgccctcagctgctgccgccggggccgctccagtgcctgcgaactctgaggagccgaggcgccggtgagagcaaggacgctgcaaacttgcgcagcgcgggggctgggattcacgcccagaagttcagcaggcagacagtccgaagccttcccgcagcggagagatagcttgagggtgcgcaagacggcagcctccgccctcggttcccgcccagaccgggcagaagagcttggaggagccaaaaggaacgcaaaaggcggccaggacagcgtgcagcagctgggagccgccgttctcagccttaaaagttgcagagattggaggctgccccgagaggggacagaccccagctccgactgcggggggcaggagaggacggtacccaactgccacctcccttcaaccatagtagttcctctgtaccgagcgcagcgagctacagacgggggcgcggcactcggcgcggagagcgggaggctcaaggtcccagccagtgagcccagtgtgcttgagtgtctctggactcgcccctgagcttccaggtctgtttcatttagactcctgctcgcctccgtgcagttgggggaaagcaagagacttgcgcgcacgcacagtcctctggagatcaggtggaaggagccgctgggtaccaaggactgttcagagcctcttcccatctcggggagagcgaagggtgaggctgggcccggagagcagtgtaaacggcctcctccggcgggatgggagccatcgggctcctgtggctcctgccgctgctgctttccacggcagctgtgggctccgggatggggaccggccagcgcgcgggctccccagctgcggggccgccgctgcagccccgggagccactcagctactcgcgcctgcagaggaagagtctggcagttgacttcgtggtgccctcgctcttccgtgtctacgcccgggacctactgctgccaccatcctcctcggagctgaaggctggcaggcccgaggcccgcggctcgctagctctggactgcgccccgctgctcaggttgctggggccggcgccgggggtctcctggaccgccggttcaccagccccggcagaggcccggacgctgtccagggtgctgaagggcggctccgtgcgcaagctccggcgtgccaagcagttggtgctggagctgggcgaggaggcgatcttggagggttgcgtcgggccccccggggaggcggctgtggggctgctccagttcaatctcagcgagctgttcagttggtggattcgccaaggcgaagggcgactgaggatccgcctgatgcccgagaagaaggcgtcggaagtgggcagagagggaaggctgtccgcggcaattcgcgcctcccagccccgccttctcttccagatcttcgggactggtcatagctccttggaatcaccaacaaacatgccttctccttctcctgattattttacatggaatctcacctggataatgaaagactccttccctttcctgtctcatcgcagccgatatggtctggagtgcagctttgacttcccctgtgagctggagtattcccctccactgcatgacctcaggaaccagagctggtcctggcgccgcatcccctccgaggaggcctcccagatggacttgctggatgggcctggggcagagcgttctaaggagatgcccagaggctcctttctccttctcaacacctcagctgactccaagcacaccatcctgagtccgtggatgaggagcagcagtgagcactgcacactggccgtctcggtgcacaggcacctgcagccctctggaaggtacattgcccagctgctgccccacaacgaggctgcaagagagatcctcctgatgcccactccagggaagcatggttggacagtgctccagggaagaatcgggcgtccagacaacccatttcgagtggccctggaatacatctccagtggaaaccgcagcttgtctgcagtggacttctttgccctgaagaactgcagtgaaggaacatccccaggctccaagatggccctgcagagctccttcacttgttggaatgggacagtcctccagcttgggcaggcctgtgacttccaccaggactgtgcccagggagaagatgagagccagatgtgccggaaactgcctgtgggtttttactgcaactttgaagatggcttctgtggctggacccaaggcacactgtcaccccacactcctcaatggcaggtcaggaccctaaaggatgcccggttccaggaccaccaagaccatgctctattgctcagtaccactgatgtccccgcttctgaaagtgctacagtgaccagtgctacgtttcctgcaccgatcaagagctctccatgtgagctccgaatgtcctggctcattcgtggagtcttgaggggaaacgtgtccttggtgctagtggagaacaaaaccgggaaggagcaaggcaggatggtctggcatgtcgccgcctatgaaggcttgagcctgtggcagtggatggtgttgcctctcctcgatgtgtctgacaggttctggctgcagatggtcgcatggtggggacaaggatccagagccatcgtggcttttgacaatatctccatcagcctggactgctacctcaccattagcggagaggacaagatcctgcagaatacagcacccaaatcaagaaacctgtttgagagaaacccaaacaaggagctgaaacccggggaaaattcaccaagacagacccccatctttgaccctacagttcattggctgttcaccacatgtggggccagcgggccccatggccccacccaggcacagtgcaacaacgcctaccagaactccaacctgagcgtggaggtggggagcgagggccccctgaaaggcatccagatctggaaggtgccagccaccgacacctacagcatctcgggctacggagctgctggcgggaaaggcgggaagaacaccatgatgcggtcccacggcgtgtctgtgctgggcatcttcaacctggagaaggatgacatgctgtacatcctggttgggcagcagggagaggacgcctgccccagtacaaaccagttaatccagaaagtctgcattggagagaacaatgtgatagaagaagaaatccgtgtgaacagaagcgtgcatgagtgggcaggaggcggaggaggagggggtggagccacctacgtatttaagatgaaggatggagtgccggtgcccctgatcattgcagccggaggtggtggcagggcctacggggccaagacagacacgttccacccagagagactggagaataactcctcggttctagggctaaacggcaattccggagccgcaggtggtggaggtggctggaatgataacacttccttgctctgggccggaaaatctttgcaggagggtgccaccggaggacattcctgcccccaggccatgaagaagtgggggtgggagacaagagggggtttcggagggggtggaggggggtgctcctcaggtggaggaggcggaggatatataggcggcaatgcagcctcaaacaatgaccccgaaatggatggggaagatggggtttccttcatcagtccactgggcatcctgtacaccccagctttaaaagtgatggaaggccacggggaagtgaatattaagcattatctaaactgcagtcactgtgaggtagacgaatgtcacatggaccctgaaagccacaaggtcatctgcttctgtgaccacgggacggtgctggctgaggatggcgtctcctgcattgtgtcacccaccccggagccacacctgccactctcgctgatcctctctgtggtgacctctgccctcgtggccgccctggtcctggctttctccggcatcatgattgtgtaccgccggaagcaccaggagctgcaagccatgcagatggagctgcagagccctgagtacaagctgagcaagctccgcacctcgaccatcatgaccgactacaaccccaactactgctttgctggcaagacctcctccatcagtgacctgaaggaggtgccgcggaaaaacatcaccctcattcggggtctgggccatggcgcctttggggaggtgtatgaaggccaggtgtccggaatgcccaacgacccaagccccctgcaagtggctgtgaagacgctgcctgaagtgtgctctgaacaggacgaactggatttcctcatggaagccctgatcatcagcaaattcaaccaccagaacattgttcgctgcattggggtgagcctgcaatccctgccccggttcatcctgctggagctcatggcggggggagacctcaagtccttcctccgagagacccgccctcgcccgagccagccctcctccctggccatgctggaccttctgcacgtggctcgggacattgcctgtggctgtcagtatttggaggaaaaccacttcatccaccgagacattgctgccagaaactgcctcttgacctgtccaggccctggaagagtggccaagattggagacttcgggatggcccgagacatctacagggcgagctactatagaaagggaggctgtgccatgctgccagttaagtggatgcccccagaggccttcatggaaggaatattcacttctaaaacagacacatggtcctttggagtgctgctatgggaaatcttttctcttggatatatgccataccccagcaaaagcaaccaggaagttctggagtttgtcaccagtggaggccggatggacccacccaagaactgccctgggcctgtataccggataatgactcagtgctggcaacatcagcctgaagacaggcccaactttgccatcattttggagaggattgaatactgcacccaggacccggatgtaatcaacaccgctttgccgatagaatatggtccacttgtggaagaggaagagaaagtgcctgtgaggcccaaggaccctgagggggttcctcctctcctggtctctcaacaggcaaaacgggaggaggagcgcagcccagctgccccaccacctctgcctaccacctcctctggcaaggctgcaaagaaacccacagctgcagagatctctgttcgagtccctagagggccggccgtggaagggggacacgtgaatatggcattctctcagtccaaccctccttcggagttgcacaaggtccacggatccagaaacaagcccaccagcttgtggaacccaacgtacggctcctggtttacagagaaacccaccaaaaagaataatcctatagcaaagaaggagccacacgacaggggtaacctggggctggagggaagctgtactgtcccacctaacgttgcaactgggagacttccgggggcctcactgctcctagagccctcttcgctgactgccaatatgaaggaggtacctctgttcaggctacgtcacttcccttgtgggaatgtcaattacggctaccagcaacagggcttgcccttagaagccgctactgcccctggagctggtcattacgaggataccattctgaaaagcaagaatagcatgaaccagcctgggccctgagctcggtcgcacactcacttctcttccttgggatccctaagaccgtggaggagagagaggcaatggctccttcacaaaccagagaccaaatgtcacgttttgttttgtgccaacctattttgaagtaccaccaaaaaagctgtattttgaaaatgctttagaaaggttttgagcatgggttcatcctattctttcgaaagaagaaaatatcataaaaatgagtgataaatacaaggcccagatgtggttgcataaggtttttatgcatgtttgttgtatacttccttatgcttctttcaaattgtgtgtgctctgcttcaatgtagtcagaattagctgcttctatgtttcatagttggggtcatagatgtttccttgccttgttgatgtggacatgagccatttgaggggagagggaacggaaataaaggagttatttgtaatgactaa

SEQ ID NO: 144945 - DNA, 1353 bp, Artificial Sequence
  derived and/or modified sequence
atgggagccatcgggctcctgtggctcctgccgctgctgctttccacggcagctgtgggctccgggatggggaccggccagcgcgcgggctccccagctgcggggccgccgctgcagccccgggagccactcagctactcgcgcctgcagaggaagagtctggcagttgacttcgtggtgccctcgctcttccgtgtctacgcccgggacctactgctgccaccatcctcctcggagctgaaggctggcaggcccgaggcccgcggctcgctagctctggactgcgccccgctgctcaggttgctggggccggcgccgggggtctcctggaccgccggttcaccagccccggcagaggcccggacgctgtccagggtgctgaagggcggctccgtgcgcaagctccggcgtgccaagcagttggtgctggagctgggcgaggaggcgatcttggagggttgcgtcgggccccccggggaggcggctgtggggctgctccagttcaatctcagcgagctgttcagttggtggattcgccaaggcgaagggcgactgaggatccgcctgatgcccgagaagaaggcgtcggaagtgggcagagagggaaggctgtccgcggcaattcgcgcctcccagccccgccttctcttccagatcttcgggactggtcatagctccttggaatcaccaacaaacatgccttctccttctcctgattattttacatggaatctcacctggataatgaaagactccttccctttcctgtctcatcgcagccgatatggtaaagagcgcagcccagctgccccaccacctctgcctaccacctcctctggcaaggctgcaaagaaacccacagctgcagagatctctgttcgagtccctagagggccggccgtggaagggggacacgtgaatatggcattctctcagtccaaccctccttcggagttgcacaaggtccacggatccagaaacaagcccaccagcttgtggaacccaacgtacggctcctggtttacagagaaacccaccaaaaagaataatcctatagcaaagaaggagccacacgacaggggtaacctggggctggagggaagctgtactgtcccacctaacgttgcaactgggagacttccgggggcctcactgctcctagagccctcttcgctgactgccaatatgaaggaggtacctctgttcaggctacgtcacttcccttgtgggaatgtcaattacggctaccagcaacagggcttgcccttagaagccgctactgcccctggagctggtcattacgaggataccattctgaaaagcaagaatagcatgaaccagcctgggccctga

SEQ ID NO: 144946 - DNA, 4863 bp, Artificial Sequence
  derived and/or modified sequence
atgggcgccatcggcctgctgtggctgctgcccctgctgctgagcaccgccgccgtgggcagcggcatgggcaccggccagagagccggcagccccgccgccggcccccccctgcagcccagagagcccctgagctacagcagactgcagagaaagagcctggccgtggacttcgtggtgcccagcctgttcagagtgtacgccagagacctgctgctgccccccagcagcagcgagctgaaggccggcagacccgaggccagaggcagcctggccctggactgcgcccccctgctgagactgctgggccccgcccccggcgtgagctggaccgccggcagccccgcccccgccgaggccagaaccctgagcagagtgctgaagggcggcagcgtgagaaagctgagaagagccaagcagctggtgctggagctgggcgaggaggccatcctggagggctgcgtgggcccccccggcgaggccgccgtgggcctgctgcagttcaacctgagcgagctgttcagctggtggatcagacagggcgagggcagactgagaatcagactgatgcccgagaagaaggccagcgaggtgggcagagagggcagactgagcgccgccatcagagccagccagcccagactgctgttccagatcttcggcaccggccacagcagcctggagagccccaccaacatgcccagccccagccccgactacttcacctggaacctgacctggatcatgaaggacagcttccccttcctgagccacagaagcagatacggcctggagtgcagcttcgacttcccctgcgagctggagtacagcccccccctgcacgacctgagaaaccagagctggagctggagaagaatccccagcgaggaggccagccagatggacctgctggacggccccggcgccgagagaagcaaggagatgcccagaggcagcttcctgctgctgaacaccagcgccgacagcaagcacaccatcctgagcccctggatgagaagcagcagcgagcactgcaccctggccgtgagcgtgcacagacacctgcagcccagcggcagatacatcgcccagctgctgccccacaacgaggccgccagagagatcctgctgatgcccacccccggcaagcacggctggaccgtgctgcagggcagaatcggcagacccgacaaccccttcagagtggccctggagtacatcagcagcggcaacagaagcctgagcgccgtggacttcttcgccctgaagaactgcagcgagggcaccagccccggcagcaagatggccctgcagagcagcttcacctgctggaacggcaccgtgctgcagctgggccaggcctgcgacttccaccaggactgcgcccagggcgaggacgagagccagatgtgcagaaagctgcccgtgggcttctactgcaacttcgaggacggcttctgcggctggacccagggcaccctgagcccccacaccccccagtggcaggtgagaaccctgaaggacgccagattccaggaccaccaggaccacgccctgctgctgagcaccaccgacgtgcccgccagcgagagcgccaccgtgaccagcgccaccttccccgcccccatcaagagcagcccctgcgagctgagaatgagctggctgatcagaggcgtgctgagaggcaacgtgagcctggtgctggtggagaacaagaccggcaaggagcagggcagaatggtgtggcacgtggccgcctacgagggcctgagcctgtggcagtggatggtgctgcccctgctggacgtgagcgacagattctggctgcagatggtggcctggtggggccagggcagcagagccatcgtggccttcgacaacatcagcatcagcctggactgctacctgaccatcagcggcgaggacaagatcctgcagaacaccgcccccaagagcagaaacctgttcgagagaaaccccaacaaggagctgaagcccggcgagaacagccccagacagacccccatcttcgaccccaccgtgcactggctgttcaccacctgcggcgccagcggcccccacggccccacccaggcccagtgcaacaacgcctaccagaacagcaacctgagcgtggaggtgggcagcgagggccccctgaagggcatccagatctggaaggtgcccgccaccgacacctacagcatcagcggctacggcgccgccggcggcaagggcggcaagaacaccatgatgagaagccacggcgtgagcgtgctgggcatcttcaacctggagaaggacgacatgctgtacatcctggtgggccagcagggcgaggacgcctgccccagcaccaaccagctgatccagaaggtgtgcatcggcgagaacaacgtgatcgaggaggagatcagagtgaacagaagcgtgcacgagtgggccggcggcggcggcggcggcggcggcgccacctacgtgttcaagatgaaggacggcgtgcccgtgcccctgatcatcgccgccggcggcggcggcagagcctacggcgccaagaccgacaccttccaccccgagagactggagaacaacagcagcgtgctgggcctgaacggcaacagcggcgccgccggcggcggcggcggctggaacgacaacaccagcctgctgtgggccggcaagagcctgcaggagggcgccaccggcggccacagctgcccccaggccatgaagaagtggggctgggagaccagaggcggcttcggcggcggcggcggcggctgcagcagcggcggcggcggcggcggctacatcggcggcaacgccgccagcaacaacgaccccgagatggacggcgaggacggcgtgagcttcatcagccccctgggcatcctgtacacccccgccctgaaggtgatggagggccacggcgaggtgaacatcaagcactacctgaactgcagccactgcgaggtggacgagtgccacatggaccccgagagccacaaggtgatctgcttctgcgaccacggcaccgtgctggccgaggacggcgtgagctgcatcgtgagccccacccccgagccccacctgcccctgagcctgatcctgagcgtggtgaccagcgccctggtggccgccctggtgctggccttcagcggcatcatgatcgtgtacagaagaaagcaccaggagctgcaggccatgcagatggagctgcagagccccgagtacaagctgagcaagctgagaaccagcaccatcatgaccgactacaaccccaactactgcttcgccggcaagaccagcagcatcagcgacctgaaggaggtgcccagaaagaacatcaccctgatcagaggcctgggccacggcgccttcggcgaggtgtacgagggccaggtgagcggcatgcccaacgaccccagccccctgcaggtggccgtgaagaccctgcccgaggtgtgcagcgagcaggacgagctggacttcctgatggaggccctgatcatcagcaagttcaaccaccagaacatcgtgagatgcatcggcgtgagcctgcagagcctgcccagattcatcctgctggagctgatggccggcggcgacctgaagagcttcctgagagagaccagacccagacccagccagcccagcagcctggccatgctggacctgctgcacgtggccagagacatcgcctgcggctgccagtacctggaggagaaccacttcatccacagagacatcgccgccagaaactgcctgctgacctgccccggccccggcagagtggccaagatcggcgacttcggcatggccagagacatctacagagccagctactacagaaagggcggctgcgccatgctgcccgtgaagtggatgccccccgaggccttcatggagggcatcttcaccagcaagaccgacacctggagcttcggcgtgctgctgtgggagatcttcagcctgggctacatgccctaccccagcaagagcaaccaggaggtgctggagttcgtgaccagcggcggcagaatggacccccccaagaactgccccggccccgtgtacagaatcatgacccagtgctggcagcaccagcccgaggacagacccaacttcgccatcatcctggagagaatcgagtactgcacccaggaccccgacgtgatcaacaccgccctgcccatcgagtacggccccctggtggaggaggaggagaaggtgcccgtgagacccaaggaccccgagggcgtgccccccctgctggtgagccagcaggccaagagagaggaggagagaagccccgccgcccccccccccctgcccaccaccagcagcggcaaggccgccaagaagcccaccgccgccgagatcagcgtgagagtgcccagaggccccgccgtggagggcggccacgtgaacatggccttcagccagagcaacccccccagcgagctgcacaaggtgcacggcagcagaaacaagcccaccagcctgtggaaccccacctacggcagctggttcaccgagaagcccaccaagaagaacaaccccatcgccaagaaggagccccacgacagaggcaacctgggcctggagggcagctgcaccgtgccccccaacgtggccaccggcagactgcccggcgccagcctgctgctggagcccagcagcctgaccgccaacatgaaggaggtgcccctgttcagactgagacacttcccctgcggcaacgtgaactacggctaccagcagcagggcctgcccctggaggccgccaccgcccccggcgccggccactacgaggacaccatcctgaagagcaagaacagcatgaaccagcccggcccctag

SEQ ID NO: 144947 - DNA, 1353 bp, Artificial Sequence
  derived and/or modified sequence
atgggcgccatcggcctgctgtggctgctgcccctgctgctgagcaccgccgccgtgggcagcggcatgggcaccggccagagagccggcagccccgccgccggcccccccctgcagcccagagagcccctgagctacagcagactgcagagaaagagcctggccgtggacttcgtggtgcccagcctgttcagagtgtacgccagagacctgctgctgccccccagcagcagcgagctgaaggccggcagacccgaggccagaggcagcctggccctggactgcgcccccctgctgagactgctgggccccgcccccggcgtgagctggaccgccggcagccccgcccccgccgaggccagaaccctgagcagagtgctgaagggcggcagcgtgagaaagctgagaagagccaagcagctggtgctggagctgggcgaggaggccatcctggagggctgcgtgggcccccccggcgaggccgccgtgggcctgctgcagttcaacctgagcgagctgttcagctggtggatcagacagggcgagggcagactgagaatcagactgatgcccgagaagaaggccagcgaggtgggcagagagggcagactgagcgccgccatcagagccagccagcccagactgctgttccagatcttcggcaccggccacagcagcctggagagccccaccaacatgcccagccccagccccgactacttcacctggaacctgacctggatcatgaaggacagcttccccttcctgagccacagaagcagatacggcaaggagagaagccccgccgcccccccccccctgcccaccaccagcagcggcaaggccgccaagaagcccaccgccgccgagatcagcgtgagagtgcccagaggccccgccgtggagggcggccacgtgaacatggccttcagccagagcaacccccccagcgagctgcacaaggtgcacggcagcagaaacaagcccaccagcctgtggaaccccacctacggcagctggttcaccgagaagcccaccaagaagaacaaccccatcgccaagaaggagccccacgacagaggcaacctgggcctggagggcagctgcaccgtgccccccaacgtggccaccggcagactgcccggcgccagcctgctgctggagcccagcagcctgaccgccaacatgaaggaggtgcccctgttcagactgagacacttcccctgcggcaacgtgaactacggctaccagcagcagggcctgcccctggaggccgccaccgcccccggcgccggccactacgaggacaccatcctgaagagcaagaacagcatgaaccagcccggcccctag

SEQ ID NO: 144948 - DNA, 387 bp, Artificial Sequence
  derived and/or modified sequence
atggcctggagagtgcccggcgtgagacccgccagcaccttcttcccccaggtgctgagagccagcagcgagctgcccaacagactgcccgagggcagcaccgtgggccccaagcccgacagcagctgggaggccggcagccagggcaactggggcctgaccagcagcggcgccggccaggacagcagcgcccagaagctgggcatcctgagcgtgcagatcagcctgaagatctggacctgggagaagcccagcggctggggccacctgcacgccgccgtgaccggcgccagctgctgcagccccctgagccagggcggcgccatctgcctggtgaccgccccccaggacaagcccgactgcagcccctgcaccagcggccactag

SEQ ID NO: 144949 - DNA, 387 bp, Artificial Sequence
  derived and/or modified sequence
atggcctggagggtgcctggggtgcggcctgccagcaccttcttcccccaggtgctgcgggccagcagcgagctgcccaaccggctgcctgagggcagcacagtgggccccaagccagacagctcctgggaggccggcagccagggcaactggggcctgaccagcagcggggccggccaggacagcagcgcccagaagctgggcatcctgtctgtgcagatcagcctgaagatctggacctgggagaagcccagcggctggggccacctgcacgccgctgtgactggagccagctgctgcagccccctgagccagggcggggccatctgcctggtgacagccccccaggacaagccagactgcagcccctgcaccagcggccactag

SEQ ID NO: 144950 - DNA, 387 bp, Artificial Sequence
  derived and/or modified sequence
atggcctggcgggtgcccggcgtgcggcccgccagcaccttcttccctcaggtgcttagggctagttccgagctgcccaaccgtttgcctgaggggagtactgtgggtcctaaacccgactccagctgggaggctggcagtcagggaaactggggcctgacaagttcaggcgcaggccaggatagcagcgctcagaaactcggaattctttccgttcagatcagcttgaaaatatggacatgggaaaagcccagcggttggggacatctccatgccgcagtcactggtgccagttgctgtagccccctgtcccagggcggggctatttgtctcgtgaccgcgccacaggacaaaccggattgttcgccctgcacgtccggccactag

SEQ ID NO: 144951 - DNA, 387 bp, Artificial Sequence
  derived and/or modified sequence
atggcttggagagtccccggagtgcgccctgcgagcacctttttcccccaggtattgagggcatctagcgagctccctaataggttgcctgagggtagcaccgtgggtcccaagccagacagcagttgggaggcaggtagtcaaggaaattggggtctgacgtccagtggtgctggccaagactccagcgcgcagaaactcgggatcctgagcgttcagataagcctgaagatctggacctgggaaaaaccttctggctggggccacctgcacgcagcggtgactggagccagctgctgttctccactcagccaagggggtgccatttgtttggtgaccgcgcctcaggacaagcctgactgttcaccctgcacgagtggacactag

SEQ ID NO: 144952 - protein, 454 aa, Artificial Sequence
  derived and/or modified sequence
MAEMGSKGVTAGKIASNVQKKLTRAQEKVLQKLGKADETKDEQFEQCVQNFNKQLTEGTRLQKDLRTYLASVKAMHEASKKLNECLQEVYEPDWPGRDEANKIAENNDLLWMDYHQKLVDQALLTMDTYLGQFPDIKSRIAKRGRKLVDYDSARHHYESLQTAKKKDEAKIAKAEEELIKAQKVFEEMNVDLQEELPSLWNSRVGFYVNTFQSIAGLEENFHKEMSKLNQNLNDVLVGLEKQHGSNTFTVKAQPRKKSKLFSRLRRKKNSDNAPAKGNKSPSPPDGSPAATPEIRVNHEPEPAGGATPGATLPKSPSQPAEASEVAGGTQPAAGAQEPGETAASEAASSSLPAVVVETFPATVNGTVEGGSGAGRLDLPPGFMFKVQAQHDYTATDTDELQLKAGDVVLVIPFQNPEEQDEGWLMGVKESDWNQHKELEKCRGVFPENFTERVP

SEQ ID NO: 144953 - DNA, 1365 bp, Artificial Sequence
  derived and/or modified sequence
atggccgaaatgggaagcaagggcgtaactgcagggaagatagcatccaatgtgcagaaaaaactcaccagagcccaggagaaagtgctacagaagttgggaaaggcagacgagacaaaggacgagcagttcgagcaatgtgttcagaatttcaacaagcaactgactgagggaactcgcctgcagaaggatttaaggacatacctggcgagcgtgaaagccatgcacgaggcgtccaaaaaattgaacgagtgcctgcaggaggtgtatgagcctgactggcctggacgggacgaagctaataagatcgccgaaaacaatgacttactatggatggattaccaccaaaaattagtggaccaggctctgctgacaatggatacctacttgggtcaattccctgatatcaagtcacggatagctaaaagggggcgaaaacttgtagattacgattccgctcggcatcactatgagtctctccagaccgcaaaaaaaaaagacgaggctaagattgcaaaagcagaggaagagttaattaaggctcagaaggtctttgaagagatgaatgtagacctccaggaggagctcccctctctgtggaactctcgggtggggttctatgtaaacacctttcagtcaatagctgggctcgaggagaactttcataaggagatgtcgaagcttaaccagaacttgaacgatgtccttgtgggcctggagaagcagcacggatccaatacgttcacagtaaaggcgcagccacgcaagaagtctaagctcttctcaagacttcggcggaaaaagaattccgataatgctccagccaaaggaaacaagagcccatctccccccgacggctcccccgcagcgacccctgaaatacgggtgaatcatgagccagagccggcgggcggggccaccccgggggcaacgctacctaaatctcccagtcagccggctgaagccagtgaggttgccggcggcacacagcccgctgccggtgctcaggagcctggggagactgctgctagtgaagctgcctcctcctcacttcctgccgtcgttgttgagacctttcccgccaccgtgaacggcaccgtggagggcggatcaggggctggaaggctcgacttgccacccggcttcatgttcaaagtgcaggcccaacatgactacacagctactgacaccgacgaactgcagcttaaggccggcgatgttgtattggttattcccttccaaaacccggaggagcaagatgaagggtggctcatgggcgttaaagagtctgactggaaccagcataaagaacttgagaaatgcaggggagtttttcccgagaactttacggaaagagtgccctag

SEQ ID NO: 144954 - DNA, 1365 bp, Artificial Sequence
  derived and/or modified sequence
atggccgagatgggcagcaaaggagtgacagctgggaagatcgccagcaatgtgcagaagaagctgacccgggcccaggagaaggtgctgcagaagctgggcaaggcagatgagaccaaggatgagcagtttgagcagtgtgtgcagaacttcaacaagcagctgacagagggcacccggctgcagaaggacctgcggacctacctggcctctgtgaaggccatgcatgaggccagcaagaagctgaatgaatgtctgcaggaggtgtatgagccagactggccaggaagagatgaggccaacaagattgctgaaaataatgacctgctgtggatggactaccaccagaagctggtggaccaggccctgctgaccatggacacctacctgggccagttcccagacatcaagagccgcatcgccaagaggggcaggaagctggtggactatgacagcgcccggcaccactatgagagcctgcagacagccaagaagaaggatgaggccaagatcgccaaggccgaggaggagctgatcaaggcccagaaggtgtttgaggagatgaatgtggacctgcaggaggagctgcccagcctgtggaacagccgggtgggcttctacgtgaacaccttccagagcattgctggcctggaggagaacttccacaaggagatgagcaagctgaaccagaacctgaatgatgtgctggtgggcctggagaagcagcacggcagcaacaccttcaccgtgaaggcccagcccaggaagaagagcaagctgttcagccggctgcggaggaagaagaacagcgacaatgccccagccaagggcaacaagagccccagccccccagatggcagccctgctgccaccccagagatccgggtgaaccacgagcctgagcctgctggaggagccacccctggggccaccctgcccaagagccccagccagcctgctgaggccagcgaggtggccggcggcacccagcctgctgctggggcccaggagcccggggagacagctgccagcgaggccgccagcagcagcctgcctgctgtggtggtggagaccttccctgccaccgtgaatggcaccgtggagggcggcagcggggccggccgcctggacctgcccccaggcttcatgttcaaggtgcaggcccagcacgactacacagccacagacacagatgagctgcagctgaaggctggagatgtggtgctggtgatccccttccagaaccctgaggagcaggatgagggctggctgatgggcgtgaaggagagtgactggaaccagcacaaggagctggagaagtgccggggcgtcttccctgagaacttcacagagcgggtgccctag

SEQ ID NO: 144955 - DNA, 1365 bp, Artificial Sequence
  derived and/or modified sequence
atggccgagatgggcagcaagggcgtgaccgccggcaagatcgcctctaacgttcagaaaaagttgactcgggcccaggaaaaggttctgcagaagctagggaaagctgacgagacgaaggatgagcaatttgagcaatgcgtgcaaaattttaataaacagttgaccgaagggacccggctccagaaagatctcaggacctaccttgcttcagtaaaggctatgcacgaggcgtccaaaaagctgaacgagtgcctgcaagaagtatatgaacccgactggcccggacgagatgaggccaataaaattgctgagaataacgatttgttatggatggattaccatcagaagttagtcgatcaggcactcctcacgatggacacgtacctgggccaatttcccgacatcaagagcaggatcgccaagaggggaagaaaactcgtggactacgactccgctaggcatcattatgagagcctgcagactgccaaaaaaaaggatgaggcaaagatcgctaaagcggaagaggagcttataaaagcgcaaaaggtgtttgaggagatgaacgtggacttgcaggaggagctcccgtctctgtggaattcaagagtagggttctacgtcaacacttttcagagcattgctggcctggaggaaaactttcataaagagatgagtaagctgaatcagaatcttaacgatgtgctggtggggctggagaaacagcacgggtccaacacattcaccgtgaaggcccaaccgcgtaagaagagtaagctgttttccaggcttcgaaggaagaagaactcagacaatgcacctgcaaagggcaacaagagcccgagcccaccggatggaagccctgcggccacgcccgagattcgggttaatcatgaaccagaaccagccggtggcgcaaccccgggcgccaccctgccgaaaagcccttcacaaccagcagaggcctctgaagtcgcaggggggacacagcccgcggcaggtgcccaagagccaggagaaacagccgctagcgaagcagcctcatcttctctaccagccgttgtggtggaaacttttcccgcaactgtgaatggtacagttgaagggggctcaggagcaggccgcctggatctgccccccgggttcatgttcaaggtgcaggctcaacacgattatacggccactgacacagatgaacttcagctcaaggctggtgatgttgttctagtgattccttttcaaaatcctgaagagcaggacgaaggttggctaatgggggtgaaggagtccgactggaatcagcataaggaactggaaaaatgccgtggggtatttcccgagaattttacagaaagagtgccgtag

SEQ ID NO: 144956 - DNA, 1365 bp, Artificial Sequence
  derived and/or modified sequence
atggcagaaatggggtcgaagggcgtcactgctggaaagatagccagcaatgtccagaagaaactaacacgggctcaggagaaggttctgcagaaactcgggaaggctgacgaaactaaagacgagcaattcgagcagtgcgttcagaactttaataagcagctgacagaaggtactcgcctccagaaggacctgagaacttacctggcctccgtcaaagctatgcacgaggcgtcaaaaaagcttaacgagtgtctgcaggaagtgtatgagcctgactggccaggaagggacgaggcaaataagattgcagaaaataatgaccttctttggatggattaccaccagaaactggtggatcaggccctgctcacaatggacacatatctgggtcaattccctgacattaagagcagaatcgctaagcgtggccgtaagctcgtggattacgatagcgcaaggcaccactacgagtctctgcagacagccaagaagaaggatgaggccaagatagctaaagccgaggaggagcttattaaggcgcaaaaagtgttcgaagaaatgaacgtcgatttgcaggaagagctgccgtccctatggaacagtcgcgtaggtttttacgttaacacatttcagagtatcgcagggttggaggagaacttccacaaggagatgtctaagctcaaccagaatttaaacgatgtgctggtaggcttagagaaacagcacggcagcaatacattcacggtgaaggcccagccacggaagaaatctaagctgttttccagactgcggagaaaaaaaaacagtgataacgctcctgcaaaagggaacaagtcgccctcccctcctgacggctcgccagccgcaacccccgagatccgcgttaatcatgagcccgagccagcgggaggagccacccctggggcaaccctccccaaatcaccatcccagccagctgaggcatctgaagtggcgggaggaacacagcccgctgccggtgcccaggaacctggagaaacagcagcttccgaagccgcatccagctctctcccggcagtagttgttgaaacctttccagcaactgtgaatgggacagtggagggtggctccggggcaggtcgcctagacctgcctcccggattcatgttcaaagtccaggctcaacatgattacactgctacggacaccgatgagctgcagcttaaggcgggagacgtggttctggttatcccatttcagaaccctgaagagcaagacgaaggatggctgatgggagtcaaggagtccgactggaatcagcataaagagttagaaaaatgccgcggtgtcttccctgagaattttaccgaaagagtcccttag

SEQ ID NO: 144957 - DNA, 2209 bp, Artificial Sequence
  derived and/or modified sequence
cgcgcccctccctcctcgcggacctggcggtgccggcgcccggagtggccctttaaaaggcagcttattgtccggagggggcgggcggggggcgccgaccgcggcctgaggcccggcccctcccctctccctccctctgtccccgcgtcgctcgctggctagctcgctggctcgctcgcccgtccggcgcacgctccgcctccgtcagttggctccgctgtcgggtgcgcggcgtggagcggcagccggtctggacgcgcggccggggctgggggctgggagcgcggcgcgcaagatctccccgcgcgagagcggcccctgccaccgggcgaggcctgcgccgcgatggcagagatgggcagtaaaggggtgacggcgggaaagatcgccagcaacgtgcagaagaagctcacccgcgcgcaggagaaggttctccagaagctggggaaggcagatgagaccaaggatgagcagtttgagcagtgcgtccagaatttcaacaagcagctgacggagggcacccggctgcagaaggatctccggacctacctggcctccgtcaaagccatgcacgaggcttccaagaagctgaatgagtgtctgcaggaggtgtatgagcccgattggcccggcagggatgaggcaaacaagatcgcagagaacaacgacctgctgtggatggattaccaccagaagctggtggaccaggcgctgctgaccatggacacgtacctgggccagttccccgacatcaagtcacgcattgccaagcgggggcgcaagctggtggactacgacagtgcccggcaccactacgagtcccttcaaactgccaaaaagaaggatgaagccaaaattgccaaggccgaggaggagctcatcaaagcccagaaggtgtttgaggagatgaatgtggatctgcaggaggagctgccgtccctgtggaacagccgcgtaggtttctacgtcaacacgttccagagcatcgcgggcctggaggaaaacttccacaaggagatgagcaagctcaaccagaacctcaatgatgtgctggtcggcctggagaagcaacacgggagcaacaccttcacggtcaaggcccagcccagaaagaaaagtaaactgttttcgcggctgcgcagaaagaagaacagtgacaacgcgcctgcaaaagggaacaagagcccttcgcctccagatggctcccctgccgccacccccgagatcagagtcaaccacgagccagagccggccggcggggccacgcccggggccaccctccccaagtccccatctcagccagcagaggcctcggaggtggcgggtgggacccaacctgcggctggagcccaggagccaggggagacggcggcaagtgaagcagcctccagctctcttcctgctgtcgtggtggagaccttcccagcaactgtgaatggcaccgtggagggcggcagtggggccgggcgcttggacctgcccccaggtttcatgttcaaggtacaggcccagcacgactacacggccactgacacagacgagctgcagctcaaggctggtgatgtggtgctggtgatccccttccagaaccctgaagagcaggatgaaggctggctcatgggcgtgaaggagagcgactggaaccagcacaaggagctggagaagtgccgtggcgtcttccccgagaacttcactgagagggtcccatgacggcggggcccaggcagcctccgggcgtgtgaagaacacctcctcccgaaaaatgtgtggttcttttttttgttttgttttcgtttttcatcttttgaagagcaaagggaaatcaagaggagacccccaggcagaggggcgttctcccaaagattaggtcgttttccaaagagccgcgtcccggcaagtccggcggaattcaccagtgttcctgaagctgctgtgtcctctagttgagtttctggcgcccctgcctgtgcccgcatgtgtgcctggccgcagggcggggctgggggctgccgagccaccatgcttgcctgaagcttcggccgcgccacccgggcaagggtcctcttttcctggcagctgctgtgggtggggcccagacaccagcctagcctggctctgccccgcagacggtctgtgtgctgtttgaaaataaatcttagtgttcaaaacaaaatgaaacaaaaaaaaaatgataaaaactctcagaaaa

SEQ ID NO: 144958 - DNA, 1365 bp, Artificial Sequence
  derived and/or modified sequence
atggccgagatgggcagcaagggcgtgaccgccggcaagatcgccagcaacgtgcagaagaagctgaccagagcccaggagaaggtgctgcagaagctgggcaaggccgacgagaccaaggacgagcagttcgagcagtgcgtgcagaacttcaacaagcagctgaccgagggcaccagactgcagaaggacctgagaacctacctggccagcgtgaaggccatgcacgaggccagcaagaagctgaacgagtgcctgcaggaggtgtacgagcccgactggcccggcagagacgaggccaacaagatcgccgagaacaacgacctgctgtggatggactaccaccagaagctggtggaccaggccctgctgaccatggacacctacctgggccagttccccgacatcaagagcagaatcgccaagagaggcagaaagctggtggactacgacagcgccagacaccactacgagagcctgcagaccgccaagaagaaggacgaggccaagatcgccaaggccgaggaggagctgatcaaggcccagaaggtgttcgaggagatgaacgtggacctgcaggaggagctgcccagcctgtggaacagcagagtgggcttctacgtgaacaccttccagagcatcgccggcctggaggagaacttccacaaggagatgagcaagctgaaccagaacctgaacgacgtgctggtgggcctggagaagcagcacggcagcaacaccttcaccgtgaaggcccagcccagaaagaagagcaagctgttcagcagactgagaagaaagaagaacagcgacaacgcccccgccaagggcaacaagagccccagcccccccgacggcagccccgccgccacccccgagatcagagtgaaccacgagcccgagcccgccggcggcgccacccccggcgccaccctgcccaagagccccagccagcccgccgaggccagcgaggtggccggcggcacccagcccgccgccggcgcccaggagcccggcgagaccgccgccagcgaggccgccagcagcagcctgcccgccgtggtggtggagaccttccccgccaccgtgaacggcaccgtggagggcggcagcggcgccggcagactggacctgccccccggcttcatgttcaaggtgcaggcccagcacgactacaccgccaccgacaccgacgagctgcagctgaaggccggcgacgtggtgctggtgatccccttccagaaccccgaggagcaggacgagggctggctgatgggcgtgaaggagagcgactggaaccagcacaaggagctggagaagtgcagaggcgtgttccccgagaacttcaccgagagagtgccctag

SEQ ID NO: 144959 - protein, 316 aa, Artificial Sequence
  derived and/or modified sequence
MGNRHAKASSPQGFDVDRDAKKLNKACKGMGTNEAAIIEILSGRTSDERQQIKQKYKATYGKELEEVLKSELSGNFEKTALALLDRPSEYAARQLQKAMKGLGTDESVLIEVLCTRTNKEIIAIKEAYQRLFDRSLESDVKGDTSGNLKKILVSLLQANRNEGDDVDKDLAGQDAKDLYDAGEGRWGTDELAFNEVLAKRSYKQLRATFQAYQILIGKDIEEAIEEETSGDLQKAYLTLVRCAQDCEDYFAERLYKSMKGAGTDEETLIRIVVTRAEVDLQGIKAKFQEKYQKSLSDMVRSDTSGDFRKLLVALLH

SEQ ID NO: 144960 - DNA, 951 bp, Artificial Sequence
  derived and/or modified sequence
atgggcaacagacacgccaaggccagcagcccccagggcttcgacgtggacagagacgccaagaagctgaacaaggcctgcaagggcatgggcaccaacgaggccgccatcatcgagatcctgagcggcagaaccagcgacgagagacagcagatcaagcagaagtacaaggccacctacggcaaggagctggaggaggtgctgaagagcgagctgagcggcaacttcgagaagaccgccctggccctgctggacagacccagcgagtacgccgccagacagctgcagaaggccatgaagggcctgggcaccgacgagagcgtgctgatcgaggtgctgtgcaccagaaccaacaaggagatcatcgccatcaaggaggcctaccagagactgttcgacagaagcctggagagcgacgtgaagggcgacaccagcggcaacctgaagaagatcctggtgagcctgctgcaggccaacagaaacgagggcgacgacgtggacaaggacctggccggccaggacgccaaggacctgtacgacgccggcgagggcagatggggcaccgacgagctggccttcaacgaggtgctggccaagagaagctacaagcagctgagagccaccttccaggcctaccagatcctgatcggcaaggacatcgaggaggccatcgaggaggagaccagcggcgacctgcagaaggcctacctgaccctggtgagatgcgcccaggactgcgaggactacttcgccgagagactgtacaagagcatgaagggcgccggcaccgacgaggagaccctgatcagaatcgtggtgaccagagccgaggtggacctgcagggcatcaaggccaagttccaggagaagtaccagaagagcctgagcgacatggtgagaagcgacaccagcggcgacttcagaaagctgctggtggccctgctgcactag

SEQ ID NO: 144961 - DNA, 951 bp, Artificial Sequence
  derived and/or modified sequence
atgggcaatcggcatgcaaaagctagctcaccacagggcttcgacgttgaccgagatgcaaagaagctcaataaggcctgcaaaggtatgggtacgaacgaggccgccattatcgagatcctctcagggcggacatctgatgagaggcagcagattaagcaaaagtacaaagccacctatggaaaggagctcgaagaagttctgaaatcagaactgtctggtaactttgagaaaaccgcactggcactcctcgacaggcccagcgagtacgccgcccggcagcttcagaaggccatgaaaggccttggaaccgatgaatccgtcctcattgaagtcctgtgtactaggacaaataaggaaatcatcgctatcaaggaagcttaccagagactattcgatcggtcactcgagagcgatgttaaaggagatacatcgggcaacttgaaaaaaatcctcgtcagcctcctgcaagcgaatcgcaatgagggcgacgatgtcgacaaggacctggcaggtcaagacgcaaaggacctgtatgacgctggtgaagggcgttggggcacagacgaattagccttcaatgaagtgctcgcaaaacgctcctacaagcaattgcgtgctaccttccaagcttaccagatcctgatcgggaaggatattgaagaggcaatcgaagaggagactagtggcgatcttcagaaggcctatctcacacttgttagatgcgctcaggactgcgaagactatttcgctgagcgcctatataagtctatgaagggagccggtaccgacgaagagacactgatcagaattgttgttacacgagctgaggtcgacctgcagggcatcaaagcaaagttccaagagaaataccagaaatctctcagcgatatggtgaggtccgacacctccggcgattttaggaaacttctagttgcactgttgcactag

SEQ ID NO: 144962 - DNA, 951 bp, Artificial Sequence
  derived and/or modified sequence
atgggcaacagacatgccaaggccagcagcccccagggctttgatgtggacagagatgccaagaagctgaacaaggcctgcaagggcatgggcaccaatgaagctgccatcatcgagatcctgagcggccgcaccagtgatgagcggcagcagatcaagcagaagtacaaggccacctacggcaaggagctggaggaggtgctgaagtctgagctgagcggcaactttgagaagacagccctggccctgctggaccggcccagtgaatatgctgcccggcagctgcagaaggccatgaagggcctgggcacagatgaatctgtgctgattgaggtgctgtgcaccaggaccaacaaggagatcatcgccatcaaggaggcctaccagaggctgtttgacaggagcctggagagtgatgtgaagggggacaccagcggcaacctgaagaagatcctggtgtccctgctgcaggccaacagaaatgaaggagatgatgtggacaaggacctggccggccaggatgccaaggacctgtatgatgctggggagggccgctggggcacagatgagctggccttcaatgaggtgctggccaagaggagctacaagcagctgcgggccaccttccaggcctaccagatcctgattggcaaggacatcgaggaggccatcgaggaggagaccagcggggacctgcagaaggcctacctgaccctggtgcgctgtgcccaggactgtgaggactactttgctgagcggctgtacaagtccatgaagggagctggaacagatgaggagaccctcatcagaattgtggtgaccagggctgaggtggacctgcagggcatcaaggccaagttccaggagaagtaccagaagagcctgagtgacatggtgcggagtgacaccagcggggacttcaggaagctgctggtggccctgctgcactag

SEQ ID NO: 144963 - DNA, 951 bp, Artificial Sequence
  derived and/or modified sequence
atgggcaaccggcacgccaaggccagcagcccccagggcttcgacgttgatagggacgccaagaaattaaataaggcatgcaaaggcatgggtactaacgaagccgctatcatagagatcctgagcggaaggactagcgatgagcgccaacagatcaagcagaaatacaaagccacttacggtaaagaacttgaagaagtgctcaaatctgaactcagcggtaattttgagaagaccgcgcttgcgctgctcgatagacctagcgagtatgcagcccgtcagcttcagaaggctatgaaaggccttgggactgatgagtccgtgttaattgaagttttgtgtacccggaccaacaaggagattatagccattaaggaggcataccaaagactattcgacaggagtctcgagtctgatgttaaaggggacacatcaggtaacttgaagaaaattctggtgagtcttctccaggccaatagaaacgagggtgatgatgttgacaaagacctcgcgggacaggatgctaaggacctatatgacgcaggggaggggaggtgggggacagacgagctggcctttaatgaggttcttgcaaagagatcatataaacagctgcgggccacatttcaggcctaccagattctgattggcaaggacatcgaggaggcaatagaagaggagacatcaggtgatcttcagaaggcttacttgacactggtcagatgcgctcaagattgtgaggactactttgctgagcggctgtataaaagtatgaaaggcgctggaacggatgaggaaacactaatcaggatagtggtgaccagagcagaggtggatcttcagggcatcaaagccaagttccaagagaagtatcagaagagcctatcagatatggtcagaagtgacacttccggggactttcgcaaactcttggtggctttgctgcactag

SEQ ID NO: 144964 - DNA, 1469 bp, Artificial Sequence
  derived and/or modified sequence
ctgttgtaaactttgcctgtaggaggactgatctcttgatgaaatacagaaaaaccatctcagaaaaaggaaaatgggcaatcgtcatgctaaagcgagcagtcctcagggttttgatgtggatcgagatgccaaaaagctgaacaaagcctgcaaaggaatggggaccaatgaagcagccatcattgaaatcttatcgggcaggacatcagatgagaggcaacaaatcaagcaaaagtacaaggcaacgtacggcaaggagctggaggaagtactcaagagtgagctgagtggaaacttcgagaagacagcgttggcccttctggaccgtcccagcgagtacgccgcccggcagctgcagaaggctatgaagggtctgggcacagatgagtccgtcctcattgaggtcctgtgcacgaggaccaataaggaaatcatcgccattaaagaggcctaccaaaggctatttgataggagcctcgaatcagatgtcaaaggtgatacaagtggaaacctaaaaaaaatcctggtgtctctgctgcaggctaatcgcaatgaaggagatgacgtggacaaagatctagctggtcaggatgccaaagatctgtatgatgcaggggaaggccgctggggcactgatgagcttgcgttcaatgaagtcctggccaagaggagctacaagcagttacgagccacctttcaagcctatcaaattctcattggcaaagacatagaagaagccattgaagaagaaacatcaggcgacttgcagaaggcctatttaactctcgtgagatgtgcccaggattgtgaggactattttgctgaacgtctgtacaagtcgatgaagggtgcggggaccgatgaggagacgttgattcgcatagtcgtgaccagggccgaggtggaccttcaggggatcaaagcaaagttccaagagaagtatcagaagtctctctctgacatggttcgctcagatacctccggggacttccggaaactgctagtagccctcttgcactgagccaagccagggcaataggaacacagggtggaaccgcctttgtcaagagcacattccaaatcaaacttgcaaatgagactcccgcacgaaaacccttaagagtcccggattactttcttggcagcttaagtggcgcagccaggccaagctgtgtaagttaagggcagtaacgttaagatgcgtgggcagggcaccttgaactctggcttagcaagcatctaggctgcctcttcactttcttttagcatggtaactggatgttttctaaacactaatgaaatcagcagttgatgaaaaaactatgcatttgtaatggcacatttagaaggatatgcatcacacaagtaaggtacaggaaagacaaaattaaacaatttattaattttccttctgtgtgttcaatttgaaagcctcattgttaattaaagttgtggattatgcctct

SEQ ID NO: 144965 - DNA, 951 bp, Artificial Sequence
  derived and/or modified sequence
atggggaacagacacgccaaagcctcgtcgcctcaaggatttgatgtcgatcgagatgctaaaaagctcaataaagcctgcaaaggcatggggacgaacgaggccgcaattattgagattctcagtggaaggacaagcgacgaaagacagcaaattaagcagaagtacaaggctacttatggtaaagaactggaagaggtgctcaaaagcgagctgtctggcaacttcgaaaaaacagctctggcccttctagaccgcccttccgagtacgccgcaaggcaactgcagaaagccatgaagggactggggacggacgagtccgtgctaatcgaggttctgtgtacgcggacaaacaaggagatcatcgcaatcaaagaagcctatcagcggctatttgataggtccttggagagcgatgtgaagggagataccagtggaaatctcaagaaaattctcgtttctcttctacaggccaacaggaacgagggagatgacgtggacaaggatcttgcaggccaggacgctaaagatttgtacgacgctggagagggacgttggggcacagacgagctggcgttcaatgaagtcttggccaaaagatcttacaaacaactgcgcgcaacctttcaggcttaccagatactgataggaaaggatattgaagaagctatcgaagaagagacgtcaggtgacttgcagaaagcttaccttacccttgttcggtgtgcccaggactgtgaggattactttgcggagagactctataagagcatgaaaggcgctggcacggatgaagagacactgattcggatagttgtaacgagggccgaggtggacctgcaggggatcaaggccaagttccaggaaaaataccaaaaaagcctgtctgacatggtgaggtccgacacatccggtgattttaggaaacttcttgtcgcgctgctgcattag

SEQ ID NO: 144966 - protein, 759 aa, Artificial Sequence
  derived and/or modified sequence
MSEVLPADSGVDTLAVFMASSGTTDVTNRNSPATPPNTLNLRSSHNELLNAEIKHTETKNSTPPKCRKKYALTNIQAAMGLSDPAAQPLLGNGSANIKLVKNGENQLRKAAEQGQQDPNKNLSPTAVINITSEKLEGKEPHPQDSSSCEILPSQPRRTKSFLNYYADLETSARELEQNRGNHHGTAEEKSQPVQGQASTIIGNGDLLLQKPNRPQSSPEDGQVATVSSSPETKKDHPKTGAKTDCALHRIQNLAPSDEESSWTTLSQDSASPSSPDETADIWSDHSFQTDPDLPPGWKRVSDIAGTYYWHIPTGTTQWERPVSIPADLQGSRKGSLSSVTPSPTPENEKQPWSDFAVLNGGKINSDIWKDLHAATVNPDPSLKEFEGATLRYASLKLRNAPHPDDDDSCSINSDPEAKCFAVRSLGWVEMAEEDLAPGKSSVAVNNCIRQLSYCKNDIRDTVGIWGEGKDMYLILENDMLSLVDPMDRSVLHSQPIVSIRVWGVGRDNGRDFAYVARDKDTRILKCHVFRCDTPAKAIATSLHEICSKIMAERKNAKALACSSLQERANVNLDVPLQVDFPTPKTELVQKFHVQYLGMLPVDKPVGMDILNSAIENLMTSSNKEDWLSVNMNVADATVTVISEKNEEEVLVECRVRFLSFMGVGKDVHTFAFIMDTGNQRFECHVFWCEPNAGNVSEAVQAACMLRYQKCLVARPPSQKVRPPPPPADSVTRRVTTNVKRGVLSLIDTLKQKRPVTEMP

SEQ ID NO: 144967 - DNA, 2280 bp, Artificial Sequence
  derived and/or modified sequence
atgtctgaagtcttgccagcagattccggtgtagataccctcgcagtctttatggctagcagtggaacaaccgacgtgacaaaccggaattccccagctactcccccgaataccctgaacctccggagtagtcacaacgagctgctaaacgctgagatcaaacatacggaaacaaagaactcaacccccccaaaatgtagaaagaaatacgcactgacaaacatccaggccgccatgggactgtccgaccccgctgcacaaccgcttctgggaaatgggagcgctaacatcaaacttgtcaaaaatggagaaaaccagctgcgcaaagccgcagagcagggacagcaggatcctaacaagaatctctcaccaactgccgtgattaacatcaccagcgagaagctcgagggaaaggaaccgcatccccaggatagctccagttgtgaaatcctcccatcccagccccgaagaaccaaatcatttttaaattactacgctgatcttgaaacgtctgcccgcgaactggagcagaacaggggtaaccatcacggcacagccgaagagaagtcacaacctgtgcagggacaggcaagcactataattggaaatggagacctacttctacagaaaccgaaccgaccccagtcctcccccgaggatggacaagttgccactgtgtcttctagtcccgagaccaagaaggaccaccccaagactggcgctaagaccgactgtgcccttcaccggattcaaaacttggccccatctgacgaagagtcctcttggacaactctctcacaggactcagcatcccctagctctccagacgagactgcagacatctggtcagatcattcattccaaacagaccccgatctgcctcctgggtggaaacgtgtgtctgacatagccggcacgtattattggcacattccgacaggcacgacacagtgggaaaggccagtgtctatcccagcagacctgcagggatctagaaagggcagcctgtccagcgtgaccccctctcctactcctgaaaacgagaagcaaccctggtctgatttcgctgtactaaacgggggcaagattaactccgatatttggaaggacttgcatgccgcgaccgtgaaccctgatcctagcctaaaggaatttgaaggggccacacttcggtatgccagtcttaagctgaggaacgcaccgcatcctgacgatgacgattcctgtagtattaatagcgatcccgaggccaagtgctttgccgtgcggtccctcggatgggtggagatggccgaagaggatctggccccgggaaagagctcagttgcggtgaataattgtattcgacagctgtcttattgcaagaacgacattagagatacagtgggtatctggggggaaggcaaagatatgtatctcatacttgaaaacgacatgctttccctcgtggatcctatggaccgaagcgttctccactctcaacccattgtgtctatccgcgtgtggggagtgggccgggataatggtagggattttgcgtacgtggctcgagacaaggatactagaatactcaaatgccacgtcttccgatgtgatactcctgccaaggccatcgcgaccagtctccacgaaatttgcagcaaaatcatggcggagcgaaagaacgcgaaggctttagcatgttcaagcctgcaggagagggccaacgtcaatcttgacgtgccactgcaggtagacttccctactcccaaaacagagctggtccagaagtttcacgtgcagtacctcggcatgctgcccgtggacaaacccgtgggcatggatatcctgaattcagccatcgaaaacctgatgactagcagtaacaaggaggattggctctcagtaaatatgaacgtagccgacgctaccgtcactgtgatcagcgagaaaaatgaggaagaggtgttggtggagtgcagagtgcgctttctctcctttatgggcgttggaaaagacgtgcacactttcgcattcattatggacacagggaatcagcgcttcgagtgtcatgtattttggtgtgagccaaatgctggaaacgtctctgaggccgtacaggcggcatgtatgctgcggtaccagaaatgcctggtggcacgacccccttcacagaaagtccgaccacccccacctcctgccgactctgtgacaaggcgagtaacaactaatgttaaacggggggtattgagtctgattgataccctcaagcaaaagagacctgtgaccgaaatgccctag

SEQ ID NO: 144968 - DNA, 2280 bp, Artificial Sequence
  derived and/or modified sequence
atgtctgaggtgctgcctgctgacagcggcgtggacaccctggccgtgttcatggccagcagcggcaccacagatgtgaccaacagaaacagccctgccaccccacccaacaccctgaacctgcggagcagccacaatgagctgctgaatgctgagatcaagcacacagagaccaagaacagcaccccacccaagtgcaggaagaagtatgccctgaccaacatccaggccgccatgggcctgagtgaccctgctgcccagcccctgctgggcaatggcagcgccaacatcaagctggtgaagaatggagagaaccagctgaggaaggctgctgagcagggccagcaggaccccaacaagaacctgagccccacagctgtgatcaacatcaccagcgagaagctggagggcaaggagccccacccccaggacagcagcagctgtgagatcctgcccagccagcccaggaggaccaagagcttcctgaactactatgctgacctggagaccagcgcccgggagctggagcagaacagaggcaaccaccacggcacagctgaggagaagagccagcctgtgcagggccaggccagcaccatcattggaaatggagacctgctgctgcagaagcccaaccggccccagagcagcccagaagatggccaggtggccaccgtgagcagcagccctgagaccaagaaggaccaccccaagacaggagccaagacagactgtgccctgcaccgcatccagaacctggcccccagtgatgaggagagctcctggaccaccctgagccaggacagcgccagccccagcagcccagatgaaacagctgacatctggagcgaccacagcttccagacagatcctgacctgcccccaggctggaagagggtgtctgacattgctggcacctactactggcacatccccaccggcaccacccagtgggagaggcctgtgtccatcccagctgacctgcagggcagcaggaagggcagcctgagctctgtgacccccagccccaccccagaaaatgagaagcagccctggagcgactttgctgtgctgaatggaggcaagatcaacagcgacatctggaaggacctgcatgctgccaccgtgaacccagaccccagcctgaaggagtttgaaggagccaccctgcgctatgccagcctgaagctgagaaatgccccccacccagatgatgatgacagctgcagcatcaacagcgaccctgaggccaagtgctttgctgtgcgcagcctgggctgggtggagatggccgaggaggacctggcccctgggaagagctctgtggccgtgaacaactgcatccggcagctgagctactgcaagaatgacatccgggacacagtgggcatctggggcgagggcaaggacatgtacctgatcctggagaatgacatgctgagcctggtggaccccatggacagatctgtgctgcacagccagcccatcgtgtccatccgggtgtggggcgtgggccgggacaatggccgggactttgcctacgtggcccgggacaaggacacccgcatcctgaagtgccacgtgttccgctgtgacaccccagccaaggccatcgccaccagcctgcacgagatctgcagcaagatcatggccgagaggaagaatgccaaggccctggcctgcagcagcctgcaggagcgggccaacgtgaacctggatgtgcccctgcaggtggacttccccacccccaagacagagctggtgcagaagttccacgtgcagtacctgggcatgctgcctgtggacaagcctgtgggcatggacatcctgaacagcgccatcgagaacctgatgaccagcagcaacaaggaggactggctgtctgtgaacatgaatgtggctgatgccaccgtgaccgtcatcagcgagaagaatgaggaggaggtgctggtggagtgccgggtgcgcttcctgtccttcatgggcgtgggcaaggatgtgcacacctttgccttcatcatggacaccggcaaccagagatttgagtgccacgtgttctggtgtgagcccaatgctggaaatgtgtctgaggccgtgcaggccgcctgcatgctgcgctaccagaagtgcctggtggcccggccccccagccagaaggtgcggcccccacctcctcctgctgacagcgtgacccggcgggtgaccaccaacgtgaagaggggcgtgctgagcctgattgacaccctgaagcagaagaggcctgtgacagagatgccctag

SEQ ID NO: 144969 - DNA, 2280 bp, Artificial Sequence
  derived and/or modified sequence
atgagcgaggtgctgcccgccgacagcggcgtggacaccctggccgtcttcatggctagctccggaaccacggacgtaacaaacaggaattcgcctgcaacacccccaaataccttgaatctgcgttcttcccacaacgaactactcaacgcggagatcaagcatactgagacaaagaacagcaccccacccaagtgcagaaagaagtatgctttaaccaacattcaagcggccatggggctgagcgatcctgccgcacagcctctgctgggcaacggaagcgccaatatcaagctggtcaagaacggtgaaaatcagctgagaaaggccgccgagcaggggcagcaggacccaaataaaaatctcagccctacggcagttatcaacataacatctgagaagctggaggggaaggagccgcatccccaggactcttcgtcctgtgagattctcccctcgcagcccaggagaacgaagagtttcctgaactactacgcagacctcgaaacttccgcacgcgagctcgagcagaatcgcggcaaccaccacggcacagccgaagagaagtcacaacccgtacaggggcaagcgtcaaccattattggcaacggtgacctgttgttgcagaagccgaatcggccacagagcagtccggaagatgggcaggtggctactgtgagtagttccccagaaactaagaaagaccacccaaagactggggctaagactgattgtgctctgcatagaatacagaacctggccccatctgacgaagaatcatcttggaccactttgtcacaagatagcgcaagccctagttcaccagacgaaacggccgacatttggagtgatcattctttccagacagaccctgacctcccgcctggctggaaacgagtgagcgatatcgcgggtacctactattggcacatccccacgggcacaactcagtgggaacgcccggtgtctatccccgcggacctacaaggcagcaggaaaggttccttgtcctcggtgacccccagcccaacccctgaaaatgaaaaacaaccctggtcggatttcgctgtgctcaatggggggaagataaactctgatatttggaaggatcttcatgcagctactgtcaacccagatccctccctgaaggaatttgaaggcgccacattaaggtatgcgtctctgaaactgcggaacgccccgcacccagatgacgatgatagctgtagtatcaatagcgacccggaggctaaatgcttcgcagttcgatcactgggctgggtcgagatggccgaggaggaccttgctccgggaaaatcatctgttgctgtcaataactgtatcaggcaactgagttattgcaagaatgatattagagacaccgtgggtatctggggagagggcaaagacatgtaccttattctcgagaacgatatgctgagtctcgtggatcccatggaccggagtgtgctccattctcagccaattgtgtccattagagtctggggggtgggccgggataatggtagggactttgcttacgtcgctagggacaaagataccagaatcttgaagtgtcacgtgtttcgctgtgatacacctgcgaaagcaatcgccactagccttcatgagatctgctctaagattatggctgaacgcaaaaatgcaaaggcgcttgcctgttcatctctccaggagcgggccaatgtgaacttggatgtcccactccaagttgactttccaacccctaagaccgagttagtccaaaaatttcacgttcagtatctaggcatgctgcccgtcgacaaacccgtgggcatggacatactgaattctgccattgaaaacctcatgacatcctcaaacaaggaggactggctcagcgttaatatgaacgtggccgatgccactgtgaccgtgatatccgaaaagaacgaggaggaagttctggtggaatgcagggtgagattcctcagttttatgggtgtgggaaaagatgtgcatacattcgcattcatcatggacaccggcaaccagaggttcgagtgtcacgtgttctggtgtgagcccaatgctggcaacgtaagtgaggctgtgcaggctgcctgtatgttgcggtaccagaagtgtctggtggccaggccaccctcgcagaaagtgaggccaccccctccgcctgctgactctgtcacaagacgagtaaccacaaatgtcaagcggggagtcctttcactaatcgacacactgaagcagaaacgacctgtgacagagatgccatag

SEQ ID NO: 144970 - DNA, 3592 bp, Artificial Sequence
  derived and/or modified sequence
gcccgttctggtctcaagtaggaagctagtgcgctgtaaccgcatctgatctgggcgctccgggaagggcgagactggagcagagccgctgggcgccggagccgaggcgagcgccgcgcgcaccactggttggagttgctgtgggtgagctgctgtggtctgtagccaagcatgctgtggtcggatctgcccagccgtggaacagaaacatttgctggatggaaaatccataaaagaaagctcctgtgaaaagctgaggctgacaataatttaagcaaaatcagatcgatctctttgggctgcctgacctccttgggtgcttgctattaattaacagactttgtggggaaaaaaaggagcttgccttctgagctttgtaccaaagacctgggaaaactaaccatctcagtctttcctgaggacttgggaactgccgaggcctctgccaatgtgttgactgtcgctatgggctcactgttgtccaggcagctcatatttcaaattataacctatttcctgcaccattgctgacgcctggtgatccatgtcagaagtacttccagctgactcaggtgttgacaccttggcagtgtttatggccagcagcggaactacagacgtcacaaatcggaacagcccagccacaccaccaaacacccttaacctccgatcctcccacaatgaactgttgaacgctgaaataaaacacacagaaaccaagaacagcacacctcccaaatgcaggaaaaaatatgcactaactaacatccaggcggccatgggcctctcggatccagctgcacagcccctgctgggaaatggctctgccaacatcaagctggtgaaaaatggggagaaccagctccgtaaggctgcagagcaagggcagcaggaccccaacaaaaacctgagccccactgcagtcatcaacataacttctgagaagttagagggtaaagagccccacccacaggattcctcgagctgtgagattttaccctcccagcccaggagaactaagagcttcctaaattactatgcagatctggaaacctcagccagagaactagagcagaaccgaggcaatcaccatgggactgcggaagagaaatcccagccagtccagggccaggcctccaccatcattgggaatggcgatttgctgctgcagaaaccaaacagaccccagtccagccctgaagacggccaagtagccacagtgtcatccagcccagaaaccaagaaggatcatccgaaaacaggggccaaaaccgactgtgcactgcaccggatccagaacctggcaccgagcgatgaggagtccagctggacaacgttgtcccaagacagtgcctcacccagctccccggatgaaacagcagatatatggagtgatcactcatttcagactgatccagatttgccgcctggctggaaaagagtcagtgacattgccgggacctattattggcacatcccaacaggaacgactcagtgggaacggcccgtctccatcccagcagatctccagggttctaggaaagggtcacttagttctgtaacgccatctcccaccccagagaacgagaaacagccatggagtgattttgctgttctgaatgggggaaagattaatagtgacatttggaaggatttgcatgcagccactgttaacccggaccccagtttaaaagagtttgaaggagcaaccctacgctatgcatctttgaaactcagaaatgccccacaccctgatgatgatgattcttgtagtatcaacagtgacccagaagccaagtgttttgctgtgcgttctctgggatgggtagagatggcagaagaggacctcgcccccggtaaaagtagtgttgcggtcaacaactgcatcaggcaactttcctactgcaaaaatgacatccgagacacagtcgggatttggggagaggggaaagacatgtacctgatcctggagaatgacatgctcagcctggtggaccccatggaccgcagcgtgctgcactcgcagcccatcgtcagcatccgcgtgtggggcgtgggccgcgacaatggccgggattttgcttatgtagcaagagataaagatacaagaattttgaaatgtcatgtatttcgatgtgacacaccagcaaaagccattgccacaagtctccacgagatctgctccaagattatggctgaacggaagaatgccaaagcgctggcctgcagctccttacaggaaagggccaatgtgaacctcgatgtccctttgcaagtagattttccaacaccaaagactgagctggtccagaagttccacgtgcagtacttgggcatgttacctgtagacaaaccagtcggaatggatattttgaacagtgccatagaaaatcttatgacctcatccaacaaggaggactggctgtcagtgaacatgaacgtggctgatgccactgtgactgtcatcagtgaaaagaatgaagaggaagtcttagtggaatgtcgtgtgcgattcctgtccttcatgggtgttgggaaggacgtccacacatttgccttcatcatggacacggggaaccagcgctttgagtgccacgttttctggtgcgagcctaatgctggtaacgtgtctgaggcggtgcaggccgcctgcatgttacgatatcagaagtgcttggtagccaggccgccttctcagaaagttcgaccacctccaccgccagcagattcagtaaccagaagagtcacaaccaatgtaaaacgaggggtcttatccctcattgacactttgaaacagaaacgccctgtcaccgaaatgccatagctgcacatgcaaaaggactcggctatttacctgaagattgactagctacactaaagaaaatgaactccgccatccgaccttccatccagttgctgatgctttgtcttcagagaatttacccttaaccaagcagtgttagacaagcatgttctctcgtcttgccaccatcatgtgatatgaaaagaagcatgaataattttttttgctgtaagttacatcatgcgcagtggaaggtctttttcttattgtaaatattgtgaacattacttaacttcacacacacacagagaagagtgtggccccacccctcctagtgaactaacgctgcgtccttggaatgaatgatgcgtgagttagtttcactgtcttcttggctggacctgtcacaagcaacctttaagtcctacagcactttgccctgttttcaacattggagtaggcactgcatagcagataccattgaattgctgtaaaaataggatggcgagtttgtgttttaatttttcataaaattgaacctgttggttgacaaaattggctgttggcatcagtatagaaaccaactggcagctttccctgacaagctctttgacacatggacaccatttcatgtctacagctgtttgtgggatgttggaaaaaaatgaaacttcaaaattgatgaaaaactaaattcgaggaattaaaatcgaacaaaacatagcctttcttttccgatggttttcaaactgattatttttaaaagagattaataaaatcataatgcat

SEQ ID NO: 144971 - DNA, 2280 bp, Artificial Sequence
  derived and/or modified sequence
atgtccgaggtgctgcccgctgactccggtgtcgacactctagctgtgttcatggcgagtagcggaactaccgatgtcacaaaccgaaacagccccgctacccctccaaacacactcaacctgcggtcttctcacaacgagctgttgaatgctgagattaagcatacggagactaagaattcgacccccccaaagtgccgcaagaaatacgccctgacaaatattcaggcggcaatgggtttatccgacccggcagcgcagccactcctggggaacggaagtgccaatataaaactggtcaaaaacggtgagaatcagttgcgtaaggccgctgaacagggccagcaggacccaaacaagaatctatccccgactgcggttattaacattactagcgagaagctggagggtaaggagccgcaccctcaagactcatcatcatgtgaaattcttccttcccaaccaaggcgaacaaagtcttttctcaactattacgctgacttagaaacctcagcccgagaattagagcagaacaggggaaaccatcacggaacagccgaggagaagtcacagccagtccagggacaggcctcaacaattatcgggaatggcgatctgcttctgcagaagccaaatcggccacagtcttctccagaggacggacaggttgccactgttagttctagcccagagacgaaaaaagatcaccccaagacgggggctaaaactgactgtgctctacatcggatacagaacctggccccatccgacgaagagtcctcctggaccaccctctctcaggattccgcctcgccctcttcaccagatgagacagcggacatctggtctgatcattcctttcagacagatccggatctgccgcctgggtggaagcgcgtctctgacatcgctggaacctattattggcacattcccaccggcactacccagtgggaaagacccgtgtctatccctgccgacctgcagggatctcgaaaaggctcactgtcaagcgtgaccccatctcctactcctgagaatgaaaagcaaccttggtctgacttcgccgtgctcaatggtggaaaaataaacagcgatatctggaaagatctccatgccgcaaccgttaacccggatccaagcttgaaggaattcgagggcgctacactcaggtatgcttctctgaaattgagaaatgctccgcatccagacgacgacgattcctgtagtatcaacagcgacccagaagctaagtgcttcgcggtgcggagccttggctgggtcgagatggctgaagaggatttggccccagggaagtccagtgtggccgtgaataattgcattaggcagttaagttattgtaagaatgatatccgggatactgtgggcatctggggtgaaggtaaggacatgtatctgatcctagagaacgacatgctcagcctcgtggatccgatggatcgcagtgttctgcatagtcagcccatcgtcagtatcagggtgtggggggtgggcagagacaacggtcgggactttgcctacgtggccagagacaaagatacacgaattctcaagtgccatgtttttcggtgtgacaccccagcaaaggccatcgcaacaagtcttcatgaaatctgctcgaaaattatggccgagcggaaaaacgcaaaagcgctggcatgctcctccttgcaggaaagggctaatgtgaacctggacgtacctcttcaggtagattttccaacgcctaagactgagttggtgcaaaagtttcatgtgcagtaccttggaatgctgcccgtcgacaagcctgtaggtatggacatactgaacagcgcaatcgagaacctcatgacatcatctaataaggaagattggttgtcagtcaacatgaacgtcgctgatgctacagtgaccgtcatatctgaaaagaatgaggaagaggtcctggtggaatgtcgcgtccgtttcctgagtttcatgggtgtgggcaaagatgtgcacacattcgcgtttatcatggacaccggaaatcaacgattcgaatgccatgtgttttggtgtgagccaaatgctgggaatgtttcagaggctgtgcaggccgcttgtatgctgaggtaccagaagtgcctcgttgccaggccaccctcgcagaaggtgcggccaccgccacctccggctgacagtgtgactcgcagagtgaccacgaatgtgaagaggggcgtgttatcgttgatcgacacactgaaacagaaaaggccagtcacagagatgccatag

SEQ ID NO: 144972 - DNA, 2280 bp, Artificial Sequence
  derived and/or modified sequence
atgagcgaggtgctgcccgccgacagcggcgtggacaccctggccgtgttcatggccagcagcggcaccaccgacgtgaccaacagaaacagccccgccaccccccccaacaccctgaacctgagaagcagccacaacgagctgctgaacgccgagatcaagcacaccgagaccaagaacagcaccccccccaagtgcagaaagaagtacgccctgaccaacatccaggccgccatgggcctgagcgaccccgccgcccagcccctgctgggcaacggcagcgccaacatcaagctggtgaagaacggcgagaaccagctgagaaaggccgccgagcagggccagcaggaccccaacaagaacctgagccccaccgccgtgatcaacatcaccagcgagaagctggagggcaaggagccccacccccaggacagcagcagctgcgagatcctgcccagccagcccagaagaaccaagagcttcctgaactactacgccgacctggagaccagcgccagagagctggagcagaacagaggcaaccaccacggcaccgccgaggagaagagccagcccgtgcagggccaggccagcaccatcatcggcaacggcgacctgctgctgcagaagcccaacagaccccagagcagccccgaggacggccaggtggccaccgtgagcagcagccccgagaccaagaaggaccaccccaagaccggcgccaagaccgactgcgccctgcacagaatccagaacctggcccccagcgacgaggagagcagctggaccaccctgagccaggacagcgccagccccagcagccccgacgagaccgccgacatctggagcgaccacagcttccagaccgaccccgacctgccccccggctggaagagagtgagcgacatcgccggcacctactactggcacatccccaccggcaccacccagtgggagagacccgtgagcatccccgccgacctgcagggcagcagaaagggcagcctgagcagcgtgacccccagccccacccccgagaacgagaagcagccctggagcgacttcgccgtgctgaacggcggcaagatcaacagcgacatctggaaggacctgcacgccgccaccgtgaaccccgaccccagcctgaaggagttcgagggcgccaccctgagatacgccagcctgaagctgagaaacgccccccaccccgacgacgacgacagctgcagcatcaacagcgaccccgaggccaagtgcttcgccgtgagaagcctgggctgggtggagatggccgaggaggacctggcccccggcaagagcagcgtggccgtgaacaactgcatcagacagctgagctactgcaagaacgacatcagagacaccgtgggcatctggggcgagggcaaggacatgtacctgatcctggagaacgacatgctgagcctggtggaccccatggacagaagcgtgctgcacagccagcccatcgtgagcatcagagtgtggggcgtgggcagagacaacggcagagacttcgcctacgtggccagagacaaggacaccagaatcctgaagtgccacgtgttcagatgcgacacccccgccaaggccatcgccaccagcctgcacgagatctgcagcaagatcatggccgagagaaagaacgccaaggccctggcctgcagcagcctgcaggagagagccaacgtgaacctggacgtgcccctgcaggtggacttccccacccccaagaccgagctggtgcagaagttccacgtgcagtacctgggcatgctgcccgtggacaagcccgtgggcatggacatcctgaacagcgccatcgagaacctgatgaccagcagcaacaaggaggactggctgagcgtgaacatgaacgtggccgacgccaccgtgaccgtgatcagcgagaagaacgaggaggaggtgctggtggagtgcagagtgagattcctgagcttcatgggcgtgggcaaggacgtgcacaccttcgccttcatcatggacaccggcaaccagagattcgagtgccacgtgttctggtgcgagcccaacgccggcaacgtgagcgaggccgtgcaggccgcctgcatgctgagataccagaagtgcctggtggccagaccccccagccagaaggtgagacccccccccccccccgccgacagcgtgaccagaagagtgaccaccaacgtgaagagaggcgtgctgagcctgatcgacaccctgaagcagaagagacccgtgaccgagatgccctag

SEQ ID NO: 144973 - protein, 204 aa, Artificial Sequence
  derived and/or modified sequence
MAEQEPTAEQLAQIAAENEEDEHSVNYKPPAQKSIQEIQELDKDDESLRKYKEALLGRVAVSADPNVPNVVVTGLTLVCSSAPGPLELDLTGDLESFKKQSFVLKEGVEYRIKISFRVNREIVSGMKYIQHTYRKGVKIDKTDYMVGSYGPRAEEYEFLTPVEEAPKGMLARGSYSIKSRFTDDDKTDHLSWEWNLTIKKDWKD

SEQ ID NO: 144974 - protein, 178 aa, Artificial Sequence
  derived and/or modified sequence
MAEQEPTAEQLAQIAAENEEDEHSVNYKPPAQKSIQEIQELDKDDESLRKYKEALLGRVAVSADPNVPNVVVTGLTLVCSSAPGPLELDLTGDLESFKKQSFVLKEGVEYRIKISFRVNREIVSGMKYIQHTYRKGVKIDKTDYMVGSYSIKSRFTDDDKTDHLSWEWNLTIKKDWKD

SEQ ID NO: 144975 - DNA, 615 bp, Artificial Sequence
  derived and/or modified sequence
atggccgagcaggagcccaccgccgagcagctggcccagatcgccgccgagaacgaggaggacgagcacagcgtgaactacaagccccccgcccagaagagcatccaggagatccaggagctggacaaggacgacgagagcctgagaaagtacaaggaggccctgctgggcagagtggccgtgagcgccgaccccaacgtgcccaacgtggtggtgaccggcctgaccctggtgtgcagcagcgcccccggccccctggagctggacctgaccggcgacctggagagcttcaagaagcagagcttcgtgctgaaggagggcgtggagtacagaatcaagatcagcttcagagtgaacagagagatcgtgagcggcatgaagtacatccagcacacctacagaaagggcgtgaagatcgacaagaccgactacatggtgggcagctacggccccagagccgaggagtacgagttcctgacccccgtggaggaggcccccaagggcatgctggccagaggcagctacagcatcaagagcagattcaccgacgacgacaagaccgaccacctgagctgggagtggaacctgaccatcaagaaggactggaaggactag

SEQ ID NO: 144976 - DNA, 537 bp, Artificial Sequence
  derived and/or modified sequence
atggccgagcaggagcccaccgccgagcagctggcccagatcgccgccgagaacgaggaggacgagcacagcgtgaactacaagccccccgcccagaagagcatccaggagatccaggagctggacaaggacgacgagagcctgagaaagtacaaggaggccctgctgggcagagtggccgtgagcgccgaccccaacgtgcccaacgtggtggtgaccggcctgaccctggtgtgcagcagcgcccccggccccctggagctggacctgaccggcgacctggagagcttcaagaagcagagcttcgtgctgaaggagggcgtggagtacagaatcaagatcagcttcagagtgaacagagagatcgtgagcggcatgaagtacatccagcacacctacagaaagggcgtgaagatcgacaagaccgactacatggtgggcagctacagcatcaagagcagattcaccgacgacgacaagaccgaccacctgagctgggagtggaacctgaccatcaagaaggactggaaggactag

SEQ ID NO: 144977 - DNA, 615 bp, Artificial Sequence
  derived and/or modified sequence
atggccgagcaggagcccactgctgaacagttggctcagattgcagcggagaatgaggaagatgagcattcagtgaactacaaacctcccgcgcagaaaagcatccaagaaatacaagagctcgacaaagacgacgagtccctgcgaaagtacaaagaagcactgctgggcagagtggccgtgtccgccgatccaaatgtgccaaacgtggtcgttacaggcttaacgctcgtatgttccagcgcacccggcccattggagctggacctgacgggggatctggagagtttcaaaaaacagagtttcgtgctgaaggagggagtcgagtatcgcattaagatttctttcagagtcaaccgcgaaattgtgtccggtatgaagtacatccagcacacataccgtaaaggcgtgaaaatcgacaagactgattacatggttggatcatacggacctcgtgcggaggaatacgagtttcttaccccggtagaggaagcacccaaaggtatgctggcacgggggtcctacagcatcaagtctagattcaccgatgatgataagaccgatcacctctcttgggagtggaatctgacaataaagaaggactggaaagattag

SEQ ID NO: 144978 - DNA, 537 bp, Artificial Sequence
  derived and/or modified sequence
atggcagagcaggagcctacggcagaacagctggcccagatagcggcagagaatgaagaggatgagcattccgtaaattataaaccacccgcgcagaagagcatccaagagatccaggaactggataaagacgacgaatctctccggaagtataaggaggccctgctcgggagggtcgcagtctccgccgatccaaacgtacctaatgtggtggtcaccggactgaccttggtctgctctagtgcccctggccctctggagttagatctgacaggggacctcgaatccttcaagaaacaaagcttcgtccttaaagagggcgtggaatacagaataaagattagcttcagagtgaaccgagaaatagtttctggaatgaaatacatccaacatacttaccgcaagggcgtaaagattgataaaaccgactacatggtgggctcctatagcatcaagtcgcggttcaccgacgacgataagaccgatcatctgtcctgggaatggaatttaactatcaagaaggactggaaggactag

SEQ ID NO: 144979 - DNA, 615 bp, Artificial Sequence
  derived and/or modified sequence
atggcagagcaggagcccaccgctgaacagctggcacagatcgcagccgagaatgaggaggacgaacatagtgtcaattacaagccaccagcacaaaagtctattcaggagatccaggaactggataaggacgatgagagcctccggaaatacaaggaggcactcttggggagagtcgccgtgtcagctgatcctaatgtgccgaacgtcgtggtaactggtcttacgcttgtgtgttcctctgccccgggccccctagagctcgacctcaccggggacctcgagtcttttaaaaaacagtcttttgtacttaaggaaggcgtggagtatagaattaagattagctttcgggtcaatcgcgagattgtgtccggcatgaaatacattcagcacacctatcggaaaggcgtcaagatagacaagacagattatatggtgggttcctatgggccccgggcagaagaatatgagttcttaactccggtcgaagaggccccgaaggggatgctcgctcgcggttcctactcaattaaaagcagattcaccgacgatgacaagactgaccatctgtcttgggagtggaacttaacaattaaaaaggactggaaggactag

SEQ ID NO: 144980 - DNA, 615 bp, Artificial Sequence
  derived and/or modified sequence
atggccgagcaggagcccacagctgagcagctggcccagattgctgctgaaaatgaggaggatgagcacagcgtgaactacaagcccccagcccagaagagcatccaggagatccaggagctggacaaggatgatgagagcctgaggaagtacaaggaggccctgctgggccgggtggccgtgtctgctgaccccaacgtgcccaacgtggtggtgacaggcctgaccctggtgtgcagcagcgcccctggccccctggagctggacctgactggagacctggagagcttcaagaagcagagctttgtgctgaaggagggcgtggagtaccgcatcaagatctccttccgggtgaaccgggagatcgtgtctggcatgaagtacatccagcacacctacagaaaaggagtgaagattgacaagacagactacatggtgggcagctatggccccagggctgaggagtatgagttcctgacccctgtggaggaggcccccaagggcatgctggcccggggcagctacagcatcaagagccgcttcacagatgatgacaagacagaccacctgtcctgggagtggaacctgaccatcaagaaggactggaaggactag

SEQ ID NO: 144981 - DNA, 537 bp, Artificial Sequence
  derived and/or modified sequence
atggccgagcaggagcccacagctgagcagctggcccagattgctgctgaaaatgaggaggatgagcacagcgtgaactacaagcccccagcccagaagagcatccaggagatccaggagctggacaaggatgatgagagcctgaggaagtacaaggaggccctgctgggccgggtggccgtgtctgctgaccccaacgtgcccaacgtggtggtgacaggcctgaccctggtgtgcagcagcgcccctggccccctggagctggacctgactggagacctggagagcttcaagaagcagagctttgtgctgaaggagggcgtggagtaccgcatcaagatctccttccgggtgaaccgggagatcgtgtctggcatgaagtacatccagcacacctacagaaaaggagtgaagattgacaagacagactacatggtgggcagctacagcatcaagagccgcttcacagatgatgacaagacagaccacctgtcctgggagtggaacctgaccatcaagaaggactggaaggactag

SEQ ID NO: 144982 - DNA, 615 bp, Artificial Sequence
  derived and/or modified sequence
atggccgagcaggagcccaccgccgagcagctggcccagatcgccgcagagaatgaggaagatgagcatagcgtaaactataagccccctgcccagaaatcaattcaggaaattcaagagttagataaggatgatgagtcactgcgaaagtacaaagaagcactgcttggaagagtcgccgtctcggctgatcctaacgtgcccaacgtcgtagtgaccgggcttactttggtgtgttcctccgcgccaggcccattggaactcgatctgaccggcgatctcgagtccttcaaaaagcagtctttcgtcctgaaggagggagtggagtatagaattaagatctcctttcgcgtgaacagagagatcgtgagtggtatgaagtacatacagcacacctaccgaaagggcgtaaaaatcgataaaacagactacatggtggggtcttacggacctcgggccgaggagtacgaattcctcaccccagttgaggaagctcccaaaggaatgctagcccgcggtagctattcaattaaatcgaggttcacagatgacgataagacagatcacttatcttgggagtggaacctgaccattaagaaggactggaaggattag

SEQ ID NO: 144983 - DNA, 537 bp, Artificial Sequence
  derived and/or modified sequence
atggccgagcaggagcccaccgccgagcagctggcccagatcgccgcagagaacgaggaggacgagcacagcgtgaattacaaaccccctgcacagaaatctattcaggagattcaggaattggacaaagatgacgagagtctaagaaagtacaaggaggccttactaggcagagtggctgtcagcgccgatcccaacgtgccgaatgttgtggtgacagggttgaccctggtatgcagtagtgcccccgggcccctcgaattagacctaaccggggacctggaaagtttcaaaaagcagagctttgtcctaaaggagggggtggagtacaggattaaaatttcattcagggtcaatagggagatcgtcagtgggatgaaatacatccagcatacgtacaggaagggtgtgaagatcgacaaaacagattacatggtgggttcctactctatcaaatcaagattcacagatgatgacaaaacagaccacctttcctgggagtggaacctaaccatcaagaaagactggaaggattag

SEQ ID NO: 144984 - DNA, 615 bp, Artificial Sequence
  derived and/or modified sequence
atggccgagcaggagcccaccgccgagcagctggcccagatcgccgctgagaatgaggaagacgaacattctgtgaactacaagccccctgcacagaagtccattcaagaaatccaggagttggacaaggacgatgagtccctcagaaaatataaggaggccctgttgggtagagtagctgtgagtgccgacccaaacgtgccaaacgtggtcgtaacgggcctgaccctggtctgctcctctgcccccggccctttggagcttgatttgactggggatctggagagcttcaaaaaacagtcttttgtactgaaggagggcgtggaatacagaattaagatcagcttcagggtgaaccgcgagatcgtgagtggcatgaaatacattcagcacacttatcggaaaggtgtgaaaattgacaaaaccgattacatggttggatcctatggccctagagcggaggagtacgaatttctgactcccgtcgaggaggcccccaaggggatgttagcccgcgggagctactccataaaaagccggttcacggacgacgacaaaaccgaccatctaagttgggagtggaatctgacaattaagaaggactggaaagactag

SEQ ID NO: 144985 - DNA, 615 bp, Artificial Sequence
  derived and/or modified sequence
atggccgagcaggaacctacagcagaacagttggctcagatcgcggctgagaacgaagaggatgagcatagtgtcaattataagcccccagctcagaaatcaatccaggaaatacaggagctggataaggatgacgaaagcctccgaaaatacaaagaggctctgctgggcagagtggcagtgagcgcagatcccaatgtgcccaacgtcgtagtcacagggcttacacttgtgtgctccagcgctcccggtcccctcgaactggatctcacaggcgacttagaatcctttaaaaagcaatcatttgtgttaaaggaaggcgtggaatatagaatcaagatatccttcagagtgaacagagagatagtctccggtatgaagtacatccagcacacttaccggaaaggcgttaagattgacaaaaccgactacatggtgggctcttatgggcctagagcggaggagtatgagtttctcaccccggtcgaagaagcgccaaagggtatgctggccagaggctcttattctatcaagtcgcgatttacggatgatgacaagacggaccatctgtcctgggagtggaatcttacaatcaaaaaagattggaaggattag

SEQ ID NO: 144986 - DNA, 537 bp, Artificial Sequence
  derived and/or modified sequence
atggccgagcaggagccaacggccgaacagctggcccaaattgctgctgagaatgaggaggacgaacactctgtcaattataagcccccagcacaaaaaagcatccaggagatacaagagttagataaggacgacgaatccctgcgaaagtacaaggaagctctcttaggcagagtcgcagtatcagctgacccaaacgtccccaatgttgttgtcacgggactgactttggtctgttcttctgcaccaggtccgctggagctggacttgactggcgatcttgagagttttaagaaacagtcattcgtgttgaaagagggggtggaatacaggatcaaaatatctttcagggtgaaccgagaaatcgtatccggaatgaagtacattcagcacacttatagaaagggagtcaagatcgacaagaccgactacatggtgggctcttacagtataaaatccaggttcacagacgacgacaagactgaccacctgagctgggaatggaaccttactataaaaaaggattggaaagattag

SEQ ID NO: 144987 - DNA, 615 bp, Artificial Sequence
  derived and/or modified sequence
atggctgagcaagaacccaccgccgagcaactagcacagatcgccgcagagaacgaagaagacgagcattccgtgaactacaaaccacccgctcaaaagtctatacaggaaattcaggagctggataaggatgacgagagcttgagaaaatataaggaggcgctcctgggccgagtggcagttagcgctgatcctaatgtaccaaacgtcgtagtaactggtctcactttggtttgcagctccgccccaggcccactagagttggatcttacaggcgacctcgagtctttcaagaagcagagcttcgtcttgaaggagggtgtagaatacaggattaagatcagtttccgtgtgaacagagaaattgtcagtggaatgaaatatatacaacatacttaccgtaaaggcgtaaagattgataagaccgactacatggtgggaagctacggaccgagagccgaagagtatgaatttctcaccccagtcgaggaggcgccaaagggaatgctcgctcgtggctcatactccatcaagtctaggttcaccgacgacgataaaactgaccatttgtcctgggagtggaatctgaccatcaagaaagattggaaagactag

SEQ ID NO: 144988 - DNA, 1905 bp, Artificial Sequence
  derived and/or modified sequence
gagcggaagtctcgtgaccccggaagtgacaggcagggcgggcggggcggccgacgacgttcgtcatttagtgcgggagggatcctgaaccgcgcggccgaaccctccggtgtcccgacccaggctaagcttgagcatggctgagcaggagcccacagccgagcagctggcccagattgcagcggagaacgaggaggatgagcactcggtcaactacaagcccccggcccagaagagcatccaggagatccaggagctggacaaggacgacgagagcctgcgaaagtacaaggaggccctgctgggccgcgtggccgtttccgcagaccccaacgtccccaacgtcgtggtgactggcctgaccctggtgtgcagctcggccccgggccccctggagctggacctgacgggcgacctggagagcttcaagaagcagtcgtttgtgctgaaggagggtgtggagtaccggataaaaatctctttccgggttaaccgagagatagtgtccggcatgaagtacatccagcatacgtacaggaaaggcgtcaagattgacaagactgactacatggtaggcagctatgggccccgggccgaggagtacgagttcctgacccccgtggaggaggcacccaagggtatgctggcccggggcagctacagcatcaagtcccgcttcacagacgacgacaagaccgaccacctgtcctgggagtggaatctcaccatcaagaaggactggaaggactgagcccagccagaggcgggcagggcagactgacggacggacgacggacaggcggatgtgtcccccccagcccctcccctccccataccaaagtgctgacaggccctccgtgcccctcccaccctggtccgcctccctggcctggctcaaccgagtgcctccgacccccctcctcagccctcccccacccacaggcccagcctcctcggtctcctgtctcgttgctgcttctgcctgtgctgtgggggagagaggccgcagccaggcctctgctgccctttctgtgccccccaggttctatctccccgtcacacccgaggcctggcttcaggagggagcggagcagccattctccaggccccgtggttgcccctggacgtgtgcgtctgctgctccggggtggagctggggtgtgggatgcacggcctcgtgggggccgggccgtcctccagccccgctgctccctggccagcccccttgtcgctgtcggtcccgtctaaccatgatgccttaacatgtggagtgtaccgtggggcctcactagcctctaactccctgtgtctgcatgagcatgtggcctccccgtcccttccccggtggcgaacccagtgacccagggacacgtggggtgtgctgctgctgctccccagcccaccagtgcctggccagcctgcccccttccctggacagggctgtggagatggctccggcggcttggggaaagccaaattgccaaaactcaagtcacctcagtaccatccaggaggctgggtattgtcctgcctctgccttttctgtctcagcgggcagtgcccagagcccacacccccccaagagccctcgatggacagcctcactcaccccacctgggcccagccaggagccccgcctggccatcagtatttattgcctccgtccgtgccgtccctgggccactggcctggcgcctgttcccccaggctctcagtgccaccacccccggcaggccttccctgacccagccaggaacaaacaagggaccaagtgcacacattgctgagagccgtctcctgtgcctcccccgccccatccccggtcttcgtgttgtgtctgccaggctcaggcagaggcgcctgtccctgcttcttttctgaccgggaaataaatgcccctgaagg

SEQ ID NO: 144989 - DNA, 2075 bp, Artificial Sequence
  derived and/or modified sequence
ggcagccgcggtccatcgcgttcgggggcgacgcggggattggggcgcggcctcccccagcgcccgggccacgcccggcacggattgcgggccctgcggaagtgcgggccgcgccctaggatcccggcgcctacggctatcctcgcgcggcgcggaggccccagcccctggaggaagcagggcggcctggaccccggcctgggtgtcccgggtgtgctgctccctgacccacctcccacgctgccgggaaggatctgagcctgacagatcccctgccgggtgtcccgacccaggctaagcttgagcatggctgagcaggagcccacagccgagcagctggcccagattgcagcggagaacgaggaggatgagcactcggtcaactacaagcccccggcccagaagagcatccaggagatccaggagctggacaaggacgacgagagcctgcgaaagtacaaggaggccctgctgggccgcgtggccgtttccgcagaccccaacgtccccaacgtcgtggtgactggcctgaccctggtgtgcagctcggccccgggccccctggagctggacctgacgggcgacctggagagcttcaagaagcagtcgtttgtgctgaaggagggtgtggagtaccggataaaaatctctttccgggttaaccgagagatagtgtccggcatgaagtacatccagcatacgtacaggaaaggcgtcaagattgacaagactgactacatggtaggcagctatgggccccgggccgaggagtacgagttcctgacccccgtggaggaggcacccaagggtatgctggcccggggcagctacagcatcaagtcccgcttcacagacgacgacaagaccgaccacctgtcctgggagtggaatctcaccatcaagaaggactggaaggactgagcccagccagaggcgggcagggcagactgacggacggacgacggacaggcggatgtgtcccccccagcccctcccctccccataccaaagtgctgacaggccctccgtgcccctcccaccctggtccgcctccctggcctggctcaaccgagtgcctccgacccccctcctcagccctcccccacccacaggcccagcctcctcggtctcctgtctcgttgctgcttctgcctgtgctgtgggggagagaggccgcagccaggcctctgctgccctttctgtgccccccaggttctatctccccgtcacacccgaggcctggcttcaggagggagcggagcagccattctccaggccccgtggttgcccctggacgtgtgcgtctgctgctccggggtggagctggggtgtgggatgcacggcctcgtgggggccgggccgtcctccagccccgctgctccctggccagcccccttgtcgctgtcggtcccgtctaaccatgatgccttaacatgtggagtgtaccgtggggcctcactagcctctaactccctgtgtctgcatgagcatgtggcctccccgtcccttccccggtggcgaacccagtgacccagggacacgtggggtgtgctgctgctgctccccagcccaccagtgcctggccagcctgcccccttccctggacagggctgtggagatggctccggcggcttggggaaagccaaattgccaaaactcaagtcacctcagtaccatccaggaggctgggtattgtcctgcctctgccttttctgtctcagcgggcagtgcccagagcccacacccccccaagagccctcgatggacagcctcactcaccccacctgggcccagccaggagccccgcctggccatcagtatttattgcctccgtccgtgccgtccctgggccactggcctggcgcctgttcccccaggctctcagtgccaccacccccggcaggccttccctgacccagccaggaacaaacaagggaccaagtgcacacattgctgagagccgtctcctgtgcctcccccgccccatccccggtcttcgtgttgtgtctgccaggctcaggcagaggcgcctgtccctgcttcttttctgaccgggaaataaatgcccctgaagg

SEQ ID NO: 144990 - protein, 182 aa, Artificial Sequence
  derived and/or modified sequence
MGLLSILRKLKSAPDQEVRILLLGLDNAGKTTLLKQLASEDISHITPTQGFNIKSVQSQGFKLNVWDIGGQRKIRPYWKNYFENTDILIYVIDSADRKRFEETGQELAELLEEEKLSCVPVLIFANKQDLLTAAPASEIAEGLNLHTIRDRVWQIQSCSALTGEGVQDGMNWVCKNVNAKKK

SEQ ID NO: 144991 - DNA, 549 bp, Artificial Sequence
  derived and/or modified sequence
atgggcttgctcagcattctgcgcaagctgaagagcgctcctgaccaggaagttaggatcctactccttggactggataacgcaggcaagactacacttctcaaacagttggctagtgaagacatcagccacattactccaacacagggttttaacattaagtccgttcagtcccagggatttaagctgaacgtttgggatatcggtggtcagaggaaaatccggccttactggaaaaactacttcgaaaacaccgatattttaatttacgtgatcgacagcgctgatcgaaaaaggtttgaggaaacaggccaggaactggcagagctgttggaggaggagaaactttcgtgtgtgcccgtcctcattttcgcaaataagcaagacctgttaactgcagctcccgcctccgagatcgcagagggactgaatctacacactatccgggatagagtttggcagattcagtcctgctccgccctcactggcgagggtgtgcaagatggtatgaactgggtttgcaagaacgttaacgcgaagaagaaatag

SEQ ID NO: 144992 - DNA, 1017 bp, Artificial Sequence
  derived and/or modified sequence
accccgccccgtattgctgctcagctcctcagctgtgcgtgcgagggacgtcgggggcggcgccgcagcagttgcccctggtaacgggggaggcagcaggaggaggaggaggaggagggactcggcgggaggatgggcttgctctcaattttgcgcaagttgaaaagtgcaccagaccaggaggtgagaatacttctcctgggcttggataatgctggcaagaccactcttctgaagcagcttgcatctgaagacatcagccacatcacacctacacagggtttcaacatcaaaagtgtacaatcacaaggttttaaactgaatgtatgggacattggtggacagaggaaaatcagaccatactggaagaattattttgaaaataccgatattcttatatatgtaatcgacagtgcagacagaaaaagatttgaagagacgggtcaggaactagcggaattactggaggaagaaaaactaagttgtgtgccagtgctcatctttgctaataagcaggatttgctcacagcagcccctgcctctgaaattgcagaaggactgaacctgcataccatccgcgaccgagtctggcagatccagtcttgctcagctctcacaggagagggcgttcaggatggcatgaactgggtctgcaaaaatgtcaatgcaaagaagaaataaaatctagacgaatggagatgcaggagctgcgggagccgaattcggtcctgaaaaacactaatttgctgctttctgaccaaatgtttttccatctgtgtacagctccagctgtttgaagagagggaacaacacggtttagaaagaatccccattccagcagtagatttaactgatctctgaggttcagtatcatttttcaaataaaggaattatattatttcctctgcataattgaaatagtattaaatgtctcaaagcacatgattagaaaatgagatcttttaaatgagcaagagattgcattgcagtttagacaattccagtgggctttttttt

SEQ ID NO: 144993 - DNA, 549 bp, Artificial Sequence
  derived and/or modified sequence
atgggcctgctgagcatcctgaggaagctgaagagcgccccagaccaggaggtgcgcatcctgctgctgggcctggacaatgctgggaagaccaccctgctgaagcagctggccagcgaggacatcagccacatcacccccacccagggcttcaacatcaagtctgtgcagagccagggcttcaagctgaatgtgtgggacatcggcggccagaggaagatccggccctactggaagaactactttgaaaatacagacatcctgatctacgtgattgacagcgctgacaggaagagatttgaggagaccggccaggagctggccgagctgctggaggaggagaagctgagctgtgtgcctgtgctgatctttgccaacaagcaggacctgctgacagctgccccagccagcgagattgctgagggcctgaacctgcacaccatccgggacagagtgtggcagatccagagctgcagcgccctgaccggggagggcgtgcaggacggcatgaactgggtgtgcaagaatgtgaatgccaagaagaagtag

SEQ ID NO: 144994 - DNA, 549 bp, Artificial Sequence
  derived and/or modified sequence
atgggcctgctgagcatcctgcggaagctgaagagcgcccccgaccaagaagtgcggatactgctcctgggccttgataatgcaggaaaaacaacattgctaaagcagctcgccagtgaggacatttcccatattacaccaacgcaggggtttaatattaagagcgtgcaatcacaggggtttaagctgaacgtctgggacataggaggtcagcgtaagattcgaccttattggaaaaactatttcgaaaatactgacatactcatctacgtgatcgattccgccgaccgaaaacgcttcgaggagactggtcaggagctcgcggagctcctggaagaggagaagctgagctgcgttccagttcttatctttgcgaacaaacaggacttgctgacagctgcacccgcctccgagattgcagaaggcttgaacctgcatacaattagggatagggtctggcagattcagtcctgcagcgcactgaccggagagggcgtgcaagacggcatgaactgggtttgcaaaaatgtgaacgcaaagaaaaaatag

SEQ ID NO: 144995 - DNA, 549 bp, Artificial Sequence
  derived and/or modified sequence
atggggttgctgagcatccttcgtaaattaaagagcgctcccgatcaggaggtgcggattctcctgctgggcctggacaatgctggaaagactaccctcctgaaacagctcgcgtcagaggacatctcacatatcaccccaacccaaggcttcaatatcaaaagcgtgcaatcacaaggtttcaaactcaacgtctgggacatcggaggacagaggaaaatacgaccgtattggaagaactatttcgagaatacagacatcctgatctacgtaatcgatagcgccgataggaagcgttttgaggagaccgggcaagaattagcagagctcttggaggaagaaaagctttcgtgcgtgccagtactcatatttgcaaataaacaagatttgcttaccgccgctccagctagcgagattgctgagggcctgaacctgcatacgatacgtgacagggtttggcagatacaatcgtgttctgccctcaccggggagggcgttcaagacggaatgaattgggtatgtaagaatgtcaatgccaagaagaagtag

SEQ ID NO: 144996 - DNA, 549 bp, Artificial Sequence
  derived and/or modified sequence
atgggcctgctgagcatcctgagaaagctgaagagcgcccccgaccaggaggtgagaatcctgctgctgggcctggacaacgccggcaagaccaccctgctgaagcagctggccagcgaggacatcagccacatcacccccacccagggcttcaacatcaagagcgtgcagagccagggcttcaagctgaacgtgtgggacatcggcggccagagaaagatcagaccctactggaagaactacttcgagaacaccgacatcctgatctacgtgatcgacagcgccgacagaaagagattcgaggagaccggccaggagctggccgagctgctggaggaggagaagctgagctgcgtgcccgtgctgatcttcgccaacaagcaggacctgctgaccgccgcccccgccagcgagatcgccgagggcctgaacctgcacaccatcagagacagagtgtggcagatccagagctgcagcgccctgaccggcgagggcgtgcaggacggcatgaactgggtgtgcaagaacgtgaacgccaagaagaagtag

SEQ ID NO: 144997 - protein, 388 aa, Artificial Sequence
  derived and/or modified sequence
MSKVFKKTSSNGKLSIYLGKRDFVDHVDTVEPIDGVVLVDPEYLKCRKLFVMLTCAFRYGRDDLEVIGLTFRKDLYVQTLQVVPAESSSPQGPLTVLQERLLHKLGDNAYPFTLQMVTNLPCSVTLQPGPEDAGKPCGIDFEVKSFCAENPEETVSKRDYVRLVVRKVQFAPPEAGPGPSAQTIRRFLLSAQPLQLQAWMDREVHYHGEPISVNVSINNCTNKVIKKIKISVDQITDVVLYSLDKYTKTVFIQEFTETVAANSSFSQSFAVTPILAASCQKRGLALDGKLKHEDTNLASSTIIRPGMDKELLGILVSYKVRVNLMVSCGGILGDLTASDVGVELPLVLIHPKPSHEAASSEDIVIEEFTRKGEEESQKAVEAEGDEGS

SEQ ID NO: 144998 - protein, 388 aa, Artificial Sequence [sequence omitted]

SEQ ID NO: 144999 - protein, 359 aa, Artificial Sequence
  derived and/or modified sequence
MSKVFKKTSSNGKLSIYLGKRDFVDHVDTVEPIDGVVLVDPEYLKCRKLFVMLTCAFRYGRDDLEVIGLTFRKDLYVQTLQVVPAESSSPQGPLTVLQERLLHKLGDNAYPFTLQMVTNLPCSVTLQPGPEDAGKPCGIDFEVKSFCAENPEETVSKRDYVRLVVRKVQFAPPEAGPGPSAQTIRRFLLSAQPLQLQAWMDREVHYHGEPISVNVSINNCTNKVIKKIKISVDQITDVVLYSLDKYTKTVFIQEFTETVAANSSFSQSFAVTPILAASCQKRGLALDGKLKHEDTNLASSTIIRPGMDKELLGILVSYKVRVNLMVSCGGILGDLTASDVGVELPLVLIHPKPSHEAAR

SEQ ID NO: 145000 - DNA, 1167 bp, Artificial Sequence
  derived and/or modified sequence
atgtccaaagttttcaaaaaaacatcctccaatggaaagctttccatttatttaggcaagagagattttgtggatcatgtggacacagtcgagcctatcgatggtgttgtgttggtggatcctgagtaccttaagtgccggaagctgttcgtaatgcttacatgcgcatttcgatatggaagagacgacctcgaagttattggtctgaccttccggaaggatctttacgttcaaaccctgcaagttgtgccagcagagagctcttccccccagggccccctcaccgtgcttcaggaaaggcttctgcacaagctaggtgacaatgcatatccttttacactgcagatggtgaccaacctgccttgcagcgtgactttacagccggggcccgaggatgctggcaaaccttgcggcatcgactttgaagtgaaatcattctgtgccgagaatccagaggaaacagtgtccaaaagggattacgtgaggttagtggtgcgcaaggtacagtttgctcctccagaggcaggaccaggtccgagtgcgcagacaatcaggcgtttcctcctgagcgcacagccgctgcagctacaggcttggatggaccgggaggtacactatcatggagagcccatctccgttaacgtcagcattaacaactgtacaaacaaggtcatcaagaagataaaaatatccgtggatcagatcacagatgtggtcctctatagcttagataaatataccaagaccgtgttcattcaggagtttactgaaaccgtggccgccaactccagcttcagtcagagcttcgccgtgacaccgattctggcggccagttgccagaagagaggtctcgcacttgatggcaaactgaagcacgaggataccaatctagcctcctccacaattataagacccggcatggataaagaacttctggggatcctcgtctcgtacaaggtgcgtgtcaatctgatggtttcgtgtggcgggatattaggagacctgaccgccagcgacgtgggggtggaacttcctctcgtcctcattcatcccaagccgagtcacgaagccgcttctagcgaggacatcgtgatcgaggagtttacccggaagggggaggaagagagccagaaagctgttgaagccgagggcgatgagggatcttag

SEQ ID NO: 145001 - DNA, 1167 bp, Artificial Sequence
  derived and/or modified sequence
atgagtaaggtgttcaaaaagacgtcatccaacggcaaactttctatctacctggggaagcgtgattttgtcgaccacgtcgacaccgtggaacccatcgacggcgttgtattggttgatcccgaatatctgaagtgccggaagctttttgtcatgttgacttgtgcttttaggtacgggagggatgacctggaggtgattggactcactttcagaaaggatttgtacgtgcagaccctccaagtggttcccgccgaatcttccagcccgcagggcccccttacagtgctccaggagcgactgctgcataagctaggggataacgcctatcccttcacactgcagatggtgacgaaccttccatgttccgtcaccctgcaaccagggcccgaggatgccgggaaaccctgtgggatagatttcgaggtgaagtccttttgcgccgagaatccagaagaaacggtcagtaagcgggattacgtgagactggtggtgcgaaaagtccagtttgctccacccgaagcaggccctggaccttcggctcagaccattcgccgattcttactctccgcgcagcctctccagcttcaggcctggatggacagagaagtccattatcacggcgagccaatttcagttaacgtgagtattaataattgtactaacaaggtcataaaaaagatcaagatttctgtagaccagatcactgatgttgttttgtattcccttgacaagtatactaagacggtcttcatccaagaattcacagagacggtggccgccaatagcagttttagtcagtcatttgcggttaccccgattttggcagcatcctgccagaagaggggcctggctctggatgggaaactgaagcatgaagacacaaatctggcctcttcgacaatcatcagacctggcatggacaaagaactcctggggatcctggtgtcatataaagtgcgcgtgaaccttatggtaagctgtgggggaatcctgggtgatctcacagcctccgacgtgggcgtggagttgccattggtgttaatccaccccaagccgagccacgcatccgcttcaagcgaagatattgtgatcgaagagtttaccaggaagggagaagaggagtcacagaaggcggttgaggccgagggtgacgaaggttcttag

SEQ ID NO: 145002 - DNA, 1080 bp, Artificial Sequence
  derived and/or modified sequence
atgtcaaaagtctttaaaaagacctcaagcaatggaaagctcagcatctatctgggtaagagagatttcgttgatcacgtggatactgtggaaccaatcgatggggtcgtgctcgtcgacccagagtatctaaagtgcaggaagctgtttgtgatgcttacatgtgcattccgctatgggcgagacgacctggaagtgattgggttgacttttaggaaggatctctatgtacaaaccttgcaagttgtgccggcagagtcatcgtcaccccagggacccctcaccgttctgcaggaacgattacttcacaagctcggagacaacgcctatccttttaccttacaaatggtcaccaacctcccttgctctgttacactgcaacccggtcctgaagatgctggtaaaccctgtggcattgactttgaggtgaaaagtttctgcgccgagaatcccgaagaaactgtcagcaagagggattatgtaagactggtggtgcgcaaggtgcagttcgcaccccccgaggccggtcccggtccaagcgcacagactattaggcgcttcctgctgtccgcccagcctcttcaactccaggcttggatggatagagaagtgcattaccacggggagcccatatccgtaaacgttagcatcaacaattgtacgaacaaggttatcaagaagattaaaattagtgtggaccagattacagacgtggtgctatatagtttagacaagtacacaaagaccgtatttattcaggaatttacagaaaccgtggctgctaactccagctttagccagtcttttgccgtgacgcccatcctagcagcctcatgccagaaaaggggcctggccctggacggcaaattgaagcacgaagacacaaatctcgcgagttctacaatcattagaccaggaatggataaggaattgttaggtattctagtgagctataaggtgcgggtcaacttaatggtctcatgtggaggcatcctgggggatctgactgccagcgacgttggcgtggaattgcccctcgtgctgatacatccaaaacccagccacgaagctgctaggtag

SEQ ID NO: 145003 - DNA, 1167 bp, Artificial Sequence
  derived and/or modified sequence
atgagcaaggtgttcaagaagaccagcagcaatggcaagctgagcatctacctgggcaagagggactttgtggaccacgtggacacagtggagcccattgatggagtggtgctggtggaccctgagtacctgaagtgcaggaagctgtttgtgatgctgacctgtgccttccgctatggaagagatgacctggaggtgattggcctgaccttcaggaaggacctgtatgtgcagaccctgcaggtggtgcctgctgagagcagcagcccccagggccccctgactgtgctgcaggagcggctgctgcacaagctgggggacaatgcctaccccttcaccctgcagatggtgaccaacctgccctgcagcgtgaccctgcagcccggcccagaagatgctgggaagccctgtggcatcgactttgaggtgaagagcttctgtgctgaaaatcctgaggagaccgtgtccaagagggactatgtgcggctggtggtgaggaaggtgcagtttgcccctcctgaggccggccctggccccagcgcccagaccatccgccgcttcctgctgagcgcccagcccctgcagctgcaggcctggatggaccgggaggtgcactaccatggagagcccatctctgtgaatgtgtccatcaacaactgcaccaacaaggtgatcaagaagatcaagatctctgtggaccagatcacagatgtggtgctgtacagcctggacaagtacaccaagacagtgttcatccaggagttcacagagaccgtggccgccaacagcagcttcagccagagctttgctgtgacccccatcctggccgccagctgccagaagaggggcctggccctggatggcaagctgaagcatgaggacaccaacctggccagcagcaccatcatccggcccggcatggacaaggagctgctgggcatcctggtgtcctacaaggtgcgggtgaacctgatggtgtcctgtggcggcatcctgggggacctgacagccagtgatgtgggcgtggagctgcccctggtgctgatccaccccaagcccagccatgaagctgccagcagtgaagatattgtgattgaggagttcaccaggaaaggagaggaggagagccagaaggctgtggaggccgagggagatgagggcagctag

SEQ ID NO: 145004 - DNA, 1167 bp, Artificial Sequence
  derived and/or modified sequence
atgagcaaggtgttcaagaagaccagcagcaatggcaagctgagcatctacctgggcaagagggactttgtggaccacgtggacacagtggagcccattgatggagtggtgctggtggaccctgagtacctgaagtgcaggaagctgtttgtgatgctgacctgtgccttccgctatggaagagatgacctggaggtgattggcctgaccttcaggaaggacctgtatgtgcagaccctgcaggtggtgcctgctgagagcagcagcccccagggccccctgactgtgctgcaggagcggctgctgcacaagctgggggacaatgcctaccccttcaccctgcagatggtgaccaacctgccctgcagcgtgaccctgcagcccggcccagaagatgctgggaagccctgtggcatcgactttgaggtgaagagcttctgtgctgaaaatcctgaggagaccgtgtccaagagggactatgtgcggctggtggtgaggaaggtgcagtttgcccctcctgaggccggccctggccccagcgcccagaccatccgccgcttcctgctgagcgcccagcccctgcagctgcaggcctggatggaccgggaggtgcactaccatggagagcccatctctgtgaatgtgtccatcaacaactgcaccaacaaggtgatcaagaagatcaagatctctgtggaccagatcacagatgtggtgctgtacagcctggacaagtacaccaagacagtgttcatccaggagttcacagagaccgtggccgccaacagcagcttcagccagagctttgctgtgacccccatcctggccgccagctgccagaagaggggcctggccctggatggcaagctgaagcatgaggacaccaacctggccagcagcaccatcatccggcccggcatggacaaggagctgctgggcatcctggtgtcctacaaggtgcgggtgaacctgatggtgtcctgtggcggcatcctgggggacctgacagccagtgatgtgggcgtggagctgcccctggtgctgatccaccccaagcccagccacgccagcgccagcagtgaagatattgtgattgaggagttcaccaggaaaggagaggaggagagccagaaggctgtggaggccgagggagatgagggcagctag

SEQ ID NO: 145005 - DNA, 1080 bp, Artificial Sequence
  derived and/or modified sequence
atgagcaaggtgttcaagaagaccagcagcaatggcaagctgagcatctacctgggcaagagggactttgtggaccacgtggacacagtggagcccattgatggagtggtgctggtggaccctgagtacctgaagtgcaggaagctgtttgtgatgctgacctgtgccttccgctatggaagagatgacctggaggtgattggcctgaccttcaggaaggacctgtatgtgcagaccctgcaggtggtgcctgctgagagcagcagcccccagggccccctgactgtgctgcaggagcggctgctgcacaagctgggggacaatgcctaccccttcaccctgcagatggtgaccaacctgccctgcagcgtgaccctgcagcccggcccagaagatgctgggaagccctgtggcatcgactttgaggtgaagagcttctgtgctgaaaatcctgaggagaccgtgtccaagagggactatgtgcggctggtggtgaggaaggtgcagtttgcccctcctgaggccggccctggccccagcgcccagaccatccgccgcttcctgctgagcgcccagcccctgcagctgcaggcctggatggaccgggaggtgcactaccatggagagcccatctctgtgaatgtgtccatcaacaactgcaccaacaaggtgatcaagaagatcaagatctctgtggaccagatcacagatgtggtgctgtacagcctggacaagtacaccaagacagtgttcatccaggagttcacagagaccgtggccgccaacagcagcttcagccagagctttgctgtgacccccatcctggccgccagctgccagaagaggggcctggccctggatggcaagctgaagcatgaggacaccaacctggccagcagcaccatcatccggcccggcatggacaaggagctgctgggcatcctggtgtcctacaaggtgcgggtgaacctgatggtgtcctgtggcggcatcctgggggacctgacagccagtgatgtgggcgtggagctgcccctggtgctgatccaccccaagcccagccatgaagctgccaggtag

SEQ ID NO: 145006 - DNA, 1167 bp, Artificial Sequence
  derived and/or modified sequence
atgagcaaggtgttcaagaagaccagcagcaacggcaagctgagcatctacctgggcaagcgagactttgtggatcacgtggataccgtggagccaatcgacggcgtcgttctcgttgatcccgagtacctcaagtgtcgcaaactatttgtgatgttaacctgtgcatttcgttacggtcgggacgacctcgaagtgatcggcttgacatttcggaaagacctgtacgttcagaccctgcaggtggttcctgcagagtcctccagtcctcaagggccgctcaccgtgctgcaggaaaggctcctccataaactgggcgacaatgcttatccctttaccctgcagatggtgaccaatctgccatgttccgtgactttgcagcctggaccagaggatgcgggaaagccctgcggaatcgactttgaggtgaaatccttctgcgcagagaatcctgaagagaccgtgagcaaacgcgactacgtgcggctggtcgtgcgtaaggtccagttcgcgccacccgaagccggcccaggcccaagcgcccagaccatccgacgctttttgctgtccgcccagcctctgcaattgcaggcatggatggatcgcgaggtacactatcacggcgagcctatctccgtgaatgtctcaatcaacaactgcactaacaaggtaatcaagaaaattaagataagcgtggatcagatcacagatgtggtcctgtacagtctggataagtatacgaagacagtttttatacaggagttcaccgagacagtagccgcgaattcttctttcagtcagtcctttgcagtgactcccatcctggccgcctcttgccagaaacgcggactcgccctcgatgggaaattgaaacacgaggataccaatctcgcttcgtccacaattattaggcctggcatggacaaggaactgctaggcattctagtgtcctataaagtcagggttaatttgatggtctcctgtggcggcatcctgggggatcttactgcatctgacgtgggagtggaactcccactggtactgattcatccaaagccctcccatgaggcagcttctagcgaggacatcgtgatcgaggaattcacacgaaaaggcgaggaggagtcacagaaggctgtagaggccgaaggagacgaggggtcttag

SEQ ID NO: 145007 - DNA, 1167 bp, Artificial Sequence
  derived and/or modified sequence
atgagcaaggtgttcaagaagaccagcagcaacggcaagctgagcatatacctcggcaagcgcgactttgtggatcatgtggacacggtcgagcctatagacggggtagtactggtcgaccctgaatatctgaagtgtcgaaagctcttcgttatgttgacgtgcgcgtttcggtacggcagggatgatctcgaggtgattggactgacctttagaaaggacctatatgttcagactctccaggtggtaccggcagagtcgagttcaccccagggccctttaaccgttctgcaggaaaggctactacataagcttggcgataatgcctacccttttacactgcagatggtgaccaaccttccttgtagcgtgaccctgcagcctggcccagaggacgcaggcaaaccttgtggaattgatttcgaggttaaatccttctgtgcagaaaatcccgaagaaaccgtgtctaaacgggattacgtgcgattggtggtccggaaagtccagtttgcccctcccgaggccggtcctggtccatccgcacagactatcaggcgatttttattgagtgcccagcctcttcagttgcaagcatggatggaccgcgaagtgcattaccatggcgaaccaattagcgtgaacgtcagcatcaataactgtactaataaagtaatcaagaagatcaagatctctgtcgatcaaatcaccgatgtggtgctctattctctggataaatacaccaaaacagttttcattcaggaattcactgagactgtggctgcaaattctagtttttcacagagtttcgcagtgactccaattttggccgcctcctgtcagaagcgcgggttggccctggacggtaagcttaaacacgaagacaccaaccttgcatcatcaactataatccggcccggtatggataaagaactactgggtatcctagtaagctataaggtcagggtgaatcttatggtgtcgtgtggtggtatactgggagacctgactgcctccgatgttggcgtcgaacttcctttggtgcttatacatccaaagccgtcccacgcatccgccagcagcgaggatatcgttatcgaagaattcacccgaaaaggagaggaagagtcacaaaaggctgtcgaagcggaaggtgacgaggggtcttag

SEQ ID NO: 145008 - DNA, 1080 bp, Artificial Sequence
  derived and/or modified sequence
atgagcaaggtgttcaagaagaccagcagcaacggcaagctgagcatctacctcgggaaacgggattttgtggatcatgtggacacagtggagccaatcgacggagtggtgctggttgatcccgaatatctcaaatgtcggaaactgttcgtaatgcttacgtgcgcgttccggtacggtagagatgacctggaagtgataggcctgacgtttagaaaagatctgtatgtccagaccctgcaagtggtgccggcagagagctctagtccacagggcccactgacagtgttacaagaacgcctgctgcataaactgggggacaatgcatacccattcaccctccaaatggttaccaaccttccatgcagcgtgacccttcagcctggacccgaggatgcagggaaaccatgtggtattgattttgaagtgaagagcttttgtgccgaaaatcccgaggagacagtctccaagagggattacgtgcggcttgtcgtaagaaaagtgcaattcgcccccccggaagctgggcccggccctagcgcgcagaccataagaagatttttgctctctgcgcaacccctgcaactccaggcatggatggatagagaagtccactatcatggagaacctatatcagttaatgtgtcaatcaataattgcacaaataaagtcataaagaagataaaaatctccgtagaccaaatcacagatgtggtcctctatagccttgataagtacaccaagactgtctttatccaggaatttacggagaccgttgccgcaaactccagcttttctcagtcattcgctgtgacccccatcctggctgcatcttgtcaaaaacggggactcgccttggatggtaagctgaagcatgaggatactaacctggctagttccaccatcatcaggcccggcatggataaagagcttttaggaatcttggtgagctataaagtacgtgtgaatttgatggtgagctgcgggggcatcctgggcgacctgaccgcgtctgatgttggtgtggagttgcccctggtgctgattcacccgaagccatcccacgaggctgctcggtag

SEQ ID NO: 145009 - DNA, 1167 bp, Artificial Sequence
  derived and/or modified sequence
atgagtaaggtgtttaagaaaacttccagtaacgggaagctcagtatatatctgggaaagagagatttcgttgatcatgtagacacagtagaacctatcgatggtgtagtgctggttgaccctgaatatctgaaatgtcggaagctatttgtcatgctcacatgcgcttttcgctatggcagagacgacttggaggtgatcggcctgacgtttaggaaggatctctatgtgcagactctgcaggttgtgcctgctgagtcgagcagtccacaggggcctctgactgtgctccaggagagattactgcacaaactgggggacaatgcgtatcctttcacgctacaaatggttaccaacctgccatgtagtgttacactccagccgggaccagaggacgctggaaagccatgtggaatagattttgaggtcaagtccttctgcgctgagaaccccgaagagaccgtgagtaagcgcgactatgtgaggctggtagttcgaaaggtgcagtttgcacccccagaggccggacccggtccctcggctcagaccattcgcagattcttactttccgcacagcctctccaactacaggcatggatggatcgagaggtccactatcatggggagccaattagtgttaatgtgtcaatcaacaactgtacgaataaggtcatcaagaaaattaaaatttcagtggatcaaatcactgacgtggtgctgtatagcttagacaaatacactaagaccgtcttcattcaggaatttactgagaccgtggctgctaactcctctttctcccagagcttcgccgtcacccccattctggcagcatcctgccagaaaaggggtctggcactggacgggaaactgaaacatgaggatacaaaccttgcctcaagcaccatcatccgtcctggcatggacaaggagctcctcgggatcttggtctcatataaggtgcgagtgaacctgatggtgtcttgtgggggaattctcggcgaccttacggcgagcgatgtaggcgtggaattgcccctggtgctcatccaccctaagcctagccacgaagccgcatcatcagaggacatcgtgatcgaggagtttacacgaaagggcgaggaagagtcacaaaaggcagtagaggcagaaggagacgaaggcagttag

SEQ ID NO: 145010 - DNA, 1167 bp, Artificial Sequence
  derived and/or modified sequence
atgagtaaggtatttaagaagacctcatcaaacggtaagctgagtatctatcttggaaagcgtgacttcgtggatcacgttgacacggtggagccaatcgacggtgtggtgctggtcgaccctgaatacttaaaatgtcgcaagctgttcgtgatgctcacttgcgcatttcgctacggccgtgatgacctagaggttatcggactcacctttaggaaggacctatacgtccagacactgcaggtggttccagcagagagttcttcaccccagggaccgctgaccgtgttacaggaacgcctccttcataagctaggggataacgcttatccttttacccttcaaatggttaccaacctgccgtgttctgtgaccctgcagccgggacccgaagacgcaggcaagccttgtggaattgatttcgaagtaaagagcttctgtgccgagaaccctgaggagactgtatcaaaacgggattatgttagattggttgttagaaaggtgcagtttgcccctcctgaggctggcccaggccctagcgcccagactattagacgcttcctgctgagtgcccagcctctgcagctgcaggcctggatggacagagaagtgcattatcatggcgaacccatctccgtgaacgtctcaatcaacaactgcacaaataaagtcatcaaaaaaatcaagatctctgtggaccagattactgacgtcgttctctattctctcgataagtacacgaaaacagtcttcatccaggagtttacagagaccgtggcagccaattcttctttttcacaatcctttgccgtgactcccatcctggccgctagttgccagaagcgtggattggcattagatgggaaactgaagcatgaagataccaacctggcaagctctaccatcatccggccaggtatggacaaggagctgctgggaattctcgtgtcttacaaggtgagggtcaacctcatggtatcctgtggaggcatcttgggcgacctgactgcctccgacgttggagtggaactacctttagtgttgatccatccaaaaccatcacatgcctctgcttcttctgaagacatcgtgatagaggagttcacccgcaagggagaagaggagtcccagaaagcagtggaggccgaaggggacgaaggctcctag

SEQ ID NO: 145011 - DNA, 1080 bp, Artificial Sequence
  derived and/or modified sequence
atgtcaaaggtgttcaaaaagactagctccaacggcaagctttctatctaccttggcaagagggactttgtcgatcacgtggacactgtggagcctatcgatggagtggttctggtggaccccgaatacctgaagtgccgcaaactattcgtcatgctcacttgcgcattccggtatggtcgcgatgaccttgaagtcattggcctcacattccggaaggatttgtatgttcaaacccttcaagtggtccctgctgagagtagctcaccccaaggccctctcaccgtgctgcaggaaagactgcttcacaagctcggcgacaacgcctacccctttaccctgcaaatggtgactaatttgccttgttcggtcacattgcaacccggacccgaagatgctggaaaaccatgcggtattgactttgaagtgaaatccttttgcgctgagaaccctgaggagaccgtaagcaagcgtgactatgtcagattggtagtgagaaaggtccagtttgccccacccgaagccggaccaggaccttcagctcagaccatacgtcggttcctgctgagtgctcagcccctgcagctgcaggcctggatggacagggaggttcactatcacggtgagccaatttcagtcaatgtctccattaacaactgcaccaataaagtgatcaagaaaatcaagattagcgtggatcagatcacggacgttgttctatactccctggataagtatacaaaaacagtatttattcaggaattcacggagaccgtggccgctaatagcagcttctctcagtctttcgctgttactcccattcttgccgcttcctgtcaaaagagagggctggccctggatggcaaactaaagcatgaggatactaatctggctagcagtaccatcattagacctggtatggataaagaactcctcggcattcttgtgtcatacaaggtgcgggtgaatctgatggtatcctgtgggggaatccttggcgatctgacggctagtgatgtgggagtggagctgccactcgtgctgattcaccccaagcccagccacgaggccgcacggtag

SEQ ID NO: 145012 - DNA, 1292 bp, Artificial Sequence
  derived and/or modified sequence
gaacttcatctctctccccagaaaaggctcaacatcaactatatagccaacatgtccaaggtgtttaagaagaccagctccaatgggaagctctccatctacctggggaaacgggacttcgtggaccatgtggacacggtggaacccattgacggtgttgtcctggttgatcctgagtacttaaaatgtcgaaagttgtttgtcatgttgacatgtgcctttcgctatggccgtgatgacttggaagtgattggtctgacgttccgaaaagatctgtatgtgcagaccctgcaagtggtcccagctgaatccagcagccctcaggggcccctcacagtcctacaggagcgactactgcacaagctaggggacaatgcctacccctttaccctgcagatggtgaccaacctgccctgttctgtgacactgcagccaggtcctgaagatgcaggaaagccctgtgggattgactttgaagtgaagagtttctgtgctgaaaacccagaggagacagtctccaagagagactatgtgcggctggttgtccggaaagtacaatttgcaccaccggaggcaggccctggcccctcagcccagaccatccgccgcttccttctgtcagctcagcccctacaactccaggcctggatggacagggaggttcactaccacggagaacccatctctgtcaatgtttctatcaacaactgcaccaacaaggtcatcaaaaaaatcaagatttcagttgaccagatcacagatgttgtcctgtattcactagacaagtacaccaagactgtgttcattcaggaattcacggagactgtagctgctaattccagcttctcccagagctttgcagtaaccccaatcctggctgccagctgccagaaacggggcctggcactggatggcaaacttaagcatgaagataccaacctggcctctagcacaattattagaccgggaatggacaaagagctgctggggatcctggtgtcctacaaagtcagagtcaacctgatggtgtcctgtggtggcatcctaggagacctgacagccagcgatgttggtgtggagctacccttggtcctgatccatccgaagccatctcatgaggccgctagctctgaggacatagtcatcgaggagtttacgcggaaaggcgaggaggagagccagaaggctgtggaggctgagggagatgaggggagctgagcacctcgctctggtgcccgtctgtgtgggagcccccactgtaacactctaataaatcagtttgttcagatgtg

SEQ ID NO: 145013 - DNA, 1309 bp, Artificial Sequence
  derived and/or modified sequence
gagctggagactgatgtgaacttcatctctctccccagaaaaggctcaacatcaactatatagccaacatgtccaaggtgtttaagaagaccagctccaatgggaagctctccatctacctggggaaacgggacttcgtggaccatgtggacacggtggaacccattgacggtgttgtcctggttgatcctgagtacttaaaatgtcgaaagttgtttgtcatgttgacatgtgcctttcgctatggccgtgatgacttggaagtgattggtctgacgttccgaaaagatctgtatgtgcagaccctgcaagtggtcccagctgaatccagcagccctcaggggcccctcacagtcctacaggagcgactactgcacaagctaggggacaatgcctacccctttaccctgcagatggtgaccaacctgccctgttctgtgacactgcagccaggtcctgaagatgcaggaaagccctgtgggattgactttgaagtgaagagtttctgtgctgaaaacccagaggagacagtctccaagagagactatgtgcggctggttgtccggaaagtacaatttgcaccaccggaggcaggccctggcccctcagcccagaccatccgccgcttccttctgtcagctcagcccctacaactccaggcctggatggacagggaggttcactaccacggagaacccatctctgtcaatgtttctatcaacaactgcaccaacaaggtcatcaaaaaaatcaagatttcagttgaccagatcacagatgttgtcctgtattcactagacaagtacaccaagactgtgttcattcaggaattcacggagactgtagctgctaattccagcttctcccagagctttgcagtaaccccaatcctggctgccagctgccagaaacggggcctggcactggatggcaaacttaagcatgaagataccaacctggcctctagcacaattattagaccgggaatggacaaagagctgctggggatcctggtgtcctacaaagtcagagtcaacctgatggtgtcctgtggtggcatcctaggagacctgacagccagcgatgttggtgtggagctacccttggtcctgatccatccgaagccatctcatgcttctgcaagctctgaggacatagtcatcgaggagtttacgcggaaaggcgaggaggagagccagaaggctgtggaggctgagggagatgaggggagctgagcacctcgctctggtgcccgtctgtgtgggagcccccactgtaacactctaataaatcagtttgttcagatgtg

SEQ ID NO: 145014 - DNA, 1298 bp, Artificial Sequence
  derived and/or modified sequence
aagaggctggggaggcaggcatagcaaccagagctggagactgatgtgaacttcatctctctccccagaaaaggctcaacatcaactatatagccaacatgtccaaggtgtttaagaagaccagctccaatgggaagctctccatctacctggggaaacgggacttcgtggaccatgtggacacggtggaacccattgacggtgttgtcctggttgatcctgagtacttaaaatgtcgaaagttgtttgtcatgttgacatgtgcctttcgctatggccgtgatgacttggaagtgattggtctgacgttccgaaaagatctgtatgtgcagaccctgcaagtggtcccagctgaatccagcagccctcaggggcccctcacagtcctacaggagcgactactgcacaagctaggggacaatgcctacccctttaccctgcagatggtgaccaacctgccctgttctgtgacactgcagccaggtcctgaagatgcaggaaagccctgtgggattgactttgaagtgaagagtttctgtgctgaaaacccagaggagacagtctccaagagagactatgtgcggctggttgtccggaaagtacaatttgcaccaccggaggcaggccctggcccctcagcccagaccatccgccgcttccttctgtcagctcagcccctacaactccaggcctggatggacagggaggttcactaccacggagaacccatctctgtcaatgtttctatcaacaactgcaccaacaaggtcatcaaaaaaatcaagatttcagttgaccagatcacagatgttgtcctgtattcactagacaagtacaccaagactgtgttcattcaggaattcacggagactgtagctgctaattccagcttctcccagagctttgcagtaaccccaatcctggctgccagctgccagaaacggggcctggcactggatggcaaacttaagcatgaagataccaacctggcctctagcacaattattagaccgggaatggacaaagagctgctggggatcctggtgtcctacaaagtcagagtcaacctgatggtgtcctgtggtggcatcctaggagacctgacagccagcgatgttggtgtggagctacccttggtcctgatccatccgaagccatctcatgaggccgctaggtaatggaatacaagattgggaagccccattcccctcttcccatttccaccctccatgttatgacgatagaaatgtgaaaatgcttccttggggtgctttcaatacatgtgcagtggaaacata

SEQ ID NO: 145015 - DNA, 1167 bp, Artificial Sequence
  derived and/or modified sequence
atgagcaaggtgttcaagaagaccagcagcaacggcaagctgagcatctacctgggcaagagagacttcgtggaccacgtggacaccgtggagcccatcgacggcgtggtgctggtggaccccgagtacctgaagtgcagaaagctgttcgtgatgctgacctgcgccttcagatacggcagagacgacctggaggtgatcggcctgaccttcagaaaggacctgtacgtgcagaccctgcaggtggtgcccgccgagagcagcagcccccagggccccctgaccgtgctgcaggagagactgctgcacaagctgggcgacaacgcctaccccttcaccctgcagatggtgaccaacctgccctgcagcgtgaccctgcagcccggccccgaggacgccggcaagccctgcggcatcgacttcgaggtgaagagcttctgcgccgagaaccccgaggagaccgtgagcaagagagactacgtgagactggtggtgagaaaggtgcagttcgccccccccgaggccggccccggccccagcgcccagaccatcagaagattcctgctgagcgcccagcccctgcagctgcaggcctggatggacagagaggtgcactaccacggcgagcccatcagcgtgaacgtgagcatcaacaactgcaccaacaaggtgatcaagaagatcaagatcagcgtggaccagatcaccgacgtggtgctgtacagcctggacaagtacaccaagaccgtgttcatccaggagttcaccgagaccgtggccgccaacagcagcttcagccagagcttcgccgtgacccccatcctggccgccagctgccagaagagaggcctggccctggacggcaagctgaagcacgaggacaccaacctggccagcagcaccatcatcagacccggcatggacaaggagctgctgggcatcctggtgagctacaaggtgagagtgaacctgatggtgagctgcggcggcatcctgggcgacctgaccgccagcgacgtgggcgtggagctgcccctggtgctgatccaccccaagcccagccacgaggccgccagcagcgaggacatcgtgatcgaggagttcaccagaaagggcgaggaggagagccagaaggccgtggaggccgagggcgacgagggcagctag

SEQ ID NO: 145016 - DNA, 1167 bp, Artificial Sequence
  derived and/or modified sequence
atgagcaaggtgttcaagaagaccagcagcaacggcaagctgagcatctacctgggcaagagagacttcgtggaccacgtggacaccgtggagcccatcgacggcgtggtgctggtggaccccgagtacctgaagtgcagaaagctgttcgtgatgctgacctgcgccttcagatacggcagagacgacctggaggtgatcggcctgaccttcagaaaggacctgtacgtgcagaccctgcaggtggtgcccgccgagagcagcagcccccagggccccctgaccgtgctgcaggagagactgctgcacaagctgggcgacaacgcctaccccttcaccctgcagatggtgaccaacctgccctgcagcgtgaccctgcagcccggccccgaggacgccggcaagccctgcggcatcgacttcgaggtgaagagcttctgcgccgagaaccccgaggagaccgtgagcaagagagactacgtgagactggtggtgagaaaggtgcagttcgccccccccgaggccggccccggccccagcgcccagaccatcagaagattcctgctgagcgcccagcccctgcagctgcaggcctggatggacagagaggtgcactaccacggcgagcccatcagcgtgaacgtgagcatcaacaactgcaccaacaaggtgatcaagaagatcaagatcagcgtggaccagatcaccgacgtggtgctgtacagcctggacaagtacaccaagaccgtgttcatccaggagttcaccgagaccgtggccgccaacagcagcttcagccagagcttcgccgtgacccccatcctggccgccagctgccagaagagaggcctggccctggacggcaagctgaagcacgaggacaccaacctggccagcagcaccatcatcagacccggcatggacaaggagctgctgggcatcctggtgagctacaaggtgagagtgaacctgatggtgagctgcggcggcatcctgggcgacctgaccgccagcgacgtgggcgtggagctgcccctggtgctgatccaccccaagcccagccacgccagcgccagcagcgaggacatcgtgatcgaggagttcaccagaaagggcgaggaggagagccagaaggccgtggaggccgagggcgacgagggcagctag

SEQ ID NO: 145017 - DNA, 1080 bp, Artificial Sequence
  derived and/or modified sequence
atgagcaaggtgttcaagaagaccagcagcaacggcaagctgagcatctacctgggcaagagagacttcgtggaccacgtggacaccgtggagcccatcgacggcgtggtgctggtggaccccgagtacctgaagtgcagaaagctgttcgtgatgctgacctgcgccttcagatacggcagagacgacctggaggtgatcggcctgaccttcagaaaggacctgtacgtgcagaccctgcaggtggtgcccgccgagagcagcagcccccagggccccctgaccgtgctgcaggagagactgctgcacaagctgggcgacaacgcctaccccttcaccctgcagatggtgaccaacctgccctgcagcgtgaccctgcagcccggccccgaggacgccggcaagccctgcggcatcgacttcgaggtgaagagcttctgcgccgagaaccccgaggagaccgtgagcaagagagactacgtgagactggtggtgagaaaggtgcagttcgccccccccgaggccggccccggccccagcgcccagaccatcagaagattcctgctgagcgcccagcccctgcagctgcaggcctggatggacagagaggtgcactaccacggcgagcccatcagcgtgaacgtgagcatcaacaactgcaccaacaaggtgatcaagaagatcaagatcagcgtggaccagatcaccgacgtggtgctgtacagcctggacaagtacaccaagaccgtgttcatccaggagttcaccgagaccgtggccgccaacagcagcttcagccagagcttcgccgtgacccccatcctggccgccagctgccagaagagaggcctggccctggacggcaagctgaagcacgaggacaccaacctggccagcagcaccatcatcagacccggcatggacaaggagctgctgggcatcctggtgagctacaaggtgagagtgaacctgatggtgagctgcggcggcatcctgggcgacctgaccgccagcgacgtgggcgtggagctgcccctggtgctgatccaccccaagcccagccacgaggccgccagatag

SEQ ID NO: 145018 - protein, 409 aa, Artificial Sequence
  derived and/or modified sequence
MGEKPGTRVFKKSSPNCKLTVYLGKRDFVDHLDKVDPVDGVVLVDPDYLKDRKVFVTLTCAFRYGREDLDVLGLSFRKDLFIATYQAFPPVPNPPRPPTRLQDRLLRKLGQHAHPFFFTIPQNLPCSVTLQPGPEDTGKACGVDFEIRAFCAKSLEEKSHKRNSVRLVIRKVQFAPEKPGPQPSAETTRHFLMSDRSLHLEASLDKELYYHGEPLNVNVHVTNNSTKTVKKIKVSVRQYADICLFSTAQYKCPVAQLEQDDQVSPSSTFCKVYTITPLLSDNREKRGLALDGKLKHEDTNLASSTIVKEGANKEVLGILVSYRVKVKLVVSRGGDVSVELPFVLMHPKPHDHIPLPRPQSAAPETDVPVDTNLIEFDTNYATDDDIVFEDFARLRLKGMKDDDYDDQLC

SEQ ID NO: 145019 - DNA, 1230 bp, Artificial Sequence
  derived and/or modified sequence
atgggggagaagccagggactagagtgtttaagaagtctagcccaaattgcaagctcacagtctacctgggcaaacgcgatttcgttgatcacctggataaagtggaccctgtagacggcgtggtgttggttgatcccgattacctgaaggaccggaaggtctttgtaacgctgacatgtgcattcagatatggacgtgaggatcttgatgtccttggtctttctttcaggaaagacctcttcatcgctacatatcaggccttccctcccgtgcccaacccccctagaccacccacaaggctgcaggaccgcctgttgcggaaactcggacagcacgctcaccctttcttcttcaccatccctcagaacttaccctgctcagtcactctgcagcccggccccgaggatactggcaaagcatgcggagtggatttcgagatccgggcattctgtgccaaatccttggaagagaaaagccacaagcggaattctgtgcggcttgtcattcggaaggttcagtttgcccccgaaaagcccgggccgcagccgtccgcagagaccacgagacatttcctgatgtccgacaggagtctacatctggaggccagccttgacaaggagttgtattaccacggtgagccactgaacgtaaacgttcacgtgactaataatagcacgaagacagtgaagaaaatcaaggtaagcgtccgccagtatgccgacatttgtcttttttcgacagcccagtacaagtgccctgtcgcacagctggagcaagatgaccaggtgagtcccagtagtacgttctgtaaagtgtacacgatcactcctttactttctgataatcgagaaaagcggggtctggccctggatggcaagttgaagcacgaggacaccaacctggctagctctacaatcgtgaaggagggcgctaataaagaggttcttggaatcctggtgtcgtacagagtcaaggtcaagctcgtcgtaagtcgcggaggagatgtcagcgttgagcttccatttgttctgatgcatccaaagcctcacgatcacattcctctgccccgtcctcagtccgcagcccccgagaccgacgtaccggtcgatactaatctgatcgaatttgacaccaactatgctacagatgatgatattgtcttcgaggattttgcgagattacgcctgaaggggatgaaagacgacgattatgacgaccagctgtgctag

SEQ ID NO: 145020 - DNA, 1233 bp, Artificial Sequence
  derived and/or modified sequence
gctgccaaccgggcgggtggcggacgcgcccaccacggaggcgagacacgggaccaactgacagtgtacctcggtaagcgggattttgtagaccacctggataaagtggatccagttgacggagtagtgctcgtggaccccgactacctgaaggatcggaaggtgtttgtgaccctgacatgtgctttcagatacggcagggaagacctcgatgtgttggggctgtcattccggaaggacctatttatagcgacataccaggctttccctcctgtacctaacccaccacggccgcctacaagattgcaggatcggctgctgaggaaactcggacagcacgcacatccttttttctttaccattcctcaaaacctgccatgcagtgtcaccctgcaaccagggccagaggacaccggcaaagcttgtggcgtcgatttcgagatccgggctttctgtgcaaagtcgctagaagagaagagtcacaaacgcaattccgtgagattagtcattaggaaagtccagttcgcacccgagaagccgggacctcaaccctctgctgagaccacacgccattttctgatgtccgaccgatcattgcatctcgaagcttctctggataaggagctgtactaccatggtgagccgttgaatgtgaatgtccatgtcacaaataacagtacaaagactgtgaagaaaattaaggtgtccgtgagacaatacgctgacatctgcctgttttctaccgcgcagtacaaatgccccgtcgcgcaactggagcaagatgaccaagtgtccccatcctctacattctgcaaagtgtatacgatcaccccccttttgtccgacaatcgtgagaagcgcggcctggcccttgatgggaagctgaaacacgaggataccaacttggccagttccacaatcgtcaaggaaggggcaaataaggaagtactcggcattctcgtgtcctatcgggtgaaggtgaagctggtcgtgtctcgggggggcgatgtttctgtggagttgcccttcgtgctgatgcatcccaagcctcatgaccacattccccttccaagaccccagtccgcggcccccgagactgatgttccggtggacaccaatctgatcgagtttgacacaaattacgctaccgatgatgatatcgtgttcgaggatttcgcccgcctgcggttgaagggcatgaaggacgatgactatgacgatcagctctgctag

SEQ ID NO: 145021 - DNA, 1230 bp, Artificial Sequence
  derived and/or modified sequence
atgggagagaagccaggcaccagggtcttcaagaagagcagccccaactgcaagctgactgtgtacctgggcaagagggactttgtggaccacctggacaaggtggaccctgtggatggagtggtgctggtggaccctgactacctgaaggacaggaaggtgtttgtgaccctgacctgtgccttccgctatggaagagaggacctggatgtgctgggcctgtccttcaggaaggacctcttcatcgccacctaccaggccttcccccctgtgcccaacccccccaggcctcccacccggctgcaggaccggctgctgaggaagctgggccagcacgcccaccccttcttcttcaccatcccccagaacctgccctgcagcgtgaccctgcagcccggcccagaagatactgggaaggcctgtggggtggactttgagatccgggccttctgtgccaagagcctggaggagaagagccacaagaggaacagcgtgcggctggtgatcaggaaggtgcagtttgcccctgagaagccaggcccccagcccagcgctgagaccaccaggcacttcctgatgtctgacaggagcctgcacctggaggccagcctggacaaggagctgtactaccatggagagcccctgaatgtgaatgtgcacgtgaccaacaacagcaccaagacagtgaagaagatcaaggtgtctgtgcggcagtatgctgacatctgcctcttcagcacagcccagtacaagtgccctgtggcccagctggagcaggatgaccaggtgagccccagcagcaccttctgcaaggtgtacaccatcacccccctgctgagtgacaaccgggagaagaggggcctggccctggatggcaagctgaagcatgaggacaccaacctggccagcagcaccatcgtgaaggagggcgccaacaaggaggtgctgggcatcctggtgtcctacagagtgaaggtgaagctggtggtgtccagaggaggagatgtgtctgtggagctgccctttgtgctgatgcaccccaagccccatgaccacatccccctgccccggccccagagcgctgcccctgagacagatgtgcctgtggacaccaacctgattgaatttgacaccaactatgccacagatgatgacatcgtgtttgaagattttgcccggctgcggctgaagggcatgaaggatgatgattatgatgaccagctgtgctag

SEQ ID NO: 145022 - DNA, 1233 bp, Artificial Sequence
  derived and/or modified sequence
gctgccaacagagctgggggcggccgggcccaccacggcggggagacccgggaccagctgactgtgtacctgggcaagagggactttgtggaccacctggacaaggtggaccctgtggatggagtggtgctggtggaccctgactacctgaaggacaggaaggtgtttgtgaccctgacctgtgccttccgctatggccgggaggacctggatgtgctgggcctgtccttcaggaaggacctcttcatcgccacctaccaggccttcccccctgtgcccaaccccccccggccccccacccggctgcaggaccggctgctgaggaagctgggccagcacgcccaccccttcttcttcaccatcccccagaacctgccctgcagcgtgaccctgcagcccggccctgaggacaccgggaaggcctgtggggtggactttgagatccgggccttctgtgccaagagcctggaggagaagagccacaagagaaattctgtgcggctggtgatcaggaaggtgcagtttgcccctgagaagccaggcccccagcccagcgctgagaccaccaggcacttcctgatgtctgacaggagcctgcacctggaggccagcctggacaaggagctgtactaccacggggagcccctgaatgtgaatgtgcacgtgaccaacaacagcaccaagacagtgaagaagatcaaggtgtctgtgcggcagtatgctgacatctgcctcttcagcacagcccagtacaagtgccctgtggcccagctggagcaggatgaccaggtgagccccagcagcaccttctgcaaggtgtacaccatcacccccctgctgagtgacaaccgggagaagaggggcctggccctggatggcaagctgaagcatgaggacaccaacctggccagcagcaccatcgtgaaggagggcgccaacaaggaggtgctgggcatcctggtgtcctacagagtgaaggtgaagctggtggtgtccagaggaggagatgtgtctgtggagctgccctttgtgctgatgcaccccaagccccatgaccacatccccctgccccggccccagagcgctgcccctgagacagatgtgcctgtggacaccaacctgattgaatttgacaccaactatgccacagatgatgacatcgtgtttgaggactttgcccggctgcggctgaagggcatgaaggatgatgattatgatgaccagctgtgctag

SEQ ID NO: 145023 - DNA, 1230 bp, Artificial Sequence
  derived and/or modified sequence
atgggcgagaagcccggcacccgggtgttcaagaagagcagccccaactgcaagctgacagtgtacctggggaaacgggattttgtagaccatctcgacaaagtggatccagttgatggcgtagtgcttgtggatcccgattacctgaaggacagaaaagtattcgtgacgctgacatgtgctttcagatatggtcgggaagatctggacgtgctcggtctttcctttcgaaaggacctttttattgccacataccaggcctttccccccgtgcccaaccctccccgcccgcctactcggctgcaggataggctgctgcgcaagctggggcagcacgcccaccctttcttcttcacaatcccccaaaacctgccatgctctgtgacccttcagccaggccccgaggataccggtaaggcatgcggcgtcgatttcgagatccgcgctttctgcgcgaagtccctagaggagaagagccacaaacggaattcggtcaggttggtcatcaggaaggtgcaattcgcacctgagaagcccgggccacagcccagcgcagaaactacaagacatttcctaatgtcggacagatccctgcatcttgaggcctctcttgataaggaactctactaccacggcgaaccgctgaatgtcaacgtgcatgttaccaacaatagtacgaagactgtaaagaaaataaaagtctccgtgcgtcaatacgcggatatttgcctcttcagtacagcccaatataagtgccctgtcgcccagctggagcaggacgatcaggtttcgccatccagcacgttttgcaaagtttatacaattacaccactgcttagcgataaccgtgaaaagcggggtctggcccttgacggtaaactgaagcacgaggatacaaatctggcgtctagcactatagtgaaggaaggcgcaaataaggaggtacttggcattctggtatcctacagagtcaaggtgaagctggtcgtctctcgaggcggggacgtgtcagttgagctgccattcgtcttaatgcacccaaaaccccacgatcacatacccctcccaagacctcagagcgccgcccctgaaactgatgttccggtggacaccaaccttatcgagtttgacacaaactatgccaccgatgatgatattgtgtttgaggacttcgccaggctgcgtctgaagggcatgaaggacgacgattatgacgatcagctatgctag

SEQ ID NO: 145024 - DNA, 1233 bp, Artificial Sequence
  derived and/or modified sequence
gccgccaaccgggccggcggcggccgggcccaccacggcggcgagacccgtgaccagctcacagtatatcttggcaagagggattttgtcgatcacctggacaaagtggaccctgtggacggagtggttctggtggatccagattatctcaaggaccgaaaggtgttcgtaactctgacttgcgcatttcgatacggacgcgaagatctcgacgtgctgggcctgtcctttagaaaggacttgttcattgctacatatcaggctttcccaccagtgcccaatcctccgcgaccaccgacaagattacaagacagactcttacgaaagctcggccaacacgcacatccattcttctttactatcccacaaaacctaccgtgctccgtcacactccagcccggacctgaggacacgggaaaggcgtgtggtgtcgatttcgagattcgagctttttgcgccaagtcgttagaggagaaatcccacaagcgcaacagcgtgaggcttgtcatccggaaagtgcagtttgcccccgaaaaacccggccctcagcctagcgctgagactactaggcactttctgatgtctgatagaagtctgcacctggaagcatccttggataaggaactgtattaccacggcgaacccttgaacgtaaatgtacacgtgacaaataacagtaccaagaccgttaaaaagattaaggtgtcggttaggcagtatgctgatatatgtctgttctctacggcccagtacaagtgtcctgtggcacagctggaacaagacgaccaggtctcgccatccagcactttctgcaaagtgtacacaataactcctctgctgagtgacaatcgagagaaacgaggcctggcgctggacggtaagctgaagcacgaagacaccaatctcgccagcagcaccatcgtgaaagaaggggcgaacaaagaggttctgggcatcctggtctcttatagagtgaaggtcaaactggtggtgtcacgcggcggggacgtgtcagtagagctgccctttgtgctgatgcacccaaagccccacgatcacatacctctcccccgaccacagtcagcagcacctgagactgacgtgcctgtcgacacaaacttgattgaattcgacacaaattacgcaaccgacgacgatatcgtgtttgaggacttcgccagactacgacttaagggcatgaaagatgacgactatgatgaccagttatgctag

SEQ ID NO: 145025 - DNA, 1230 bp, Artificial Sequence
  derived and/or modified sequence
atgggtgagaaacccggaacccgggtttttaaaaagtcttctcctaattgcaagctcactgtgtatctgggaaaaagagactttgttgaccacttggataaggtcgacccggtggacggcgtagtgctcgttgatcccgactatctgaaggatcggaaggttttcgtaactttaacatgcgccttcagatacggacgcgaagatttagatgtcctcggtcttagctttcggaaagacctttttatcgccacttatcaggccttccctcctgtgccaaaccctccccgacctcccacacgcctgcaggaccggcttctacggaaactgggacagcacgcacatccgtttttctttaccattcctcagaacttgccctgcagtgttacactgcagccgggtccagaagatacaggcaaggcatgcggagtggatttcgagatacgcgctttctgcgctaagtcgctggaggagaagtctcacaaacgcaattcggtgaggctcgtgatcagaaaagttcagttcgcccctgagaagccaggaccacagccctctgctgaaacgactagacacttcctgatgtctgaccggtcgttacatctcgaagctagcctcgacaaggagctctattatcacggagaacctttaaatgttaacgtgcacgtgaccaataattctacgaaaacagttaagaagatcaaagtctctgtacgtcagtacgctgatatctgcctgttctccaccgcgcagtataaatgccccgtggcccagttagagcaggatgatcaggtcagtccaagctctaccttttgtaaagtatacaccattacgcctctattatcggataatcgcgaaaagagagggttggctctcgacggtaaattaaaacatgaggataccaacctggccagttctacaatcgtgaaggagggggctaataaggaagtcctcggtatactggtctcctaccgcgtgaaggtgaagctggtggtgagcagggggggagatgtgtccgtggaattgccctttgtgctgatgcaccccaaaccacacgaccatatccccctgcccaggccccagagcgcagcccctgaaacagacgtccccgtagacaccaaccttattgaatttgatactaattatgccacagacgacgacatcgtatttgaggatttcgcaagacttcggctgaaaggcatgaaggacgatgactacgatgaccagctttgttag

SEQ ID NO: 145026 - DNA, 1233 bp, Artificial Sequence
  derived and/or modified sequence
gcagccaatcgtgccggaggcggtcgcgcacatcatggcggtgagactagggatcagttgacagtgtatctcggcaaacgtgatttcgttgaccatttagacaaagtggacccagtggacggggtcgtactggtggaccctgattatctgaaggatcggaaggtgttcgtgacactcacttgcgcatttagatacggaagagaggatttggatgtgcttggcttatcattcagaaaggatttattcattgcaacctaccaggctttccctccagtgccaaatcctcctcgccctccaaccaggttacaggatcggctgctccggaaactcggccagcacgctcacccattctttttcaccataccacagaacttaccctgctcagtgactctccaacccggtcctgaagacactggtaaggcctgtggagtggactttgaaatccgcgctttttgcgcaaaatcgctcgaagagaaatcccataagcgaaattcagtccggctggtgatacgtaaagtccagtttgctccagagaaaccgggaccacagccttccgccgagaccactagacactttctcatgagcgacagatcattgcaccttgaggcttccttggataaggaactctattatcacggcgagccgctgaacgtaaatgtccacgtgaccaacaacagcactaagactgtcaaaaagatcaaggtttccgtgaggcaatacgccgacatttgcctgttctccacagcacaatataagtgtcctgtcgctcaactcgagcaggatgaccaggtttctcccagtagcactttctgtaaagtgtacactatcacacccctccttagcgacaatagagagaaaagaggattagcccttgacggcaagctaaaacatgaggataccaacctggcttcctcgaccattgtgaaagagggcgctaacaaggaggtgctcggaatcctggtctcctatagagtgaaagtgaagctggtagtctcccgcggtggagatgtgtctgttgagctgccatttgtcctgatgcatccaaaacctcatgaccatatccctttacctcgccctcagtccgccgctccggagactgacgtacctgtggacaccaacttgatcgaatttgatacaaactatgctacggacgatgacatcgtgttcgaggacttcgcgcgtctgaggctcaagggaatgaaagatgacgactatgacgaccaactttgttag

SEQ ID NO: 145027 - DNA, 1918 bp, Artificial Sequence
  derived and/or modified sequence
ccccgcgtgtctgctaggagagggcgggcagcgccgcggcgcgcgcgatccggctgacgcatctggccccggttccccaagaccagagcggggccgggagggagggggaagaggcgagagcgcggagggcgcgcgtgcgcattggcgcggggaggagcagggatcttggcagcgggcgaggaggctgcgagcgagccgcgaaccgagcgggcggcgggcgcgcgcaccatgggggagaaacccgggaccagggtcttcaagaagtcgagccctaactgcaagctcaccgtgtacttgggcaagcgggacttcgtagatcacctggacaaagtggaccctgtagatggcgtggtgcttgtggaccctgactacctgaaggaccgcaaagtgtttgtgaccctcacctgcgccttccgctatggccgtgaagacctggatgtgctgggcttgtccttccgcaaagacctgttcatcgccacctaccaggccttccccccggtgcccaacccaccccggccccccacccgcctgcaggaccggctgctgaggaagctgggccagcatgcccaccccttcttcttcaccataccccagaatcttccatgctccgtcacactgcagccaggcccagaggatacaggaaaggcctgcggcgtagactttgagattcgagccttctgtgctaaatcactagaagagaaaagccacaaaaggaactctgtgcggctggtgatccgaaaggtgcagttcgccccggagaaacccggcccccagccttcagccgaaaccacacgccacttcctcatgtctgaccggtccctgcacctcgaggcttccctggacaaggagctgtactaccatggggagcccctcaatgtaaatgtccacgtcaccaacaactccaccaagaccgtcaagaagatcaaagtctctgtgagacagtacgccgacatctgcctcttcagcaccgcccagtacaagtgtcctgtggctcaactcgaacaagatgaccaggtatctcccagctccacattctgtaaggtgtacaccataaccccactgctcagcgacaaccgggagaagcggggtctcgccctggatgggaaactcaagcacgaggacaccaacctggcttccagcaccatcgtgaaggagggtgccaacaaggaggtgctgggaatcctggtgtcctacagggtcaaggtgaagctggtggtgtctcgaggcggggatgtctctgtggagctgccttttgttcttatgcaccccaagccccacgaccacatccccctccccagaccccagtcagccgctccggagacagatgtccctgtggacaccaacctcattgaatttgataccaactatgccacagatgatgacattgtgtttgaggactttgcccggcttcggctgaaggggatgaaggatgacgactatgatgatcaactctgctaggaagcggggtgggaagaagggaggggatggggttgggagaggtgagggcaggattaagatccccactgtcaatgggggattgtcccagcccctcttcccttcccctcacctggaagcttcttcaaccaatcccttcacactctctcccccatccccccaagatacacactggaccctctcttgctgaatgtgggcattaattttttgactgcagctctgcttctccagccccgccgtgggtggcaagctgtgttcatacctaaattttctggaaggggacagtgaaaagaggagtgacaggagggaaagggggagacaaaactcctactctcaacctcacaccaacacctcccattatcactctctctgcccccattccttcaagaggagaccctttggggacaaggccgtttctttgtttctgagcataaagaagaaaataaatcttttactaagcatg

SEQ ID NO: 145028 - DNA, 1721 bp, Artificial Sequence
  derived and/or modified sequence
tggcagcgggcgaggaggctgcgagcgagccgcgaaccgagcgggcggcgggcgcgcgcaccatgggggagaaacccgggaccagctcaccgtgtacttgggcaagcgggacttcgtagatcacctggacaaagtggaccctgtagatggcgtggtgcttgtggaccctgactacctgaaggaccgcaaagtgtttgtgaccctcacctgcgccttccgctatggccgtgaagacctggatgtgctgggcttgtccttccgcaaagacctgttcatcgccacctaccaggccttccccccggtgcccaacccaccccggccccccacccgcctgcaggaccggctgctgaggaagctgggccagcatgcccaccccttcttcttcaccataccccagaatcttccatgctccgtcacactgcagccaggcccagaggatacaggaaaggcctgcggcgtagactttgagattcgagccttctgtgctaaatcactagaagagaaaagccacaaaaggaactctgtgcggctggtgatccgaaaggtgcagttcgccccggagaaacccggcccccagccttcagccgaaaccacacgccacttcctcatgtctgaccggtccctgcacctcgaggcttccctggacaaggagctgtactaccatggggagcccctcaatgtaaatgtccacgtcaccaacaactccaccaagaccgtcaagaagatcaaagtctctgtgagacagtacgccgacatctgcctcttcagcaccgcccagtacaagtgtcctgtggctcaactcgaacaagatgaccaggtatctcccagctccacattctgtaaggtgtacaccataaccccactgctcagcgacaaccgggagaagcggggtctcgccctggatgggaaactcaagcacgaggacaccaacctggcttccagcaccatcgtgaaggagggtgccaacaaggaggtgctgggaatcctggtgtcctacagggtcaaggtgaagctggtggtgtctcgaggcggggatgtctctgtggagctgccttttgttcttatgcaccccaagccccacgaccacatccccctccccagaccccagtcagccgctccggagacagatgtccctgtggacaccaacctcattgaatttgataccaactatgccacagatgatgacattgtgtttgaggactttgcccggcttcggctgaaggggatgaaggatgacgactatgatgatcaactctgctaggaagcggggtgggaagaagggaggggatggggttgggagaggtgagggcaggattaagatccccactgtcaatgggggattgtcccagcccctcttcccttcccctcacctggaagcttcttcaaccaatcccttcacactctctcccccatccccccaagatacacactggaccctctcttgctgaatgtgggcattaattttttgactgcagctctgcttctccagccccgccgtgggtggcaagctgtgttcatacctaaattttctggaaggggacagtgaaaagaggagtgacaggagggaaagggggagacaaaactcctactctcaacctcacaccaacacctcccattatcactctctctgcccccattccttcaagaggagaccctttggggacaaggccgtttctttgtttctgagcataaagaagaaaataaatcttttactaagcatg

SEQ ID NO: 145029 - DNA, 1230 bp, Artificial Sequence
  derived and/or modified sequence
atgggcgagaagcccggcaccagagtgttcaagaagagcagccccaactgcaagctgaccgtgtacctgggcaagagagacttcgtggaccacctggacaaggtggaccccgtggacggcgtggtgctggtggaccccgactacctgaaggacagaaaggtgttcgtgaccctgacctgcgccttcagatacggcagagaggacctggacgtgctgggcctgagcttcagaaaggacctgttcatcgccacctaccaggccttcccccccgtgcccaacccccccagaccccccaccagactgcaggacagactgctgagaaagctgggccagcacgcccaccccttcttcttcaccatcccccagaacctgccctgcagcgtgaccctgcagcccggccccgaggacaccggcaaggcctgcggcgtggacttcgagatcagagccttctgcgccaagagcctggaggagaagagccacaagagaaacagcgtgagactggtgatcagaaaggtgcagttcgcccccgagaagcccggcccccagcccagcgccgagaccaccagacacttcctgatgagcgacagaagcctgcacctggaggccagcctggacaaggagctgtactaccacggcgagcccctgaacgtgaacgtgcacgtgaccaacaacagcaccaagaccgtgaagaagatcaaggtgagcgtgagacagtacgccgacatctgcctgttcagcaccgcccagtacaagtgccccgtggcccagctggagcaggacgaccaggtgagccccagcagcaccttctgcaaggtgtacaccatcacccccctgctgagcgacaacagagagaagagaggcctggccctggacggcaagctgaagcacgaggacaccaacctggccagcagcaccatcgtgaaggagggcgccaacaaggaggtgctgggcatcctggtgagctacagagtgaaggtgaagctggtggtgagcagaggcggcgacgtgagcgtggagctgcccttcgtgctgatgcaccccaagccccacgaccacatccccctgcccagaccccagagcgccgcccccgagaccgacgtgcccgtggacaccaacctgatcgagttcgacaccaactacgccaccgacgacgacatcgtgttcgaggacttcgccagactgagactgaagggcatgaaggacgacgactacgacgaccagctgtgctag

SEQ ID NO: 145030 - DNA, 1233 bp, Artificial Sequence
  derived and/or modified sequence
gccgccaacagagccggcggcggcagagcccaccacggcggcgagaccagagaccagctgaccgtgtacctgggcaagagagacttcgtggaccacctggacaaggtggaccccgtggacggcgtggtgctggtggaccccgactacctgaaggacagaaaggtgttcgtgaccctgacctgcgccttcagatacggcagagaggacctggacgtgctgggcctgagcttcagaaaggacctgttcatcgccacctaccaggccttcccccccgtgcccaacccccccagaccccccaccagactgcaggacagactgctgagaaagctgggccagcacgcccaccccttcttcttcaccatcccccagaacctgccctgcagcgtgaccctgcagcccggccccgaggacaccggcaaggcctgcggcgtggacttcgagatcagagccttctgcgccaagagcctggaggagaagagccacaagagaaacagcgtgagactggtgatcagaaaggtgcagttcgcccccgagaagcccggcccccagcccagcgccgagaccaccagacacttcctgatgagcgacagaagcctgcacctggaggccagcctggacaaggagctgtactaccacggcgagcccctgaacgtgaacgtgcacgtgaccaacaacagcaccaagaccgtgaagaagatcaaggtgagcgtgagacagtacgccgacatctgcctgttcagcaccgcccagtacaagtgccccgtggcccagctggagcaggacgaccaggtgagccccagcagcaccttctgcaaggtgtacaccatcacccccctgctgagcgacaacagagagaagagaggcctggccctggacggcaagctgaagcacgaggacaccaacctggccagcagcaccatcgtgaaggagggcgccaacaaggaggtgctgggcatcctggtgagctacagagtgaaggtgaagctggtggtgagcagaggcggcgacgtgagcgtggagctgcccttcgtgctgatgcaccccaagccccacgaccacatccccctgcccagaccccagagcgccgcccccgagaccgacgtgcccgtggacaccaacctgatcgagttcgacaccaactacgccaccgacgacgacatcgtgttcgaggacttcgccagactgagactgaagggcatgaaggacgacgactacgacgaccagctgtgctag

SEQ ID NO: 145031 - protein, 327 aa, Artificial Sequence
  derived and/or modified sequence
MQMPAMMSLLLVSVGLMEALQAQSHPITRRDLFSQEIQLDMALASFDDQYAGCAAAMTAALPDLNHTEFQANQVYADSWTLASSQWQERQARWPEWSLSPTRPSPPPLGFRDEHGVALLAYTANSPLHKEFNAAVREAGRSRAHYLHHFSFKTLHFLLTEALQLLGSGQRPPRCHQVFRGVHGLRFRPAGPRATVRLGGFASASLKHVAAQQFGEDTFFGIWTCLGAPIKGYSFFPGEEEVLIPPFETFQVINASRLAQGPARIYLRALGKHSTYNCEYIKDKKCKSGPCHLDNSAMGQSPLSAVWSLLLLLWFLVVRAFPDGPGLL

SEQ ID NO: 145032 - DNA, 984 bp, Artificial Sequence
  derived and/or modified sequence
atgcagatgcccgccatgatgagcttactgttagtgtctgttggtttaatggaggcactgcaggcccagagtcaccctatcacccgcagggatctcttctcccaggagatccagctggacatggccttagcctcatttgatgatcaatatgccgggtgcgctgccgccatgactgccgcattgcccgacttaaatcataccgagttccaggccaatcaagtttacgcggacagttggaccctcgcttctagtcagtggcaggaacgacaggctaggtggccggagtggagtctgagccctaccagaccctctccccccccgttgggctttcgggatgagcatggcgtcgcattgctagcttacacagcaaactcccctctgcataaggagtttaatgcagcggtgagagaggccggcaggtccagggcacattatttgcaccatttttcctttaagacactgcacttcctgttgacagaagctctgcaactgctcggatcaggccagcgcccgcctcggtgccaccaggtcttcagaggcgttcatggactcagattccgacctgcgggcccacgagcaacagtgaggttgggggggttcgcatcagcttcgctgaagcacgtggctgcccaacagttcggggaagatacattctttggcatttggacatgtctgggagcaccgattaagggatactcattttttcccggggaagaggaggtcctcattccaccctttgagacctttcaggtgattaacgccagccggctggcgcaggggcctgcccgcatttacctacgggcccttggcaagcacagcacttacaactgtgagtacattaaagacaagaagtgtaagtcagggccctgccacttggacaactctgctatgggccagtcacctctctcagcagtctggtcactcctgttactgctgtggtttctcgtggtgcgcgcgtttcccgatggacccgggcttttatag

SEQ ID NO: 145033 - DNA, 1312 bp, Artificial Sequence
  derived and/or modified sequence
ggccatggtggagatcagcagcagcttccccacccaggacaaggcctagatgaggaaactgagacccaaaaagagacagcaactggcccagggtcaccagcatgcagatgcctgctatgatgtctctgcttcttgtgtctgtgggcctcatggaagcacttcaggcccagagccaccccatcacacgacgagacctcttctctcaagagattcagctggacatggccctggcctcctttgatgaccagtacgctggctgtgctgctgccatgacagctgctctcccggatctcaaccacacggagttccaggccaaccaggtgtatgcagacagctggacactggcaagcagccaatggcaggagcgtcaggccaggtggccagagtggagtctcagccccacccgtccatccccgccacccctgggcttccgcgatgagcatggggtggccctcctggcctacacagccaacagccccctgcacaaggagttcaatgcagccgtgcgtgaggcgggccgctcccgggcccactacctccaccacttctccttcaagacactccatttcctgctgactgaggccctgcagctcctgggcagcggccagcgtccaccccggtgccaccaggtgttccgaggtgtgcacggcctgcgcttccggccagcagggccccgggccaccgtgaggctggggggctttgcttctgcctccctgaagcatgttgcagcccagcagtttggtgaggacaccttcttcggcatctggacctgccttggggcccctatcaagggctactccttcttccctggagaggaagaggtgctgatccccccctttgagaccttccaagtgatcaatgccagcagactggcccagggccccgcccgcatctacctccgagccctgggcaagcacagcacctacaactgcgagtacatcaaagacaagaagtgcaagtctgggccttgccatctggataattcagccatgggtcagagccccctctctgcagtctggtctttgctgctgctgctctggttcctcgtggtgagggcctttccagatggtccaggcctcctttgatgcatgagacacgggacagcctcgcctgctgcctctgcccatcctgaggatgttggccatgtgtgctttcagtgtaaccaagattcctgtcaatcccatctgcagggaactctgggaccttctctggtagctgccagaccggctggtggagaaacaggagacaatctggggactgaaccttacccagggctgtaggagtgagactctgaataaagggttgggccggc

SEQ ID NO: 145034 - DNA, 984 bp, Artificial Sequence
  derived and/or modified sequence
atgcagatgcctgccatgatgagcctgctgctggtgtctgtgggcctgatggaggccctgcaggcccagagccaccccatcacccggcgggacctcttcagccaggagatccagctggacatggccctggccagctttgatgaccagtatgccggctgtgccgccgccatgacagctgccctgcctgacctgaaccacacagagttccaggccaaccaggtgtatgctgacagctggaccctggccagcagccagtggcaggagcggcaggcccgctggccagagtggagcctgagccccacccggcccagccccccacccctgggcttcagagatgagcacggcgtggccctgctggcctacacagccaacagccccctgcacaaggagttcaatgctgctgtgcgggaggccggccgcagccgggcccactacctgcaccacttctccttcaagaccctgcacttcctgctgacagaggccctgcagctgctgggcagcggccagaggcctccccgctgccaccaggtgttccggggcgtgcacggcctgcgcttccggcctgctggcccccgggccaccgtgcggctgggcggctttgccagcgccagcctgaagcacgtggccgcccagcagtttggagaggacaccttcttcggcatctggacctgcctgggcgcccccatcaagggctacagcttcttccctggagaggaggaggtgctgatccccccatttgagaccttccaggtgatcaatgccagccggctggcccagggccctgcccgcatctacctgcgggccctgggcaagcacagcacctacaactgtgagtacatcaaggacaagaagtgcaagagcggcccctgccacctggacaacagcgccatgggccagagccccctgtctgctgtgtggagcctgctgctgctgctgtggttcctggtggtgcgggccttcccagatggccctggcctgctgtag

SEQ ID NO: 145035 - DNA, 984 bp, Artificial Sequence
  derived and/or modified sequence
atgcagatgcccgccatgatgagcctgctgctggtgagcgtgggcctcatggaggcgctgcaggcccaaagtcaccccatcacaagaagggacctattttcccaagaaatacagttggacatggctttggcatcctttgatgaccaatacgccggctgcgccgccgccatgaccgctgcattacccgatctgaatcatactgaattccaggccaaccaggtatatgccgacagttggaccttggctagctcacagtggcaagagcggcaggctcgatggcctgaatggagcctgtcccccacccgtcctagcccaccgcctctaggctttcgcgatgaacacggcgtcgctttactggcctatacagcaaactcaccactgcacaaggaattcaatgctgcagttagagaagccggtcgcagtcgcgcccattatctgcaccatttctcttttaaaacccttcatttcttgctgacggaagccctgcagttattgggctcaggccaaagacctcctagatgtcaccaggtctttagaggcgtgcacgggctgagatttcgacctgcagggccgagggctactgtaagattgggggggttcgcctcggcctctctgaaacatgtggctgctcaacagtttggagaggacaccttttttggcatatggacctgtctgggggcaccaattaaagggtacagcttcttcccaggggaagaggaagtgctaattcctccatttgagacctttcaggtgatcaatgcaagccgtttagcgcagggccctgccagaatctacttacgtgctctcggcaaacacagtacttataactgtgagtatattaaagataagaaatgcaagtctggaccttgccaccttgacaattctgcaatggggcagtccccactatccgcggtttggtctttacttctgctattgtggttccttgttgtgagagccttcccagatgggccgggcctcctgtag

SEQ ID NO: 145036 - DNA, 984 bp, Artificial Sequence
  derived and/or modified sequence
atgcaaatgcctgccatgatgtccctgctcctcgtttccgtcggactcatggaggcgttgcaggctcagtcgcaccctatcacacgtagggatctatttagtcaggagatacagttggatatggccttagcttcctttgatgaccagtacgctggctgtgccgctgcgatgaccgccgcactccccgacctcaatcacactgaatttcaagctaaccaagtgtacgcagatagttggactcttgcttcttctcagtggcaggaacgccaggccaggtggcccgaatggagcctctcacctacccgacccagtccgccacccttgggttttagggatgagcatggcgtcgcactacttgcctataccgcaaattccccactccacaaggaatttaatgcagcagtgcgggaggcaggccgatcccgcgctcattacctgcatcacttctcatttaaaactctgcacttcctcctgacagaagcgctgcagttactcggtagtggacagcgcccacctaggtgtcaccaagtgttccggggagtgcacggcctcagattcaggcccgctggcccaagggctacagtgagactaggagggttcgcctccgcttctttaaagcatgtggcagctcagcagttcggggaagacaccttttttgggatctggacttgccttggtgccccaattaaaggatacagtttctttcctggcgaagaagaggttttgattcccccattcgagacgttccaggtgataaatgcctctcgactggcccagggacctgcaagaatttacctgcgcgcattgggaaaacattctacatataattgtgaatatattaaagacaaaaagtgcaagtccggcccttgccacctagataattccgccatggggcagagtcctctgagtgcggtctggagtttgttactgttgttatggttccttgtggttcgagcatttcccgacggccctgggctgctgtag

SEQ ID NO: 145037 - DNA, 984 bp, Artificial Sequence
  derived and/or modified sequence
atgcagatgcccgccatgatgagcctgctgctggtgagcgtgggcctgatggaggccctgcaggcccagagccaccccatcaccagaagagacctgttcagccaggagatccagctggacatggccctggccagcttcgacgaccagtacgccggctgcgccgccgccatgaccgccgccctgcccgacctgaaccacaccgagttccaggccaaccaggtgtacgccgacagctggaccctggccagcagccagtggcaggagagacaggccagatggcccgagtggagcctgagccccaccagacccagccccccccccctgggcttcagagacgagcacggcgtggccctgctggcctacaccgccaacagccccctgcacaaggagttcaacgccgccgtgagagaggccggcagaagcagagcccactacctgcaccacttcagcttcaagaccctgcacttcctgctgaccgaggccctgcagctgctgggcagcggccagagaccccccagatgccaccaggtgttcagaggcgtgcacggcctgagattcagacccgccggccccagagccaccgtgagactgggcggcttcgccagcgccagcctgaagcacgtggccgcccagcagttcggcgaggacaccttcttcggcatctggacctgcctgggcgcccccatcaagggctacagcttcttccccggcgaggaggaggtgctgatcccccccttcgagaccttccaggtgatcaacgccagcagactggcccagggccccgccagaatctacctgagagccctgggcaagcacagcacctacaactgcgagtacatcaaggacaagaagtgcaagagcggcccctgccacctggacaacagcgccatgggccagagccccctgagcgccgtgtggagcctgctgctgctgctgtggttcctggtggtgagagccttccccgacggccccggcctgctgtag

SEQ ID NO: 145038 - protein, 411 aa, Artificial Sequence
  derived and/or modified sequence
MNCCIGLGEKARGSHRASYPSLSALFTEASILGFGSFAVKAQWTEDCRKSTYPPSGPTYRGAVPWYTINLDLPPYKRWHELMLDKAPVLKVIVNSLKNMINTFVPSGKIMQVVDEKLPGLLGNFPGPFEEEMKGIAAVTDIPLGEIISFNIFYELFTICTSIVAEDKKGHLIHGRNMDFGVFLGWNINNDTWVITEQLKPLTVNLDFQRNNKTVFKASSFAGYVGMLTGFKPGLFSLTLNERFSINGGYLGILEWILGKKDVMWIGFLTRTVLENSTSYEEAKNLLTKTKILAPAYFILGGNQSGEGCVITRDRKESLDVYELDAKQGRWYVVQTNYDRWKHPFFLDDRRTPAKMCLNRTSQENISFETMYDVLSTKPVLNKLTVYTTLIDVTKGQFETYLRDCPDPCIGW

SEQ ID NO: 145039 - protein, 305 aa, Artificial Sequence
  derived and/or modified sequence
MLDKAPVLKVIVNSLKNMINTFVPSGKIMQVVDEKLPGLLGNFPGPFEEEMKGIAAVTDIPLGHLIHGRNMDFGVFLGWNINNDTWVITEQLKPLTVNLDFQRNNKTVFKASSFAGYVGMLTGFKPGLFSLTLNERFSINGGYLGILEWILGKKDVMWIGFLTRTVLENSTSYEEAKNLLTKTKILAPAYFILGGNQSGEGCVITRDRKESLDVYELDAKQGRWYVVQTNYDRWKHPFFLDDRRTPAKMCLNRTSQENISFETMYDVLSTKPVLNKLTVYTTLIDVTKGQFETYLRDCPDPCIGW

SEQ ID NO: 145040 - DNA, 1233 bp, Artificial Sequence
  derived and/or modified sequence
atgaactgctgcatcggcctgggcgagaaggcccgcggcagccaccgcgccagctaccccagcctgagcgccctgttcaccgaggccagcatcctgggcttcggcagcttcgccgtgaaggcccagtggaccgaggactgccgcaagagcacctacccccccagcggccccacctaccgcggcgccgtgccctggtacaccatcaacctggacctgcccccctacaagcgctggcacgagctgatgctggacaaggcccccgtgctgaaggtgatcgtgaacagcctgaagaacatgatcaacaccttcgtgcccagcggcaagatcatgcaggtggtggacgagaagctgcccggcctgctgggcaacttccccggccccttcgaggaggagatgaagggcatcgccgccgtgaccgacatccccctgggcgagatcatcagcttcaacatcttctacgagctgttcaccatctgcaccagcatcgtggccgaggacaagaagggccacctgatccacggccgcaacatggacttcggcgtgttcctgggctggaacatcaacaacgacacctgggtgatcaccgagcagctgaagcccctgaccgtgaacctggacttccagcgcaacaacaagaccgtgttcaaggccagcagcttcgccggctacgtgggcatgctgaccggcttcaagcccggcctgttcagcctgaccctgaacgagcgcttcagcatcaacggcggctacctgggcatcctggagtggatcctgggcaagaaggacgtgatgtggatcggcttcctgacccgcaccgtgctggagaacagcaccagctacgaggaggccaagaacctgctgaccaagaccaagatcctggcccccgcctacttcatcctgggcggcaaccagagcggcgagggctgcgtgatcacccgcgaccgcaaggagagcctggacgtgtacgagctggacgccaagcagggccgctggtacgtggtgcagaccaactacgaccgctggaagcaccccttcttcctggacgaccgccgcacccccgccaagatgtgcctgaaccgcaccagccaggagaacatcagcttcgagaccatgtacgacgtgctgagcaccaagcccgtgctgaacaagctgaccgtgtacaccaccctgatcgacgtgaccaagggccagttcgagacctacctgcgcgactgccccgacccctgcatcggctgg

SEQ ID NO: 145041 - DNA, 1236 bp, Artificial Sequence
  derived and/or modified sequence
atgaactgctgcatcggcctgggcgagaaggccagaggcagccacagagccagctaccccagcctgagcgccctgttcaccgaggccagcatcctgggcttcggcagcttcgccgtgaaggcccagtggaccgaggactgcagaaagagcacctacccccccagcggccccacctacagaggcgccgtgccctggtacaccatcaacctggacctgcccccctacaagagatggcacgagctgatgctggacaaggcccccgtgctgaaggtgatcgtgaacagcctgaagaacatgatcaacaccttcgtgcccagcggcaagatcatgcaggtggtggacgagaagctgcccggcctgctgggcaacttccccggccccttcgaggaggagatgaagggcatcgccgccgtgaccgacatccccctgggcgagatcatcagcttcaacatcttctacgagctgttcaccatctgcaccagcatcgtggccgaggacaagaagggccacctgatccacggcagaaacatggacttcggcgtgttcctgggctggaacatcaacaacgacacctgggtgatcaccgagcagctgaagcccctgaccgtgaacctggacttccagagaaacaacaagaccgtgttcaaggccagcagcttcgccggctacgtgggcatgctgaccggcttcaagcccggcctgttcagcctgaccctgaacgagagattcagcatcaacggcggctacctgggcatcctggagtggatcctgggcaagaaggacgtgatgtggatcggcttcctgaccagaaccgtgctggagaacagcaccagctacgaggaggccaagaacctgctgaccaagaccaagatcctggcccccgcctacttcatcctgggcggcaaccagagcggcgagggctgcgtgatcaccagagacagaaaggagagcctggacgtgtacgagctggacgccaagcagggcagatggtacgtggtgcagaccaactacgacagatggaagcaccccttcttcctggacgacagaagaacccccgccaagatgtgcctgaacagaaccagccaggagaacatcagcttcgagaccatgtacgacgtgctgagcaccaagcccgtgctgaacaagctgaccgtgtacaccaccctgatcgacgtgaccaagggccagttcgagacctacctgagagactgccccgacccctgcatcggctggtag

SEQ ID NO: 145042 - DNA, 1236 bp, Artificial Sequence
  derived and/or modified sequence
atgaactgctgtattgggcttggcgagaaagcgcggggatcgcacagggcctcttaccccagcttgagtgcattattcacggaggctagcatactcggatttggtagcttcgccgtgaaggctcagtggacagaagattgccggaagtctacttaccctccaagtggtcctacttaccgtggagctgtgccttggtacactatcaatttggatttacccccctacaaaagatggcacgaactgatgttggataaggcccctgttctaaaagtcatcgtcaactcattaaagaatatgattaacacctttgttccctcaggcaagattatgcaggtcgtggacgagaaactacctggcctgctcggcaattttcctggcccctttgaggaagaaatgaaaggtattgcggctgttaccgatatacccctcggggaaatcatcagcttcaatatcttctacgagctctttacaatttgcactagcatcgtcgctgaagataagaaggggcacttaatccatggaagaaacatggattttggggtctttctgggctggaatattaataatgacacctgggtgattacagaacagttgaagccactgacagtgaatttggacttccagaggaacaacaagaccgtgttcaaagcaagttccttcgcgggctatgtgggaatgctgacgggttttaagccaggcttgttttccctgacactgaacgagcgtttttccatcaacggcggctacctgggcattcttgagtggatcctggggaagaaggatgttatgtggattggtttccttacgcgcacggtgctggagaactcgacctcttacgaggaagctaagaatctcctcaccaaaactaaaattctcgcgcccgcttacttcatcttaggggggaaccagtccggcgagggctgcgtcatcactagagaccgtaaggaatctctcgatgtttacgagctggatgccaagcagggacgctggtatgtggtccaaaccaactacgaccgctggaagcatccattttttctcgatgatcggcgaactcccgcaaaaatgtgtcttaatagaaccagtcaggaaaatatcagcttcgaaactatgtacgacgtgctttcaacgaaacctgtactgaacaaactaactgtgtacactacgctgatcgatgtgacaaagggccagtttgagacgtacctgcgcgactgtcctgacccctgtattgggtggtag

SEQ ID NO: 145043 - DNA, 1236 bp, Artificial Sequence
  derived and/or modified sequence
atgaactgctgcatcggcctgggggagaaggcccggggcagccaccgggccagctaccccagcctgagcgccctcttcacagaggccagcatcctgggcttcggcagctttgctgtgaaggcccagtggacagaggactgcaggaagagcacctacccaccttctggccccacctacagaggagctgtgccctggtacaccatcaacctggacctgcccccctacaagcgctggcatgagctgatgctggacaaggcccctgtgctgaaggtgattgtgaacagcctgaagaacatgatcaacacctttgtgcccagcggcaagatcatgcaggtggtggatgagaagctgcccggcctgctgggcaacttccctggcccctttgaggaggagatgaagggcattgctgctgtgacagacatccccctgggggagatcatctccttcaacatcttctatgagctgttcaccatctgcaccagcatcgtggccgaggacaagaagggccacctgattcatggaagaaacatggactttggagtcttcctgggctggaacatcaacaatgacacctgggtgatcacagagcagctgaagcccctgactgtgaacctggacttccagaggaacaacaagacagtgttcaaggccagcagctttgctggctacgtgggcatgctgaccggcttcaagccaggcctcttcagcctgaccctgaatgaacgcttcagcatcaatggaggctacctgggcatcctggagtggatcctgggcaagaaggatgtgatgtggattggcttcctgaccaggacagtgctggagaacagcaccagctatgaggaggccaagaacctgctgaccaagaccaagatcctggccccagcctacttcatcctgggcggcaaccagagcggggagggctgcgtcatcacccgggacaggaaggagagcctggatgtgtatgagctggatgccaagcagggccgctggtacgtggtgcagaccaactatgaccgctggaagcaccccttcttcctggatgacaggaggaccccagccaagatgtgcctgaacagaaccagccaggagaacatcagctttgagaccatgtatgatgtgctgagcaccaagcctgtgctgaacaagctgactgtgtacaccaccctgattgatgtgaccaagggccagtttgagacctacctgcgggactgcccagacccctgcatcggctggtag

SEQ ID NO: 145044 - DNA, 1236 bp, Artificial Sequence
  derived and/or modified sequence
atgaactgctgcatcggcctgggcgagaaggcccggggcagccaccgggcctcctaccccagcctgtctgccttattcactgaggcgtctatactaggtttcggctcctttgctgtgaaagcccagtggaccgaagactgcagaaagtctacatacccaccttcgggcccaacataccgtggagcagttccatggtacacaataaacctggaccttccaccatacaagaggtggcatgaattaatgctggacaaagcccctgtcctcaaggtaattgtgaattctctgaaaaacatgattaatacttttgtacccagcggtaaaattatgcaagttgtggatgaaaagctgccaggcctgctgggaaattttccggggccgtttgaagaggaaatgaagggaatcgctgccgtgacagacattccccttggagagatcatctcttttaacatcttctacgagctattcaccatctgtacctcaattgtggccgaagacaaaaaaggacacttgatccacggaagaaacatggactttggggtgtttctcggctggaatatcaacaatgatacgtgggtgataaccgagcagttaaaacccctcactgtaaatcttgacttccaacggaataacaaaacagtattcaaggcaagctcttttgctgggtacgttggaatgctgaccgggtttaaacctggacttttttctttgaccttgaacgaacgtttttcaatcaatggcggatatctgggcattctcgagtggatcctagggaaaaaggatgtgatgtggattggtttcctgactcgcactgtgctggaaaattccacgtcatacgaagaagccaagaatttgctgacaaagacgaaaattctggcccctgcttactttattctgggcggtaaccagagcggcgagggatgtgtgattacccgagatcgcaaggaatcccttgatgtgtacgaattggatgccaagcagggcagatggtatgtggttcagactaactacgatagatggaaacacccattcttcttggatgatcggagaacccccgccaagatgtgtctcaacagaacatcccaggagaacatttctttcgagaccatgtatgatgttttgtccactaagcctgtcctgaataagcttaccgtgtacacaacactcatagatgtgaccaagggccagttcgaaacgtatctacgcgactgccccgacccgtgcatcggttggtag

SEQ ID NO: 145045 - DNA, 1236 bp, Artificial Sequence
  derived and/or modified sequence
atgaattgctgcatagggttgggagagaaggcgaggggctcccatcgcgcatcgtaccccagcttgtccgccctctttacggaggccagcatcctcgggttcggatccttcgcagttaaagcccagtggacggaggactgcagaaaaagtacctatccaccatcaggaccaacttatcgaggagcagttccctggtacaccatcaacttagacctgcccccatataagaggtggcatgaactgatgttggataaggctcctgtgcttaaggtgatcgttaatagtttgaagaacatgataaatacatttgtcccatctgggaaaatcatgcaggttgtcgacgagaagttaccgggtttgttaggaaatttccctggaccctttgaagaggaaatgaaaggcattgcggcagttaccgatattcctcttggcgagataatttcctttaacatattttacgagctgtttactatttgtacctctatcgtagcagaagataagaaagggcatctcatccatgggcgtaacatggatttcggtgtctttctggggtggaatatcaacaatgacacatgggtgattactgagcaactcaagcctttgacggtgaacttggatttccagcgcaacaacaagacagtcttcaaggcttctagtttcgccggatatgttgggatgcttacggggttcaaacctggattgttcagcctgacactgaatgaaagattttcaatcaacggaggctatttgggcatacttgagtggattttgggtaaaaaggacgttatgtggataggatttttaacaaggacagtgttggaaaacagcacatcttatgaggaagcaaaaaatcttttaactaagacgaagattctggcgccagcgtactttatcctgggcggaaatcagagcggcgaagggtgtgtgattacgagggacagaaaagagtctctggacgtgtatgagctggacgcgaagcagggccgttggtacgtggttcagacaaactacgatcggtggaagcaccccttcttccttgacgatcgaaggacccccgctaagatgtgcctgaatcgaacgagccaggagaatatctcttttgaaaccatgtatgacgttttatctacaaagcccgtgctgaataagctgacagtgtatactactctgattgacgtaacaaaaggccagttcgagacctacttgagggactgtcccgacccatgtatcggatggtag

SEQ ID NO: 145046 - DNA, 2511 bp, Artificial Sequence
  derived and/or modified sequence
ggactttgaaatccaacccggtcacctacccgcgcgactgtgtccacggatggcacgaaagccaagcgagtccccctgccgagctactcgcgtccgcctcctcccaagctgagctctgctccgcccacctgagtccttcgccagttaggaggaaacacagccgcttaatgaactgctgcatcgggctgggagagaaagctcgcgggtcccaccgggcctcctacccaagtctcagcgcgcttttcaccgaggcctcaattctgggatttggcagctttgctgtgaaagcccaatggacagaggactgcagaaaatcaacctatcctccttcaggaccaacgtacagaggtgcagttccatggtacaccataaatcttgacttaccaccctacaaaagatggcatgaattgatgcttgacaaggcaccagtgctaaaggttatagtgaattctctgaagaatatgataaatacattcgtgccaagtggaaaaattatgcaggtggtggatgaaaaattgcctggcctacttggcaactttcctggcccttttgaagaggaaatgaagggtattgccgctgttactgatatacctttaggagagattatttcattcaatattttttatgaattatttaccatttgtacttcaatagtagcagaagacaaaaaaggtcatctaatacatgggagaaacatggattttggagtatttcttgggtggaacataaataatgatacctgggtcataactgagcaactaaaacctttaacagtgaatttggatttccaaagaaacaacaaaactgtcttcaaggcttcaagctttgctggctatgtgggcatgttaacaggattcaaaccaggactgttcagtcttacactgaatgaacgtttcagtataaatggtggttatctgggtattctagaatggattctgggaaagaaagatgtcatgtggatagggttcctcactagaacagttctggaaaatagcacaagttatgaagaagccaagaatttattgaccaagaccaagatattggccccagcctactttatcctgggaggcaaccagtctggggaaggttgtgtgattacacgagacagaaaggaatcattggatgtatatgaactcgatgctaagcagggtagatggtatgtggtacaaacaaattatgaccgttggaaacatcccttcttccttgatgatcgcagaacgcctgcaaagatgtgtctgaaccgcaccagccaagagaatatctcatttgaaaccatgtatgatgtcctgtcaacaaaacctgtcctcaacaagctgaccgtatacacaaccttgatagatgttaccaaaggtcaattcgaaacttacctgcgggactgccctgacccttgtataggttggtgagcacacgtctggcctacagaatgcggcctctgagacatgaagacaccatctccatgtgaccgaacactgcagctgtctgaccttccaaagactaagactcgcggcaggttctctttgagtcaatagcttgtcttcgtccatctgttgacaaatgacagatcttttttttttccccctatcagttgatttttcttatttacagataacttctttaggggaagtaaaacagtcatctagaattcactgagttttgtttcactttgacatttggggatctggtgggcagtcgaaccatggtgaactccacctccgtggaataaatggagattcagcgtgggtgttgaatccagcacgtctgtgtgagtaacgggacagtaaacactccacattcttcagtttttcacttctacctacatatttgtatgtttttctgtataacagccttttccttctggttctaactgctgttaaaattaatatatcattatctttgctgttattgacagcgatataattttattacatatgattagagggatgagacagacattcacctgtatatttcttttaatgggcacaaaatgggcccttgcctctaaatagcactttttggggttcaagaagtaatcagtatgcaaagcaatcttttatacaataattgaagtgttccctttttcataattactctacttcccagtaaccctaaggaagttgctaacttaaaaaactgcatcccacgttctgttaatttagtaaataaacaagtcaaagacttgtggaaaataggaagtgaacccatattttaaattctcataagtagcattcatgtaataaacaggtttttagtttgttcttcagattgatagggagttttaaagaaattttagtagttactaaaattatgttactgtatttttcagaaatcaaactgcttatgaaaagtactaatagaacttgttaacctttctaaccttcacgattaactgtgaaatgtacgtcatttgtgcaagaccgtttgtccacttcattttgtataatcacagttgtgttcctgacactcaataaacagtcactggaaagagtgccagtcagcagtcatgcacgctga

SEQ ID NO: 145047 - protein, 236 aa, Artificial Sequence
  derived and/or modified sequence
MESSAKMESGGAGQQPQPQPQQPFLPPAACFFATAAAAAAAAAAAAAQSAQQQQQQQQQQQQAPQLRPAADGQPSGGGHKSAPKQVKRQRSSSPELMRCKRRLNFSGFGYSLPQQQPAAVARRNERERNRVKLVNLGFATLREHVPNGAANKKMSKVETLRSAVEYIRALQQLLDEHDAVSAAFQAGVLSPTISPNYSNDLNSMAGSPVSSYSSDEGSYDPLSPEEQELLDFTNWF

SEQ ID NO: 145048 - DNA, 2490 bp, Artificial Sequence
  derived and/or modified sequence
agcactctctcacttctggccagggaacgtggaaggcgcaccgacagggatccggccagggagggcgagtgaaagaaggaaatcagaaaggaagggagttaacaaaataataaaaacagcctgagccacggctggagagaccgagacccggcgcaagagagcgcagccttagtaggagaggaacgcgagacgcggcagagcgcgttcagcactgacttttgctgctgcttctgcttttttttttcttagaaacaagaaggcgccagcggcagcctcacacgcgagcgccacgcgaggctcccgaagccaacccgcgaagggaggaggggagggaggaggaggcggcgtgcagggaggagaaaaagcattttcactttttttgctcccactctaagaagtctcccggggattttgtatatattttttaacttccgtcagggctcccgcttcatatttccttttctttccctctctgttcctgcacccaagttctctctgtgtccccctcgcgggccccgcacctcgcgtcccggatcgctctgattccgcgactccttggccgccgctgcgcatggaaagctctgccaagatggagagcggcggcgccggccagcagccccagccgcagccccagcagcccttcctgccgcccgcagcctgtttctttgccacggccgcagccgcggcggccgcagccgccgcagcggcagcgcagagcgcgcagcagcagcagcagcagcagcagcagcagcagcaggcgccgcagctgagaccggcggccgacggccagccctcagggggcggtcacaagtcagcgcccaagcaagtcaagcgacagcgctcgtcttcgcccgaactgatgcgctgcaaacgccggctcaacttcagcggctttggctacagcctgccgcagcagcagccggccgccgtggcgcgccgcaacgagcgcgagcgcaaccgcgtcaagttggtcaacctgggctttgccacccttcgggagcacgtccccaacggcgcggccaacaagaagatgagtaaggtggagacactgcgctcggcggtcgagtacatccgcgcgctgcagcagctgctggacgagcatgacgcggtgagcgccgccttccaggcaggcgtcctgtcgcccaccatctcccccaactactccaacgacttgaactccatggccggctcgccggtctcatcctactcgtcggacgagggctcttacgacccgctcagccccgaggagcaggagcttctcgacttcaccaactggttctgaggggctcggcctggtcaggccctggtgcgaatggactttggaagcagggtgatcgcacaacctgcatctttagtgctttcttgtcagtggcgttgggagggggagaaaaggaaaagaaaaaaaaaagaagaagaagaagaaaagagaagaagaaaaaaacgaaaacagtcaaccaaccccatcgccaactaagcgaggcatgcctgagagacatggctttcagaaaacgggaagcgctcagaacagtatctttgcactccaatcattcacggagatatgaagagcaactgggacctgagtcaatgcgcaaaatgcagcttgtgtgcaaaagcagtgggctcctggcagaagggagcagcacacgcgttatagtaactcccatcacctctaacacgcacagctgaaagttcttgctcgggtcccttcacctcctcgccctttcttaaagtgcagttcttagccctctagaaacgagttggtgtctttcgtctcagtagcccccaccccaataagctgtagacattggtttacagtgaaactatgctattctcagccctttgaaactctgcttctcctccagggcccgattcccaaaccccatggcttccctcacactgtcttttctaccattttcattatagaatgcttccaatcttttgtgaattttttattataaaaaatctatttgtatctatcctaaccagttcggggatatattaagatatttttgtacataagagagaaagagagagaaaaatttatagaagttttgtacaaatggtttaaaatgtgtatatcttgatactttaacatgtaatgctattacctctgcatattttagatgtgtagttcaccttacaactgcaattttccctatgtggttttgtaaagaactctcctcataggtgagatcaagaggccaccagttgtacttcagcaccaatgtgtcttactttatagaaatgttgttaatgtattaatgatgttattaaatactgttcaagaagaacaaagtttatgcagctactgtccaaactcaaagtggcagccagttggttttgataggttgccttttggagatttctattactgcctttttttttcttactgttttattacaaacttacaaaaatatgtataaccctgttttatacaaactagtttcgtaataaaactttttcctttttttaaaatgaaaataaaaaaaa

SEQ ID NO: 145049 - DNA, 711 bp, Artificial Sequence
  derived and/or modified sequence
atggagtctagcgccaagatggaaagcggaggggccggccaacagccccagccccagcctcagcagcccttcttacctccagccgcctgtttctttgctacagctgccgcagcagccgcagctgccgctgcagcagcggcccagtcagcccaacagcaacagcagcaacagcagcagcagcaacaagccccccagctgcggcctgccgccgacgggcagccatctgggggcggacataaatccgctcctaagcaggttaagagacagcgctcttcatcgcccgagttgatgcggtgtaaaaggaggctaaacttctccgggttcggttactctttaccccaacaacaacctgctgccgtcgcacgccgtaacgagagggaaaggaaccgtgtgaaacttgttaatctgggattcgcaaccctgcgggagcacgttcccaatggggccgccaacaaaaagatgagcaaggtggagacgcttcggagtgcagtggaatacatccgggccctccagcagctgttggatgagcatgacgcggtatctgcagctttccaggcaggggtacttagccccactatttccccaaactacagcaatgatctgaatagtatggccggcagtccagttagttcttatagctcggacgaaggctcatacgacccactcagcccagaagagcaagagctgctcgacttcacaaactggttctag

SEQ ID NO: 145050 - DNA, 711 bp, Artificial Sequence
  derived and/or modified sequence
atggagagcagcgccaagatggagagcggcggggccggccagcagccccagccccagccccagcagcccttcctgcccccagctgcctgcttctttgccacagctgctgctgctgctgctgctgctgctgctgctgctgcccagagcgcccagcagcagcagcagcagcagcagcagcagcagcaggccccccagctgcggcctgctgctgatggccagcccagcggcggcggccacaagagcgcccccaagcaggtgaagaggcagaggagcagcagccctgagctgatgcgctgcaagaggcggctgaacttcagcggcttcggctacagcctgccccagcagcagcctgctgctgtggccaggagaaatgaaagagagaggaacagagtgaagctggtgaacctgggctttgccaccctgcgggagcacgtgcccaatggagctgccaacaagaagatgagcaaggtggagaccctgcggtctgctgtggagtacatccgggccctgcagcagctgctggatgaacatgatgctgtgtctgctgccttccaggccggcgtgctgagccccaccatcagccccaactacagcaatgacctgaacagcatggccggcagccctgtgtcctcctacagcagtgatgagggcagctatgaccccctgagccctgaggagcaggagctgctggacttcaccaactggttctag

SEQ ID NO: 145051 - DNA, 711 bp, Artificial Sequence
  derived and/or modified sequence
atggagagcagcgccaagatggagagcggcggcgccggccagcagccccagcctcagccccagcaacccttcttgccaccagctgcatgttttttcgcaactgctgctgcagcggccgctgctgctgcagccgcagctgcacagtccgcccaacagcaacaacagcagcaacaacagcagcagcaggcccctcagttgagaccagccgcagatggacagccaagtggaggcggccacaagtctgcaccgaagcaagtcaagagacagcggtccagctccccagaactgatgcggtgtaagcgcagattgaacttctccggttttggctattcactgccccagcagcagccagcagcggtggcaaggcgcaacgagcgcgagcggaatcgcgtcaaactggttaacctcggcttcgccacactgagggagcacgtgccaaatggggctgccaacaaaaaaatgagcaaggttgagacacttaggagcgccgttgagtatatcagagcgctccagcagttattagatgaacacgatgccgtatccgctgccttccaagcaggcgttctgtccccaactatctcccccaactattctaacgacctgaactcaatggccggttcgcccgtcagctcctattccagcgatgaaggaagttacgatccacttagcccagaagagcaggagttgttagacttcacaaactggttctag

SEQ ID NO: 145052 - DNA, 711 bp, Artificial Sequence
  derived and/or modified sequence
atggagagctcagccaagatggagtcgggtggcgcaggacaacagcctcagccccagccacagcagccttttcttcccccagccgcttgcttcttcgctactgccgcagccgctgcagctgctgcagctgccgcagccgctcaaagtgcacagcagcagcagcagcagcagcagcagcaacagcaagctccgcagcttcgaccggctgccgatggccagccgagcggtggtggtcataaatcggcacccaagcaggttaaacgtcagcgatcatcctcccctgagctgatgaggtgtaaaagaagactgaatttctctggcttcggctatagcctgccccagcaacagcctgccgcagtggctagaaggaacgagcgcgagcgaaatcgggtgaagctcgtcaacttgggcttcgctacgcttagggagcacgtaccaaatggcgctgctaataagaagatgtccaaagtggagactctgcgtagcgcggtggagtatatccgagccctgcagcagctcctggacgagcacgatgctgtttcagcggctttccaagctggagtcctgtcgcccaccatatctccaaattactctaatgatctcaacagtatggccggatcaccagtgtcatcgtatagcagtgatgaaggatcttacgacccactgagcccagaggagcaggagctgctcgacttcacaaattggttttag

SEQ ID NO: 145053 - DNA, 2472 bp, Artificial Sequence
  derived and/or modified sequence
cttctggccagggaacgtggaaggcgcaccgacagggatccggccagggagggcgagtgaaagaaggaaatcagaaaggaagggagttaacaaaataataaaaacagcctgagccacggctggagagaccgagacccggcgcaagagagcgcagccttagtaggagaggaacgcgagacgcggcagagcgcgttcagcactgacttttgctgctgcttctgcttttttttttcttagaaacaagaaggcgccagcggcagcctcacacgcgagcgccacgcgaggctcccgaagccaacccgcgaagggaggaggggagggaggaggaggcggcgtgcagggaggagaaaaagcattttcactttttttgctcccactctaagaagtctcccggggattttgtatatattttttaacttccgtcagggctcccgcttcatatttccttttctttccctctctgttcctgcacccaagttctctctgtgtccccctcgcgggccccgcacctcgcgtcccggatcgctctgattccgcgactccttggccgccgctgcgcatggaaagctctgccaagatggagagcggcggcgccggccagcagccccagccgcagccccagcagcccttcctgccgcccgcagcctgtttctttgccacggccgcagccgcggcggccgcagccgccgcagcggcagcgcagagcgcgcagcagcagcagcagcagcagcagcagcagcagcaggcgccgcagctgagaccggcggccgacggccagccctcagggggcggtcacaagtcagcgcccaagcaagtcaagcgacagcgctcgtcttcgcccgaactgatgcgctgcaaacgccggctcaacttcagcggctttggctacagcctgccgcagcagcagccggccgccgtggcgcgccgcaacgagcgcgagcgcaaccgcgtcaagttggtcaacctgggctttgccacccttcgggagcacgtccccaacggcgcggccaacaagaagatgagtaaggtggagacactgcgctcggcggtcgagtacatccgcgcgctgcagcagctgctggacgagcatgacgcggtgagcgccgccttccaggcaggcgtcctgtcgcccaccatctcccccaactactccaacgacttgaactccatggccggctcgccggtctcatcctactcgtcggacgagggctcttacgacccgctcagccccgaggagcaggagcttctcgacttcaccaactggttctgaggggctcggcctggtcaggccctggtgcgaatggactttggaagcagggtgatcgcacaacctgcatctttagtgctttcttgtcagtggcgttgggagggggagaaaaggaaaagaaaaaaaaaagaagaagaagaagaaaagagaagaagaaaaaaacgaaaacagtcaaccaaccccatcgccaactaagcgaggcatgcctgagagacatggctttcagaaaacgggaagcgctcagaacagtatctttgcactccaatcattcacggagatatgaagagcaactgggacctgagtcaatgcgcaaaatgcagcttgtgtgcaaaagcagtgggctcctggcagaagggagcagcacacgcgttatagtaactcccatcacctctaacacgcacagctgaaagttcttgctcgggtcccttcacctcctcgccctttcttaaagtgcagttcttagccctctagaaacgagttggtgtctttcgtctcagtagcccccaccccaataagctgtagacattggtttacagtgaaactatgctattctcagccctttgaaactctgcttctcctccagggcccgattcccaaaccccatggcttccctcacactgtcttttctaccattttcattatagaatgcttccaatcttttgtgaattttttattataaaaaatctatttgtatctatcctaaccagttcggggatatattaagatatttttgtacataagagagaaagagagagaaaaatttatagaagttttgtacaaatggtttaaaatgtgtatatcttgatactttaacatgtaatgctattacctctgcatattttagatgtgtagttcaccttacaactgcaattttccctatgtggttttgtaaagaactctcctcataggtgagatcaagaggccaccagttgtacttcagcaccaatgtgtcttactttatagaaatgttgttaatgtattaatgatgttattaaatactgttcaagaagaacaaagtttatgcagctactgtccaaactcaaagtggcagccagttggttttgataggttgccttttggagatttctattactgcctttttttttcttactgttttattacaaacttacaaaaatatgtataaccctgttttatacaaactagtttcgtaataaaactttttcctttttttaaaatgaaaataa

SEQ ID NO: 145054 - DNA, 711 bp, Artificial Sequence
  derived and/or modified sequence
atggagagcagcgccaagatggagagcggcggcgccggccagcagccccagccccagccccagcagcccttcctgccccccgccgcctgcttcttcgccaccgccgccgccgccgccgccgccgccgccgccgccgccgcccagagcgcccagcagcagcagcagcagcagcagcagcagcagcaggccccccagctgagacccgccgccgacggccagcccagcggcggcggccacaagagcgcccccaagcaggtgaagagacagagaagcagcagccccgagctgatgagatgcaagagaagactgaacttcagcggcttcggctacagcctgccccagcagcagcccgccgccgtggccagaagaaacgagagagagagaaacagagtgaagctggtgaacctgggcttcgccaccctgagagagcacgtgcccaacggcgccgccaacaagaagatgagcaaggtggagaccctgagaagcgccgtggagtacatcagagccctgcagcagctgctggacgagcacgacgccgtgagcgccgccttccaggccggcgtgctgagccccaccatcagccccaactacagcaacgacctgaacagcatggccggcagccccgtgagcagctacagcagcgacgagggcagctacgaccccctgagccccgaggagcaggagctgctggacttcaccaactggttctag

SEQ ID NO: 145055 - protein, 348 aa, Artificial Sequence
  derived and/or modified sequence
MAAGVAGWGVEAEEFEDAPDVEPLEPTLSNIIEQRSLKWIFVGGKGGVGKTTCSCSLAVQLSKGRESVLIISTDPAHNISDAFDQKFSKVPTKVKGYDNLFAMEIDPSLGVAELPDEFFEEDNMLSMGKKMMQEAMSAFPGIDEAMSYAEVMRLVKGMNFSVVVFDTAPTGHTLRLLNFPTIVERGLGRLMQIKNQISPFISQMCNMLGLGDMNADQLASKLEETLPVIRSVSEQFKDPEQTTFICVCIAEFLSLYETERLIQELAKCKIDTHNIIVNQLVFPDPEKPCKMCEARHKIQAKYLDQMEDLYEDFHIVKLPLLPHEVRGADKVNTFSALLLEPYKPPSAQ

SEQ ID NO: 145056 - DNA, 1047 bp, Artificial Sequence
  derived and/or modified sequence
atggcagccggggtagccgggtggggggtcgaggctgaggaattcgaggacgcgccagacgtggagcccctagagccgacgctttctaacatcattgaacagcggtcattaaagtggattttcgtggggggtaaggggggggtcggaaagaccacatgcagttgtagcctggccgtccagctgtccaagggaagggaaagcgttctcatcatctccacagatcccgcacataatatatccgatgccttcgatcagaaattctctaaagtacccaccaaggtgaaagggtacgacaaccttttcgcaatggagatagaccctagtctgggagtggccgaattgcctgacgagttcttcgaagaagacaacatgctttcgatgggcaagaaaatgatgcaggaagccatgtccgcctttcctggaatcgatgaggccatgtcttatgcagaagtgatgcgcctggtaaagggcatgaatttcagtgtcgtggtctttgatacagcccccacaggtcatactctcaggctgttgaatttccccacgattgtcgaaagaggcttgggtaggctcatgcagattaaaaaccagatttccccgttcatatcccagatgtgcaatatgctgggcttgggggacatgaacgcggatcaacttgcgagcaagctggaggaaactctccccgtcatccgaagcgtgtcagaacagtttaaagaccctgaacagaccacatttatttgtgtgtgcatcgccgagtttctctctttgtacgagacagagcgactcatccaggagctcgctaagtgtaaaatcgacactcacaacatcattgtaaaccagttggtgttcccggacccagagaagccttgtaagatgtgtgaagcacggcacaagattcaggctaaatacctggaccagatggaggacttatatgaagattttcatattgttaagcttcctctactcccacatgaggtaaggggggcggataaagttaacacattctcagccctgttgcttgagccatacaaaccaccttcagcccagtag

SEQ ID NO: 145057 - DNA, 1047 bp, Artificial Sequence
  derived and/or modified sequence
atggcagccggcgtggccggctggggagtggaggccgaagagtttgaagacgcacccgacgtcgaacctctcgaacccacactcagcaatataatcgaacagagaagtctgaaatggattttcgtgggcggcaagggaggtgtcggaaaaaccacctgctcgtgtagtctggccgtgcagctgtccaagggtcgtgaatctgtgctgattatcagtacggacccggcccacaatatatccgacgctttcgaccagaaattttctaaggtacccactaaagtcaaaggatatgataacctgtttgccatggaaatcgatccttctttgggggtggcagaattacccgacgagttcttcgaggaggataacatgctgtccatgggaaagaaaatgatgcaggaagcaatgtctgccttcccagggatcgatgaggcaatgtcctatgctgaagtcatgaggcttgttaagggaatgaactttagtgtcgtcgtcttcgacacagcaccaaccggacacacactgaggctgcttaactttcctacaatagtggagcgaggattgggccgactgatgcagatcaagaaccagatctctcctttcatatctcaaatgtgcaacatgcttggcttgggcgacatgaatgccgatcaattggcttctaaactggaagagacattgcccgttatacgatctgtgtcagaacagttcaaagatcctgagcaaacaacttttatatgcgtgtgtatcgcagagttcctctctctctatgaaactgaacgactcattcaagagctcgcgaaatgtaaaatcgacacacacaacatcatcgttaaccagctggtgtttccggaccctgagaagccttgcaagatgtgcgaagcccgccacaaaattcaagctaaatatcttgatcagatggaagacctctacgaggactttcacatcgtgaaattgccacttctcccacatgaagtgcggggcgcagataaggttaacaccttctccgctttgcttcttgagccttacaagcccccgtccgctcaatag

SEQ ID NO: 145058 - DNA, 1047 bp, Artificial Sequence
  derived and/or modified sequence
atggctgctggggtggccggctggggcgtggaggccgaggagtttgaagatgccccagatgtggagcccctggagcccaccctgagcaacatcatcgagcagaggagcctgaagtggatctttgtgggcggcaaaggaggagtgggcaagaccacctgcagctgcagcctggccgtgcagctgagcaagggccgggagagcgtgctgatcatcagcacagatcctgcccacaacatcagtgatgcctttgaccagaagttcagcaaggtgcccaccaaggtgaagggctatgacaacctgtttgccatggagattgaccccagcctgggcgtggccgagctgcctgatgagttctttgaggaggacaacatgctgtccatgggcaagaagatgatgcaggaggccatgtctgccttccctggcattgatgaggccatgtcctatgcagaggtgatgaggctggtgaagggcatgaacttctctgtggtggtgtttgacacagcccccaccggccacaccctgcggctgctgaacttccccaccatcgtggagcggggcctgggccgcctgatgcagatcaagaaccagatcagccccttcatcagccagatgtgcaacatgctgggcctgggggacatgaatgctgaccagctggccagcaagctggaggagaccctgcctgtgatccgctctgtgtctgagcagttcaaggaccctgagcagaccaccttcatctgtgtgtgcatcgccgagttcctgagcctgtatgaaacagagcggctcatccaggagctggccaagtgcaagattgacacccacaacatcatcgtgaaccagctggtgtttcctgaccctgagaagccctgcaagatgtgtgaggcccggcacaagatccaggccaagtacctggaccagatggaggacctgtatgaggacttccacatcgtgaagctgcccctgctgccccatgaggtgagaggagctgacaaggtgaacaccttcagcgccctgctgctggagccctacaagccacccagcgcccagtag

SEQ ID NO: 145059 - DNA, 1047 bp, Artificial Sequence
  derived and/or modified sequence
atggccgccggcgtggccggctggggcgtggaggccgaggagttcgaggacgccccagatgtggaacccctggaaccaaccctttccaatattatcgagcaacggtccttaaagtggatcttcgtgggaggcaaagggggagtgggcaagacaacctgcagctgtagcctggctgtgcagctgagtaaagggagggagtctgtcctgatcatttctacggatcctgcccataacatctcagacgccttcgaccagaagttcagtaaggtccccacgaaggttaaaggatatgacaacttgttcgcaatggaaattgacccctccttgggggttgccgagttgcctgatgaatttttcgaagaagacaacatgctgtcaatgggaaaaaagatgatgcaagaggccatgagcgctttccctggcatagatgaagctatgtcttacgcagaggtgatgagacttgtgaaggggatgaactttagtgtggtcgtgttcgacactgcacccactgggcataccctccgtcttctcaactttccaaccatagtcgaaagaggcttggggcgcctcatgcagataaagaaccagataagtcctttcatctctcagatgtgtaacatgttggggctgggcgatatgaacgcagatcagctggcttcgaagctggaggaaaccctccccgtgatcagatctgtttctgagcagttcaaagatccagaacagacaactttcatatgcgtatgtatcgccgaattcctttctctatatgagacagagagactgattcaggaactggcaaaatgtaaaatcgatactcacaacattattgtgaatcagttggtgttccccgatcctgagaagccctgcaagatgtgcgaggccagacacaagatccaggccaagtatctggatcagatggaggatctgtacgaggattttcacatcgttaagctgcctttgctgccacacgaggtgagaggagctgacaaagtcaataccttctctgccctcttactggagccctataagccaccctcagctcagtag

SEQ ID NO: 145060 - DNA, 1047 bp, Artificial Sequence
  derived and/or modified sequence
atggccgccggcgtggccggctggggcgtggaggccgaggagttcgaggatgcaccagacgtggagccgctggagcccaccttgagtaatatcatagaacagaggagcctgaaatggatttttgtggggggaaaagggggtgttggaaagacgacttgctcctgttctctggccgtgcagctatcgaaaggtcgcgaaagcgtcttgatcatctctactgatccagcccataacatctccgatgccttcgaccagaagttttcgaaggtgccgacaaaggtcaaaggctatgacaacctcttcgctatggagattgacccaagcctgggggtagccgagctgccagatgagtttttcgaggaagacaacatgttgagtatgggcaagaaaatgatgcaggaggccatgtcagcatttccaggaattgacgaggcaatgagttacgccgaagttatgcgactggttaaggggatgaacttctctgttgttgtttttgacaccgcacccactggccacaccctacgcctgctgaactttccaacaatcgtggagcgcggcctcggtcgcctgatgcagatcaagaaccagatctctccatttatatctcaaatgtgtaacatgctgggattgggcgatatgaacgcggatcagcttgcgtctaaactagaggagactctccccgtaatccgcagtgtgagcgagcagtttaaagaccccgaacagaccacatttatctgtgtatgtatagccgagttcctgtctctgtatgagaccgaaagattgatccaggaactggctaagtgcaagattgatactcacaacatcattgttaatcaactggtgtttcctgatcctgaaaagccctgcaaaatgtgtgaggcccgccacaagatacaggccaagtacctagatcagatggaggatttgtacgaggactttcacattgtgaaactgcctctgcttcctcatgaagtgcgcggagcagacaaggtcaatacttttagtgctcttctgttggaaccatataagccacctagtgcgcagtag

SEQ ID NO: 145061 - DNA, 1047 bp, Artificial Sequence
  derived and/or modified sequence
atggccgcaggggttgctggatggggtgtcgaagcagaggaattcgaggatgcaccagatgtagaacctctggagcctaccctaagtaatattatagagcaacggagtctgaagtggatcttcgtgggtggaaagggtggtgttggtaagaccacttgcagttgctctcttgcggtacagctgagcaagggccgagagagcgtgctgatcatcagtactgaccccgctcataacatcagcgatgccttcgatcagaagttctccaaggtgcccaccaaggtgaagggatacgataatttgttcgctatggagatagaccccagcttaggggtggcagaacttcctgacgaatttttcgaggaagataatatgctgtccatgggtaagaagatgatgcaggaagctatgtctgccttccccggaattgacgaagcgatgtcttacgctgaggttatgcggttggtaaaaggaatgaatttttctgtggtcgtatttgacacggcacctaccggacacaccctgaggctgctgaactttccgaccatcgttgaacgtgggttagggagactcatgcagattaagaaccagatttcgccgttcatctcacagatgtgcaacatgctgggactcggtgacatgaacgccgaccagttggcgtctaaactggaggagactctccccgtgatacggagcgtgtctgagcagtttaaggatcccgagcagaccacattcatctgcgtctgtattgcggagttcctgtcactgtacgaaacagaacgtctgatccaggagctggccaaatgtaagatcgacactcacaacatcatagtgaaccagctggtctttccagatcctgagaagccctgcaagatgtgtgaagcgaggcataaaatacaagccaagtatttggaccagatggaagatctgtacgaggattttcacatcgtcaaactgccactgctcccacatgaggtgcgcggtgcagataaggtaaataccttttccgctctgctgcttgaaccatacaaacccccttccgcccagtag

SEQ ID NO: 145062 - DNA, 1047 bp, Artificial Sequence
  derived and/or modified sequence
atggcagccggagtcgctgggtggggcgttgaagccgaggagtttgaggacgctcccgacgtggagcccctggagcctacactgtccaatatcattgagcagaggagcctaaaatggatatttgtgggaggcaaaggaggagtgggcaagactacctgcagctgctcattggctgttcagctctccaaaggcagagagtcagtactgatcatttccacggaccccgctcataacatctccgacgcattcgatcagaaattcagcaaagtaccaacgaaagtgaagggctatgataatttatttgccatggagattgacccttctctgggggtggccgaactcccggacgagttcttcgaggaggacaatatgctgtctatgggcaagaaaatgatgcaggaagctatgtcagcattccctgggatagacgaggctatgtcctacgcagaggtgatgcgcctagtgaagggaatgaatttttccgtcgtagttttcgatacggcccctacaggccacacactccggctgcttaactttcctaccattgttgaacggggactggggcgactcatgcaaatcaaaaaccagatctccccattcatatcccagatgtgcaacatgctgggactgggcgacatgaatgctgaccagctcgcctccaagctggaagaaacgctgcctgtaatacggtctgtgtcagagcagtttaaagatcctgaacagaccacttttatctgtgtgtgcatagctgagttcttatcattgtatgagaccgaaaggctgatccaggaactagccaaatgcaaaattgacacccataatatcatcgtgaatcagttagttttcccagatcctgagaaaccttgcaagatgtgcgaggctagacacaagatccaagctaaatacttagaccagatggaggatctgtacgaggactttcatatcgttaaattacctctgttgccacacgaagttagaggggcagataaggttaataccttcagcgcccttttgttagaaccatataaacctccgtctgctcagtag

SEQ ID NO: 145063 - DNA, 1368 bp, Artificial Sequence
  derived and/or modified sequence
gtttggctggttgctaaggtgaggttggcgctaccggaacataagagtgattggtgttcttcgtatggtgcgctccgctggatcacgtgagccagttccaaaatggcggcaggggtggccgggtggggggttgaggcagaggagttcgaagatgctcctgatgtggagccgctggagcctacacttagcaacatcatcgagcagcgcagcctgaagtggatcttcgtcgggggcaagggtggtgtgggcaagaccacctgcagctgcagcctggcagtccagctctccaaggggcgtgagagtgttctgatcatctccacagacccagcacacaacatctcagatgcttttgaccagaagttctcaaaggtgcctaccaaggtcaaaggctatgacaacctctttgctatggagattgaccccagcctgggcgtggcggagctgcctgacgagttcttcgaggaggacaacatgctgagcatgggcaagaagatgatgcaggaggccatgagcgcatttcccggcatcgatgaggccatgagctatgccgaggtcatgaggctggtgaagggcatgaacttctcggtggtggtatttgacacggcacccacgggccacaccctgaggctgctcaacttccccaccatcgtggagcggggcctgggccggcttatgcagatcaagaaccagatcagccctttcatctcacagatgtgcaacatgctgggcctgggggacatgaacgcagaccagctggcctccaagctggaggagacgctgcccgtcatccgctcagtcagcgaacagttcaaggaccctgagcagacaactttcatctgcgtatgcattgctgagttcctgtccctgtatgagacagagaggctgatccaggagctggccaagtgcaagattgacacacacaatataattgtcaaccagctcgtcttccccgaccccgagaagccctgcaagatgtgtgaggcccgtcacaagatccaggccaagtatctggaccagatggaggacctgtatgaagacttccacatcgtgaagctgccgctgttaccccatgaggtgcggggggcagacaaggtcaacaccttctcggccctcctcctggagccctacaagccccccagtgcccagtagcacagctgccagccccaaccgctgccatttcacactcaccctccaccctccccaccccctcggggcagagtttgcacaaagtcccccccataatacagggggagccacttgggcaggaggcagggaggggtccattccccctggtggggctggtggggagctgtagttgccccctacctctcccacctcttgctcttcaataaaatgatcttaaactgc

SEQ ID NO: 145064 - DNA, 1280 bp, Artificial Sequence
  derived and/or modified sequence
gagccagttccaaaatggcggcaggggtggccgggtggggggttgaggcagaggagttcgaagatgctcctgatgtggagccgctggagcctacacttagcaacatcatcgagcagcgcagcctgaagtggatcttcgtcgggggcaagggtggtgtgggcaagaccacctgcagctgcagcctggcagtccagctctccaaggggcgtgagagtgttctgatcatctccacagacccagcacacaacatctcagatgcttttgaccagaagttctcaaaggtgcctaccaaggtcaaaggctatgacaacctctttgctatggagattgaccccagcctgggcgtggcggagctgcctgacgagttcttcgaggaggacaacatgctgagcatgggcaagaagatgatgcaggaggccatgagcgcatttcccggcatcgatgaggccatgagctatgccgaggtcatgaggctggtgaagggcatgaacttctcggtggtggtatttgacacggcacccacgggccacaccctgaggctgctcaacttccccaccatcgtggagcggggcctgggccggcttatgcagatcaagaaccagatcagccctttcatctcacagatgtgcaacatgctgggcctgggggacatgaacgcagaccagctggcctccaagctggaggagacgctgcccgtcatccgctcagtcagcgaacagttcaaggaccctgagcagacaactttcatctgcgtatgcattgctgagttcctgtccctgtatgagacagagaggctgatccaggagctggccaagtgcaagattgacacacacaatataattgtcaaccagctcgtcttccccgaccccgagaagccctgcaagatgtgtgaggcccgtcacaagatccaggccaagtatctggaccagatggaggacctgtatgaagacttccacatcgtgaagctgccgctgttaccccatgaggtgcggggggcagacaaggtcaacaccttctcggccctcctcctggagccctacaagccccccagtgcccagtagcacagctgccagccccaaccgctgccatttcacactcaccctccaccctccccaccccctcggggcagagtttgcacaaagtcccccccataatacagggggagccacttgggcaggaggcagggaggggtccattccccctggtggggctggtggggagctgtagttgccccctacctctcccacctcttgctcttcaataaaatgatcttaaactgc

SEQ ID NO: 145065 - DNA, 1047 bp, Artificial Sequence
  derived and/or modified sequence
atggccgccggcgtggccggctggggcgtggaggccgaggagttcgaggacgcccccgacgtggagcccctggagcccaccctgagcaacatcatcgagcagagaagcctgaagtggatcttcgtgggcggcaagggcggcgtgggcaagaccacctgcagctgcagcctggccgtgcagctgagcaagggcagagagagcgtgctgatcatcagcaccgaccccgcccacaacatcagcgacgccttcgaccagaagttcagcaaggtgcccaccaaggtgaagggctacgacaacctgttcgccatggagatcgaccccagcctgggcgtggccgagctgcccgacgagttcttcgaggaggacaacatgctgagcatgggcaagaagatgatgcaggaggccatgagcgccttccccggcatcgacgaggccatgagctacgccgaggtgatgagactggtgaagggcatgaacttcagcgtggtggtgttcgacaccgcccccaccggccacaccctgagactgctgaacttccccaccatcgtggagagaggcctgggcagactgatgcagatcaagaaccagatcagccccttcatcagccagatgtgcaacatgctgggcctgggcgacatgaacgccgaccagctggccagcaagctggaggagaccctgcccgtgatcagaagcgtgagcgagcagttcaaggaccccgagcagaccaccttcatctgcgtgtgcatcgccgagttcctgagcctgtacgagaccgagagactgatccaggagctggccaagtgcaagatcgacacccacaacatcatcgtgaaccagctggtgttccccgaccccgagaagccctgcaagatgtgcgaggccagacacaagatccaggccaagtacctggaccagatggaggacctgtacgaggacttccacatcgtgaagctgcccctgctgccccacgaggtgagaggcgccgacaaggtgaacaccttcagcgccctgctgctggagccctacaagccccccagcgcccagtag

SEQ ID NO: 145066 - protein, 313 aa, Artificial Sequence
  derived and/or modified sequence
MAQRKNAKSSGNSSSSGSGSGSTSAGSSSPGARRETKHGGHKNGRKGGLSGTSFFTWFMVIALLGVWTSVAVVWFDLVDYEEVLGKLGIYDADGDGDFDVDDAKVLLGLKERSTSEPAVPPEEAEPHTEPEEQVPVEAEPQNIEDEAKEQIQSLLHEMVHAEHVEGEDLQQEDGPTGEPQQEDDEFLMATDVDDRFETLEPEVSHEETEHSYHVEETVSQDCNQDMEEMMSEQENPDSSEPVVEDERLHHDTDDVTYQVYEEQAVYEPLENEGIEITEVTAPPEDNPVEDSQVIVEEVSIFPVEEQQEVPPDT

SEQ ID NO: 145067 - protein, 758 aa, Artificial Sequence
  derived and/or modified sequence
MAQRKNAKSSGNSSSSGSGSGSTSAGSSSPGARRETKHGGHKNGRKGGLSGTSFFTWFMVIALLGVWTSVAVVWFDLVDYEEVLGKLGIYDADGDGDFDVDDAKVLLGLKERSTSEPAVPPEEAEPHTEPEEQVPVEAEPQNIEDEAKEQIQSLLHEMVHAEHVEGEDLQQEDGPTGEPQQEDDEFLMATDVDDRFETLEPEVSHEETEHSYHVEETVSQDCNQDMEEMMSEQENPDSSEPVVEDERLHHDTDDVTYQVYEEQAVYEPLENEGIEITEVTAPPEDNPVEDSQVIVEEVSIFPVEEQQEVPPETNRKTDDPEQKAKVKKKKPKLLNKFDKTIKAELDAAEKLRKRGKIEEAVNAFKELVRKYPQSPRARYGKAQCEDDLAEKRRSNEVLRGAIETYQEVASLPDVPADLLKLSLKRRSDRQQFLGHMRGSLLTLQRLVQLFPNDTSLKNDLGVGYLLIGDNDNAKKVYEEVLSVTPNDGFAKVHYGFILKAQNKIAESIPYLKEGIESGDPGTDDGRFYFHLGDAMQRVGNKEAYKWYELGHKRGHFASVWQRSLYNVNGLKAQPWWTPKETGYTELVKSLERNWKLIRDEGLAVMDKAKGLFLPEDENLREKGDWSQFTLWQQGRRNENACKGAPKTCTLLEKFPETTGCRRGQIKYSIMHPGTHVWPHTGPTNCRLRMHLGLVIPKEGCKIRCANETKTWEEGKVLIFDDSFEHEVWQDASSFRLIFIVDVWHPELTPQQRRSLPAI

SEQ ID NO: 145068 - DNA, 2277 bp, Artificial Sequence
  derived and/or modified sequence
atggcccaaaggaaaaatgccaagtcttcgggcaacagcagctcgagtggctccggatcgggctccaccagtgctgggtcgtccagcccaggtgctaggagggagaccaaacatgggggacacaagaatggccgcaaaggtggccttagcggaacatcctttttcacatggtttatggtgattgccctgctgggagtttggaccagtgtcgccgtagtatggtttgacctcgtagattacgaagaggtgctggggaagttgggtatctatgatgccgacggtgatggagactttgacgtggacgatgccaaggtcttgctgggcctcaaggaacgcagtacctcggagccggccgttcctcccgaagaagcagagcctcacacagaaccagaagagcaagtcccagtcgaggcagagcctcagaacattgaggacgaagcgaaggagcagatccaaagcctgttgcacgagatggtccacgccgagcacgttgagggggaggacctgcagcaggaggacggaccaactggggagccgcagcaggaggatgacgagttccttatggctactgacgtcgatgacagattcgagactcttgaacccgaggtgagccatgaagagacagagcatagttaccatgtagaagagaccgtttcgcaagactgtaatcaagatatggaggagatgatgtcagagcaagaaaatcccgatagctccgaacccgtggtggaggacgaacggctgcaccatgacactgatgacgtgacctaccaggtttacgaagagcaagcggtctatgaacccttagaaaacgaaggaatcgagattactgaggttactgcccccccagaggacaaccccgtggaagacagccaggtgatcgtggaggaggtgtccatttttccagtggaggagcagcaggaggtgcctccggagactaataggaagacagatgatcctgagcaaaaagcaaaggtgaaaaaaaagaagcccaagctgttaaacaaattcgataaaacgattaaggccgagctcgacgccgccgaaaaactgcggaagcggggcaagattgaggaggccgtcaacgctttcaaggagctcgtcaggaagtatccacagtctcccagagcaaggtatggtaaggctcagtgcgaggacgatctcgccgaaaagcgccgcagtaatgaggtgctgaggggggccatcgaaacgtaccaggaggtggctagcctgcctgacgtgccagcagacctgcttaaactctccctaaaacggcgcagtgaccgccagcagttccttgggcatatgagaggatctctgctgaccctgcagagattagtccagctgtttcctaatgacacctctttgaaaaatgacctcggggtgggatatcttttaatcggagacaacgacaatgctaagaaagtgtacgaagaggtgctttctgtgacacccaatgatggtttcgcaaaggtacactatggctttattttgaaagcccagaacaagattgctgaatctattccctatctgaaggagggaattgagtccggagaccctgggaccgacgacgggaggttctactttcacctcggggatgccatgcagcgagttggcaataaggaagcttataagtggtacgaactcgggcacaagcgcggtcactttgcatcggtttggcagcgctcattgtataatgtgaatggcctaaaggctcagccatggtggacccccaaggaaactggctacacagaacttgtcaagtccttggagcgcaactggaagcttattcgcgacgaaggactggcagtaatggacaaagcgaaagggctgtttctgccagaagatgaaaatttgagagagaaaggggattggagtcaatttaccctttggcaacagggccgcaggaatgagaacgcttgcaaaggagccccgaagacttgtacattactggagaagttcccagaaactaccgggtgtcgccgcggccaaattaaatattccattatgcatcctggcacccacgtgtggccacacactggtccaaccaactgtcggttgcggatgcatctcggtctcgttatccccaaagagggatgcaagattcggtgtgcaaatgaaacgaagacctgggaggaaggtaaggtcctgatctttgacgattcatttgagcatgaagtttggcaggacgcatcctctttccgccttattttcatcgtcgatgtgtggcaccccgagcttaccccccagcagcgtcgctctctccctgccatctag

SEQ ID NO: 145069 - DNA, 2277 bp, Artificial Sequence
  derived and/or modified sequence
atggcccagaggaagaatgccaagagcagcggcaacagcagcagcagcggcagcggcagcggcagcaccagcgctggcagcagcagccctggggcccggcgggagaccaagcacggcggccacaagaatggaaggaagggcggcctgagcggcaccagcttcttcacctggttcatggtgattgccctgctgggcgtgtggacctctgtggccgtggtgtggtttgacctggtggactatgaggaggtgctgggcaagctgggcatctatgatgctgatggagatggagactttgatgtggatgatgccaaggtgctgctgggcctgaaggagaggagcaccagcgagcctgctgtgcccccagaggaggccgagccccacacagagcctgaggagcaggtgcctgtggaggccgagccccagaacattgaagatgaggccaaggagcagatccagagcctgctgcacgagatggtgcatgctgagcacgtggagggggaggacctgcagcaggaggatggccccaccggggagccccagcaggaggatgatgagttcctgatggccacagatgtggatgacagatttgagaccctggagcctgaggtgtcccatgaggagacagagcacagctaccacgtggaggagaccgtgtcccaggactgcaaccaggacatggaggagatgatgtctgagcaggagaacccagacagcagcgagcctgtggtggaggatgagcggctgcaccacgacacagatgatgtgacctaccaggtgtatgaggagcaggccgtgtatgagcccctggagaatgaaggcatcgagatcacagaggtgacagcccctcctgaggacaaccctgtggaggacagccaggtgattgtggaggaggtgtccatcttccctgtggaggagcagcaggaggtgcccccagagaccaacaggaagacagatgatcctgagcagaaggccaaggtgaagaagaagaagcccaagctgctgaacaagtttgacaagaccatcaaggccgagctggatgctgctgagaagctgaggaagaggggcaagattgaggaggccgtgaatgccttcaaggagctggtgaggaagtacccccagagcccccgggcccgctatggcaaggcccagtgtgaagatgacctggccgagaagaggaggagcaatgaggtgctgcggggggccatcgagacctaccaggaggtggccagcctgcctgatgtgcctgctgacctgctgaagctgagcctgaagagaagaagtgaccggcagcagttcctgggccacatgaggggcagcctgctgaccctgcagaggctggtgcagctgttccccaatgacaccagcctgaagaatgacctgggcgtgggctacctgctgattggagacaatgacaatgccaagaaggtgtatgaggaggtgctgtctgtgaccccaaatgatggctttgccaaggtgcactacggcttcatcctgaaggcccagaacaagattgctgagagcatcccctacctgaaggagggcattgaaagtggggaccccggcacagatgatggccgcttctacttccacctgggagatgccatgcagagggtgggcaacaaggaggcctacaagtggtatgagctgggccacaagaggggccactttgcctctgtgtggcagaggagcctgtacaacgtgaatggcctgaaggcccagccctggtggacccccaaggagaccggctacacagagctggtgaagagcctggagaggaactggaagctgatcagagatgagggcctggccgtgatggacaaggccaagggcctcttcctgcctgaagatgagaacctgcgggagaagggggactggagccagttcaccctgtggcagcagggcagaagaaatgaaaatgcctgcaagggggcccccaagacctgcaccctgctggagaagtttcctgagaccaccggctgcagaagaggccagatcaagtacagcatcatgcaccctggcacccacgtgtggccccacacaggccccaccaactgccgcctgaggatgcacctgggcctggtgatccccaaggagggctgcaagatccgctgtgccaatgagaccaagacctgggaggagggcaaggtgctgatctttgatgacagctttgaacatgaggtgtggcaggatgccagcagcttccgcctcatcttcatcgtggatgtgtggcaccctgagctgaccccccagcagaggaggagcctgcctgccatctag

SEQ ID NO: 145070 - DNA, 2277 bp, Artificial Sequence
  derived and/or modified sequence
atggcccagcggaagaacgccaagagcagcggcaacagcagcagctccggaagtggatctgggtcaacctctgcagggtcttcctctcccggagctcgcagggagactaaacacggcgggcacaaaaacgggaggaaaggaggtctgtccggtacaagctttttcacctggtttatggtgattgccctcttgggagtctggaccagcgtggcggtcgtctggttcgacctagtcgactacgaagaggtcctaggtaagttgggtatatatgacgccgacggcgatggcgactttgatgttgatgacgctaaggtcctgctgggactgaaggaacgaagtaccagcgagcccgcagtgccacccgaagaggccgagccgcacacagaacctgaggagcaggtgcctgtcgaagccgagccacagaatatcgaggatgaggcaaaagagcaaatccagtcactgctgcacgaaatggtgcacgccgagcacgtggaaggcgaggacttgcagcaggaggacggacccacaggtgagccccagcaggaggacgacgaatttttgatggctaccgatgttgacgatcgcttcgagactctggaaccagaagtctctcacgaggagactgagcactcataccatgtggaagagactgtgagtcaggattgtaaccaggatatggaagagatgatgagtgaacaggagaacccagatagtagtgaacctgtagtggaggatgaacgactccaccatgacacagacgacgtaacttaccaggtgtatgaggaacaggctgtttatgagcccttggagaacgagggtatcgagataactgaggtgacagctcctcctgaggacaatccagtggaggactcacaggttatcgttgaggaagtgagcatcttccccgtcgaggaacagcaggaagttcctccggagactaaccggaagacagacgacccagagcagaaggctaaagttaaaaagaagaaaccgaagctgctgaataagtttgataagactattaaagccgagttggatgccgcagagaagctgcgaaagcgaggcaaaatcgaggaggcagtgaacgcatttaaggaactcgttcggaagtatccacagagtccacgtgcccggtacggaaaggcgcagtgcgaagatgatctggccgaaaagcggagaagcaatgaggtcctgagaggggccatcgaaacttaccaggaagtggcctctctccccgatgtgccagcggaccttctgaagctgtcgctgaagaggaggagcgacagacaacagttcctgggacatatgcgcggaagtcttttgacactacaacggctggtccagttgttcccgaacgacacctcattgaagaacgacctgggggttggatatttacttattggagataacgataatgctaaaaaagtatatgaagaggtcttatccgtgacccccaacgacgggtttgcaaaggtacattacgggtttatccttaaggcccaaaataaaatagctgagagcattccctacctgaaggaggggatcgagtctggcgatcccggaacagatgacgggagattctattttcacctgggggacgccatgcagcgtgtgggtaataaagaagcttataagtggtacgagctgggacataagaggggtcactttgcctccgtttggcagcggagtttgtacaacgtgaacggtctgaaagcccagccatggtggaccccaaaagagacagggtacacagagttggtgaaatccctcgagagaaactggaaactgattcgcgacgagggactggcagtcatggataaagcgaagggtctctttctgcctgaagatgagaatctgagggagaagggggactggtcccaatttaccctatggcagcaggggcggcggaatgagaacgcctgtaagggcgcgcctaagacatgcacactgctggaaaagttcccagagaccaccggctgcagacgtggccagatcaaatattcaataatgcatcccggaacgcacgtatggccccacactgggcccaccaattgtagactgagaatgcacctcggtttagtgatccctaaagagggctgcaagattagatgtgccaatgagacaaagacttgggaagagggtaaagtgctgatctttgacgactcatttgagcacgaggtgtggcaagatgctagcagcttccgcctgatctttattgttgacgtatggcacccagaattgacgccacagcagaggagatccctgcccgcaatctag

SEQ ID NO: 145071 - DNA, 2277 bp, Artificial Sequence
  derived and/or modified sequence
atggcgcagcggaagaatgctaaatcttcagggaatagttcaagctctgggtccggcagtgggagtacatccgccggaagctcgtccccgggtgcccgtagggaaaccaaacacggagggcataaaaatgggagaaagggaggcctcagcgggacttcattctttacatggtttatggtaatagcgttgctgggtgtctggacatccgtcgccgtagtgtggtttgatctagtggattatgaggaggtgctggggaaattggggatctatgatgccgacggagatggtgactttgatgtcgacgacgccaaagttctgctaggtctgaaggaacggtccacgagtgagcccgcagtgccccctgaggaggccgaacctcacaccgagcccgaggagcaagtacctgtggaagcggaaccacagaatatcgaggacgaagccaaagagcaaatccaaagcctgctgcacgagatggtgcatgcagagcacgtcgagggtgaggacctgcagcaggaagacgggcctacaggcgaacctcagcaagaggacgatgagtttctgatggctacagatgtggatgaccgattcgaaacgctcgagcctgaagtgtcccacgaagagacggaacattcgtatcatgtcgaagagacggtctcacaagattgtaatcaggatatggaggagatgatgagtgagcaagagaatcctgactcctcggaacctgtcgtggaggatgagaggctacatcatgacacagatgacgtgacataccaggtgtacgaggaacaggcagtgtatgagcccttggaaaacgagggcattgagatcacggaggttactgcccctccagaggacaatcctgttgaggacagccaggtaatcgtggaggaagtgtctatttttcctgtcgaggagcagcaggaggtcccacccgaaacaaatcgcaagacagacgaccccgagcagaaggctaaggtcaagaagaagaagccaaagctcctcaacaaattcgataagacaataaaagccgagctggacgccgctgagaaacttcgaaagcggggtaaaatagaggaagccgtgaatgcgtttaaggagttggtcagaaaatacccacagtctcccagggctcgatatggtaaagcccagtgtgaggacgatctggcagagaaacggcgaagcaatgaggtgctacgcggagcaatagagacataccaagaggtcgccagcctgccggacgtccccgctgacctgttgaagctttccttaaaacgtcggtccgatcgccaacagttcctagggcatatgcgcggttctctcctgacattgcagagattagtacaactgtttccgaatgacacgagtctgaagaatgatttgggcgtgggttatctacttataggagataatgataacgctaagaaagtttatgaagaagtcttgtccgtcacacctaacgacggtttcgccaaggtgcactatggctttattctgaaggctcagaacaagattgccgagtccattccttacctaaaggagggcattgagagcggggaccccggtacagatgatggcagattttacttccaccttggcgacgcaatgcagagggttggcaacaaagaagcctataaatggtacgagcttggccacaaacgcggtcacttcgctagcgtgtggcagcgcagcctgtacaacgtgaacgggctcaaggcccaaccatggtggacccctaaagaaaccggatacacagaacttgtcaagtctctggagcggaactggaaactcattagagacgaaggtctggccgtgatggacaaggctaaaggtttgtttctacccgaagacgaaaacctgagagagaaaggggactggagccaatttaccctctggcaacagggtagaagaaatgagaatgcttgcaaaggggctcctaagacctgcacgctgttagagaagtttcccgagacgacagggtgtagaaggggtcaaattaagtactccatcatgcaccccggtacacatgtgtggccacacaccggacctactaattgtcggttgaggatgcacttaggccttgtgattcctaaggagggttgcaagattcgttgcgccaacgaaactaaaacctgggaagaaggaaaggttctgattttcgacgatagctttgaacatgaggtctggcaggatgcatctagtttcaggttgatttttatcgtcgacgtctggcatcctgagctaacaccgcagcagcggcgttccctccctgcgatctag

SEQ ID NO: 145072 - DNA, 4595 bp, Artificial Sequence
  derived and/or modified sequence
cgcagccggcaggcgggtgaagtcttcccaggtgctgcaggcggtgctgaggcacagggtctgctgcaggagcagcggcccgaacccgctccagcggcccgccgccgccagcggttcccgcgtcgcgtgtgtacccccgcgcactgaaggaggtccgccagccctcaccagcccccgcggaccgtgcaatggcccagcgtaagaatgccaagagcagcggcaacagcagcagcagcggctccggcagcggtagcacgagtgcgggcagcagcagccccggggcccggagagagacaaagcatggaggacacaagaatgggaggaaaggcggactctcaggaacttcattcttcacgtggtttatggtgattgcattgctgggcgtctggacatctgtagctgtcgtttggtttgatcttgttgactatgaggaagttctaggaaaactaggaatctatgatgctgatggtgatggagattttgatgtggatgatgccaaagttttattaggacttaaagagagatctacttcagagccagcagtcccgccagaagaggctgagccacacactgagcccgaggagcaggttcctgtggaggcagaaccccagaatatcgaagatgaagcaaaagaacaaattcagtcccttctccatgaaatggtacacgcagaacatgttgagggagaagacttgcaacaagaagatggacccacaggagaaccacaacaagaggatgatgagtttcttatggcgactgatgtagatgatagatttgagaccctggaacctgaagtatctcatgaagaaaccgagcatagttaccacgtggaagagacagtttcacaagactgtaatcaggatatggaagagatgatgtctgagcaggaaaatccagattccagtgaaccagtagtagaagatgaaagattgcaccatgatacagatgatgtaacataccaagtctatgaggaacaagcagtatatgaacctctagaaaatgaagggatagaaatcacagaagtaactgctccccctgaggataatcctgtagaagattcacaggtaattgtagaagaagtaagcatttttcctgtggaagaacagcaggaagtaccaccagaaacaaatagaaaaacagatgatccagaacaaaaagcaaaagttaagaaaaagaagcctaaacttttaaataaatttgataagactattaaagctgaacttgatgctgcagaaaaactccgtaaaaggggaaaaattgaggaagcagtgaatgcatttaaagaactagtacgcaaataccctcagagtccacgagcaagatatgggaaggcgcagtgtgaggatgatttggctgagaagaggagaagtaatgaggtgctacgtggagccatcgagacctaccaagaggtggccagcctacctgatgtccctgcagacctgctgaagctgagtttgaagcgtcgctcagacaggcaacaatttctaggtcatatgagaggttccctgcttaccctgcagagattagttcaactatttcccaatgatacttccttaaaaaatgaccttggcgtgggatacctcttgataggagataatgacaatgcaaagaaagtttatgaagaggtgctgagtgtgacacctaatgatggctttgctaaagtccattatggcttcatcctgaaggcacagaacaaaattgctgagagcatcccatatttaaaggaaggaatagaatccggagatcctggcactgatgatgggagattttatttccacctgggggatgccatgcagagggttgggaacaaagaggcatataagtggtatgagcttgggcacaagagaggacactttgcatctgtctggcaacgctcactctacaatgtgaatggactgaaagcacagccttggtggaccccaaaagaaacgggctacacagagttagtaaagtctttagaaagaaactggaagttaatccgagatgaaggccttgcagtgatggataaagccaaaggtctcttcctgcctgaggatgaaaacctgagggaaaaaggggactggagccagttcacgctgtggcagcaaggaagaagaaatgaaaatgcctgcaaaggagctcctaaaacctgtaccttactagaaaagttccccgagacaacaggatgcagaagaggacagatcaaatattccatcatgcaccccgggactcacgtgtggccgcacacagggcccacaaactgcaggctccgaatgcacctgggcttggtgattcccaaggaaggctgcaagattcgatgtgccaacgagaccaagacctgggaggaaggcaaggtgctcatctttgatgactcctttgagcacgaggtatggcaggatgcctcatctttccggctgatattcatcgtggatgtgtggcatccggaactgacaccacagcagagacgcagccttccagcaatttagcatgaattcatgcaagcttgggaaactctggagagaggctgcctttctggttccatctccttgggtgtgaggatagaatttcgaacaccaagagtcaattcccttgacttgcagcccgagtaattcaaagcctcctcctagggtcagaagacactaaagggaatatttgcctcgctgcaattcatttaggaaacaccctgctgtgtgtcatctcatgacagcactggtcttctgccagtatttaaggtgaacatttgatagcttctaccttaccagccaaagatattttttccacatagaataggtctaattcaatgtataatgagaacatatgtagaaactgtgaatggattgctttagtttgtaatttttctatgcagttatatttttctagtgtagctagactattttgtcatcatgtaccactacatttttgtttattttaatgacaagctgtataaatgctttacttctagctatttaatggtagcattactggggaactcagacttccctcttttaattcttcttagtaaaagatactcatgaaaaaagcagttttattttcctaacaaaaaagaaagagctcattatgtcagtgtctatgaactgtacccatcccaactctcaaatcgtttggttttttttatcttgattgagatcctcttctcactatgctagtggtggagatattgacaaaatcctatttctttcaaagaggaacttttcacaccgaaaaaagagcatggaattattttatattgttataaaaatcccagatgcaaatttttttaatgccaattattagagcttctggggaaaaagtatagttcacggaaataaaactatgttctttcagggttgggtggataggtggctgctagggtgtctggctcctggcggctttgccatccatgaggcaagggctgggaacacagtgtctttgcctatggtagatccatgtgaatgtcaggaagccagctcttcagtcttggagatgatttctgctacaattctgtagaaagattaaggatggcagagtaaaaggttaccaagaatgccaggatgtttttcttgggcgtaggaggtccagattactttcctttttgatgaaagagtttggaagactgtcccatctctctggcttgagaaatctctgccattttaaacatcactgtgaaatagcaattattatcatctgtatttagttttaacattacccacaacatagaaataataggtaaaaatcgtcttgcctactcattccaaagatgatcaagtcattaatctagcaaagtattcatgtatcagattttgtatattttgaatcaaagctaactaggaatgttagatataagaatgtaatgatattcatgcactgaattctaagccaatatgaacaaaaatgctgcatgaatggcacatataggtcaccaaagttcattcacaggtagaaaaaacttgtgctttcttttccatctaaaaacaaaaggagactttctttatctcatttaaagaacagctctttgaaattgaaattgaccctttttgcttgaccttaaggagattagcttccagtagatgagtttgcaaaatacttttcctgttcttttgttttgctggtattgaaaacatcccactaaatcagatgaagaggcatgggaggaaaaatatccaaattaattactaaaatcgagaagagaaggcaaactcttgaaaagtaaaaaggtgtttgtgaccttcagtatttattgaacagaggaaataactgacaagggcaatacaattcaatgttcatgtagtaacattcatgtcacttgttgaatttggttctcatatgtatattgcatacacataaattcaaactataagtcgtcatttttgagccatcatcttacattcatgtaatgaaattatggaagagagtaaaaactagctcttaacttagtaaatataatatggtatttaaaatcaggtcactacagtaaggttctaagtattgccaattgaaaagctagaaatggtattactgttgcaaagtgttgtcaataattgactccaatagcattgtaaatacttgtatcccacaactattttaaacccaagcaataaaatggattttctaattca

SEQ ID NO: 145073 - DNA, 2277 bp, Artificial Sequence
  derived and/or modified sequence
atggcccagagaaagaacgccaagagcagcggcaacagcagcagcagcggcagcggcagcggcagcaccagcgccggcagcagcagccccggcgccagaagagagaccaagcacggcggccacaagaacggcagaaagggcggcctgagcggcaccagcttcttcacctggttcatggtgatcgccctgctgggcgtgtggaccagcgtggccgtggtgtggttcgacctggtggactacgaggaggtgctgggcaagctgggcatctacgacgccgacggcgacggcgacttcgacgtggacgacgccaaggtgctgctgggcctgaaggagagaagcaccagcgagcccgccgtgccccccgaggaggccgagccccacaccgagcccgaggagcaggtgcccgtggaggccgagccccagaacatcgaggacgaggccaaggagcagatccagagcctgctgcacgagatggtgcacgccgagcacgtggagggcgaggacctgcagcaggaggacggccccaccggcgagccccagcaggaggacgacgagttcctgatggccaccgacgtggacgacagattcgagaccctggagcccgaggtgagccacgaggagaccgagcacagctaccacgtggaggagaccgtgagccaggactgcaaccaggacatggaggagatgatgagcgagcaggagaaccccgacagcagcgagcccgtggtggaggacgagagactgcaccacgacaccgacgacgtgacctaccaggtgtacgaggagcaggccgtgtacgagcccctggagaacgagggcatcgagatcaccgaggtgaccgccccccccgaggacaaccccgtggaggacagccaggtgatcgtggaggaggtgagcatcttccccgtggaggagcagcaggaggtgccccccgagaccaacagaaagaccgacgaccccgagcagaaggccaaggtgaagaagaagaagcccaagctgctgaacaagttcgacaagaccatcaaggccgagctggacgccgccgagaagctgagaaagagaggcaagatcgaggaggccgtgaacgccttcaaggagctggtgagaaagtacccccagagccccagagccagatacggcaaggcccagtgcgaggacgacctggccgagaagagaagaagcaacgaggtgctgagaggcgccatcgagacctaccaggaggtggccagcctgcccgacgtgcccgccgacctgctgaagctgagcctgaagagaagaagcgacagacagcagttcctgggccacatgagaggcagcctgctgaccctgcagagactggtgcagctgttccccaacgacaccagcctgaagaacgacctgggcgtgggctacctgctgatcggcgacaacgacaacgccaagaaggtgtacgaggaggtgctgagcgtgacccccaacgacggcttcgccaaggtgcactacggcttcatcctgaaggcccagaacaagatcgccgagagcatcccctacctgaaggagggcatcgagagcggcgaccccggcaccgacgacggcagattctacttccacctgggcgacgccatgcagagagtgggcaacaaggaggcctacaagtggtacgagctgggccacaagagaggccacttcgccagcgtgtggcagagaagcctgtacaacgtgaacggcctgaaggcccagccctggtggacccccaaggagaccggctacaccgagctggtgaagagcctggagagaaactggaagctgatcagagacgagggcctggccgtgatggacaaggccaagggcctgttcctgcccgaggacgagaacctgagagagaagggcgactggagccagttcaccctgtggcagcagggcagaagaaacgagaacgcctgcaagggcgcccccaagacctgcaccctgctggagaagttccccgagaccaccggctgcagaagaggccagatcaagtacagcatcatgcaccccggcacccacgtgtggccccacaccggccccaccaactgcagactgagaatgcacctgggcctggtgatccccaaggagggctgcaagatcagatgcgccaacgagaccaagacctgggaggagggcaaggtgctgatcttcgacgacagcttcgagcacgaggtgtggcaggacgccagcagcttcagactgatcttcatcgtggacgtgtggcaccccgagctgaccccccagcagagaagaagcctgcccgccatctag

SEQ ID NO: 145074 - protein, 994 aa, Artificial Sequence
  derived and/or modified sequence
MEAAHAKTTEECLAYFGVSETTGLTPDQVKRNLEKYGLNELPAEEGKTLWELVIEQFEDLLVRILLLAACISFVLAWFEEGEETITAFVEPFVILLILIANAIVGVWQERNAENAIEALKEYEPEMGKVYRADRKSVQRIKARDIVPGDIVEVAVGDKVPADIRILAIKSTTLRVDQSILTGESVSVIKHTEPVPDPRAVNQDKKNMLFSGTNIAAGKALGIVATTGVGTEIGKIRDQMAATEQDKTPLQQKLDEFGEQLSKVISLICVAVWLINIGHFNDPVHGGSWFRGAIYYFKIAVALAVAAIPEGLPAVITTCLALGTRRMAKKNAIVRSLPSVETLGCTSVICSDKTGTLTTNQMSVCKMFIIDKVDGDICLLNEFSITGSTYAPEGEVLKNDKPVRPGQYDGLVELATICALCNDSSLDFNEAKGVYEKVGEATETALTTLVEKMNVFNTDVRSLSKVERANACNSVIRQLMKKEFTLEFSRDRKSMSVYCSPAKSSRAAVGNKMFVKGAPEGVIDRCNYVRVGTTRVPLTGPVKEKIMAVIKEWGTGRDTLRCLALATRDTPPKREEMVLDDSARFLEYETDLTFVGVVGMLDPPRKEVTGSIQLCRDAGIRVIMITGDNKGTAIAICRRIGIFGENEEVADRAYTGREFDDLPLAEQREACRRACCFARVEPSHKSKIVEYLQSYDEITAMTGDGVNDAPALKKAEIGIAMGSGTAVAKTASEMVLADDNFSTIVAAVEEGRAIYNNMKQFIRYLISSNVGEVVCIFLTAALGLPEALIPVQLLWVNLVTDGLPATALGFNPPDLDIMDRPPRSPKEPLISGWLFFRYMAIGGYVGAATVGAAAWWFLYAEDGPHVNYSQLTHFMQCTEDNTHFEGIDCEVFEAPEPMTMALSVLVTIEMCNALNSLSENQSLLRMPPWVNIWLLGSICLSMSLHFLILYVDPLPMIFKLRALDLTQWLMVLKISLPVIGLDEILKFVARNYLEG

SEQ ID NO: 145075 - protein, 869 aa, Artificial Sequence
  derived and/or modified sequence
MGKVYRADRKSVQRIKARDIVPGDIVEVAVGDKVPADIRILAIKSTTLRVDQSILTGESVSVIKHTEPVPDPRAVNQDKKNMLFSGTNIAAGKALGIVATTGVGTEIGKIRDQMAATEQDKTPLQQKLDEFGEQLSKVISLICVAVWLINIGHFNDPVHGGSWFRGAIYYFKIAVALAVAAIPEGLPAVITTCLALGTRRMAKKNAIVRSLPSVETLGCTSVICSDKTGTLTTNQMSVCKMFIIDKVDGDICLLNEFSITGSTYAPEGEVLKNDKPVRPGQYDGLVELATICALCNDSSLDFNEAKGVYEKVGEATETALTTLVEKMNVFNTDVRSLSKVERANACNSVIRQLMKKEFTLEFSRDRKSMSVYCSPAKSSRAAVGNKMFVKGAPEGVIDRCNYVRVGTTRVPLTGPVKEKIMAVIKEWGTGRDTLRCLALATRDTPPKREEMVLDDSARFLEYETDLTFVGVVGMLDPPRKEVTGSIQLCRDAGIRVIMITGDNKGTAIAICRRIGIFGENEEVADRAYTGREFDDLPLAEQREACRRACCFARVEPSHKSKIVEYLQSYDEITAMTGDGVNDAPALKKAEIGIAMGSGTAVAKTASEMVLADDNFSTIVAAVEEGRAIYNNMKQFIRYLISSNVGEVVCIFLTAALGLPEALIPVQLLWVNLVTDGLPATALGFNPPDLDIMDRPPRSPKEPLISGWLFFRYMAIGGYVGAATVGAAAWWFLYAEDGPHVNYSQLTHFMQCTEDNTHFEGIDCEVFEAPEPMTMALSVLVTIEMCNALNSLSENQSLLRMPPWVNIWLLGSICLSMSLHFLILYVDPLPMIFKLRALDLTQWLMVLKISLPVIGLDEILKFVARNYLEG

SEQ ID NO: 145076 - DNA, 2985 bp, Artificial Sequence
  derived and/or modified sequence
atggaggccgcccacgccaagacaaccgaggaatgtcttgcatattttggcgtgtccgaaacaacgggacttaccccagaccaggtcaagagaaatctggagaagtatgggctgaatgaacttccagcagaggaggggaaaactttgtgggagctcgtgatcgaacaattcgaggatctgctggttcgcatcctcctgctcgcagcctgtatatctttcgtgctggcctggtttgaagagggtgaggagactattaccgctttcgtagagccttttgtgattcttttgatcctaattgcaaatgctattgtgggggtctggcaggaacgcaatgctgaaaacgcgattgaagccctgaaagagtacgaaccggagatgggaaaggtgtatagggcagacagaaaatccgtgcagcgcataaaggcaagagatatcgtcccaggtgacattgttgaggtggctgttggggataaagtgcccgccgacatccgaatacttgcgatcaaatcgaccaccctgagagtggaccagagtatcctgacgggtgaatctgtcagtgtgattaaacacacagaacccgtgcccgaccctcgggccgtcaaccaggacaagaagaacatgctgttcagtgggaccaatatcgctgcaggtaaggcccttggcatagtggccaccactggcgtcgggacagagatcggcaagattagggatcaaatggcagctactgagcaggataagacaccactgcagcaaaagctcgatgaatttggagagcaactatccaaggtgatttcactcatatgcgtggctgtctggctcatcaacatcggtcactttaatgacccggttcatggaggcagctggtttaggggtgccatttactatttcaaaattgctgttgccttagccgttgcagctataccagaggggctgcctgcagtcataacgacctgcctggctttgggcaccaggcggatggctaaaaaaaacgccattgtaagatcactgccgtctgtggagacgctgggctgcacaagtgtgatatgctcagacaaaactgggaccttaacgaccaaccaaatgtccgtgtgcaaaatgttcatcattgacaaagtagacggggatatctgtctgttgaacgagttctctatcactggtagtacctatgcccccgaaggtgaggttcttaaaaatgacaaaccagtgcgcccaggacagtatgacggcctagtggaactggcaacaatctgtgcattgtgtaatgatagcagccttgatttcaatgaggctaagggcgtttatgagaaggtgggcgaagcgacagaaacagcattgacaacacttgtggaaaagatgaacgtgttcaacaccgatgtcagatctctgagtaaagtggagagagcgaatgcttgtaattccgtgatacgccaactgatgaagaaagagtttaccctcgaattttcgagggaccgtaagagcatgtccgtttattgcagcccggcaaagagtagtcgtgctgccgtggggaacaaaatgttcgtcaagggagccccggaaggtgtcattgacagatgcaattatgtaagagtcggcaccacccgcgtgccactgacagggccggtgaaagagaagattatggctgtgatcaaggagtggggtaccggccgcgacaccctgagatgtctggcactggcaacccgggacacaccacccaagcgggaagaaatggttctcgatgactctgctaggtttttagaatatgagactgaccttacattcgtgggggtagttggaatgttagatccaccaagaaaagaggttacagggtccattcagctgtgtagagatgctggtatcagggtgataatgattactggggataataagggcaccgctatcgccatctgtcgaaggatcggcatatttggtgagaatgaggaagttgccgatagagcctacaccggtagagaattcgatgacctccccctcgctgagcagcgggaagcttgccgtcgggcttgctgtttcgccagggtggagccctcacacaaatccaagattgtggaatacctacagtcttacgacgaaattacagctatgacgggcgacggtgttaacgacgctccggccttgaagaaagcagagattggtattgcaatggggtccggcacagcagtggcaaaaaccgcctctgagatggtgcttgcggatgacaactttagcaccatcgtggccgccgtagaagaggggcgggcaatctacaacaacatgaagcagttcataaggtatctgatctcctctaacgtgggggaagttgtgtgtatctttctgaccgcagccttaggactgccagaggcactaattcctgtgcaattgctctgggtgaacctcgtgacagacgggcttccagccaccgcattgggcttcaatcctcccgatctggatatcatggatcgaccacccaggtctccgaaggagcccctgatcagtggatggttatttttccggtatatggccataggcggatatgtgggagcagcaacagtaggagccgcggcctggtggtttctgtacgccgaagatggcccccacgtaaattactcacaattaacacactttatgcagtgtactgaagataacacccatttcgaaggtatagactgtgaggtgttcgaggctcccgaaccaatgacaatggcgttaagcgtccttgtcacgatcgagatgtgcaatgccttaaactcactttctgaaaaccagtccctcctccggatgccaccttgggtgaacatttggctcttgggcagtatttgtctgtctatgtcgctgcacttcctgattctttacgtagatccgctgccgatgatttttaagctaagagcacttgatctgactcagtggctcatggttcttaaaatttcattgccggtaataggcttagatgaaattctaaagttcgtggcacgcaattatcttgagggctag

SEQ ID NO: 145077 - DNA, 2985 bp, Artificial Sequence
  derived and/or modified sequence
atggaggccgcccacgccaagaccacagaagaatgtctggcctactttggagtgtctgagaccaccggcctgaccccagaccaggtgaagaggaacctggagaagtatggcctgaatgagctgcctgctgaggagggcaagaccctgtgggagctggtgattgagcagtttgaggacctgctggtgcgcatcctgctgctggccgcctgcatcagctttgtgctggcctggtttgaggagggggaggagaccatcacagcctttgtggagcccttcgtcatcctgctgatcctgattgccaatgccatcgtgggcgtgtggcaggagagaaatgcagaaaatgccatcgaggccctgaaggagtatgagcctgagatgggcaaggtgtacagagctgacaggaagtctgtgcagaggatcaaggcccgggacatcgtgcctggggacatcgtggaggtggccgtgggggacaaggtgcctgctgacatccgcatcctggccatcaagagcaccaccctgcgggtggaccagagcatcctgactggagagagcgtgtctgtcatcaagcacacagagcctgtgcctgaccccagggctgtgaaccaggacaagaagaacatgctgttcagcggcaccaacattgctgctgggaaggccctgggcatcgtggccaccaccggggtgggcacagagatcggcaagatccgggaccagatggccgccacagagcaggacaagacccccctgcagcagaagctggatgaatttggagagcagctgagcaaggtgatcagcctcatctgtgtggccgtgtggctgatcaacatcggccacttcaatgaccctgtgcacggcggctcctggttccggggggccatctactacttcaagattgctgtggccctggccgtggccgccatccctgagggcctgcctgctgtgatcaccacctgcctggccctgggcaccaggaggatggccaagaagaatgccatcgtgcgcagcctgcccagcgtggagaccctgggctgcaccagcgtcatctgcagcgacaagacaggcaccctgaccaccaaccagatgtctgtgtgcaagatgttcatcatcgacaaggtggatggagacatctgcctgctgaatgagttcagcatcaccggcagcacctacgcccctgagggggaggtgctgaagaatgacaagcctgtgcggcccggccagtatgatggcctggtggagctggccaccatctgtgccctgtgcaatgacagcagcctggacttcaatgaggccaagggcgtgtatgagaaggtgggggaggccacagaaacagccctgaccaccctggtggagaagatgaatgtgttcaacacagatgtgcgcagcctgagcaaggtggagcgggccaatgcctgcaacagcgtcatccggcagctgatgaagaaggagttcaccctggagttcagccgggacaggaagtccatgtctgtgtactgcagccctgccaagagcagcagagctgctgtgggcaacaagatgtttgtgaagggggcccctgagggcgtcatcgaccgctgcaactacgtgcgggtgggcaccaccagggtgcccctgaccggccctgtgaaggagaagatcatggctgtgatcaaggagtggggcaccggccgggacaccctgcgctgcctggccctggccacccgggacaccccacccaagcgggaggagatggtgctggatgattctgcccgcttcctggagtatgaaacagacctgacctttgtgggcgtggtgggcatgctggacccccccaggaaggaggtgacaggcagcatccagctgtgcagagatgctggcatccgggtcatcatgatcactggagacaacaagggcacagccatcgccatctgcagaagaattggcatctttggagaaaatgaggaggtggccgaccgggcctacacaggccgggagtttgatgacctgcccctggccgagcagcgggaggcctgcagaagagcctgctgctttgcccgggtggagcccagccacaagagcaagatcgtggagtacctgcagagctatgatgagatcacagccatgactggagatggagtgaatgatgccccagccctgaagaaggccgagatcggcatcgccatgggcagcggcacagctgtggccaagacagccagcgagatggtgctggctgatgacaacttcagcaccatcgtggccgctgtggaggagggccgggccatctacaacaacatgaagcagttcatccgctacctgatcagcagcaatgtgggggaggtggtgtgcatcttcctgacagctgccctgggcctgcctgaggccctgatccctgtgcagctgctgtgggtgaacctggtgacagatggcctgcctgccacagccctgggcttcaaccccccagacctggacatcatggaccggccccccaggagccccaaggagcccctcatcagcggctggctgttcttccgctacatggccatcggcggctacgtgggcgccgccaccgtgggcgccgccgcctggtggttcctgtatgcagaagatggcccccacgtgaactacagccagctgacccacttcatgcagtgcacagaggacaacacccactttgagggcatcgactgtgaggtgtttgaggcccctgagcccatgaccatggccctgtctgtgctggtgaccatcgagatgtgcaatgccctgaacagcctgtctgagaaccagagcctgctgaggatgccaccctgggtgaacatctggctgctgggcagcatctgcctgtccatgagcctgcacttcctgatcctgtatgtggaccccctgcccatgatcttcaagctgcgggccctggacctgacccagtggctgatggtgctgaagatcagcctgcccgtcatcggcctggatgagatcctgaagtttgtggccaggaactacctggagggctag

SEQ ID NO: 145078 - DNA, 2985 bp, Artificial Sequence
  derived and/or modified sequence
atggaggccgcccacgccaagaccaccgaggagtgcctggcctactttggcgtttctgagaccacaggtttgacgccagaccaggttaaacgcaatctggagaagtacgggctgaatgagctgcccgccgaggaaggcaaaactctgtgggaactggtaatcgagcagttcgaggatttattggtgaggatcctgctgctcgccgcttgcatatctttcgttctggcctggtttgaggagggggaagagacgatcactgcattcgtggaaccctttgtaatcctcctcatcctgatcgccaatgcaatcgtgggtgtatggcaggagagaaacgctgaaaacgcaatagaggccctgaaagaatatgagccagagatgggtaaggtgtatcgtgctgaccggaaaagcgtgcagaggattaaggctcgggatattgttcccggagatatagtggaagtcgccgtcggagacaaagtacccgcagatatccgtatcctcgccatcaaatccacaaccctgcgcgtggatcaatcaatcctgacgggcgagtccgtttccgtcatcaaacatacggaacctgtgccggaccctagggcggtgaatcaggacaagaagaatatgctcttttcaggaacaaatatcgccgcaggaaaggcactaggtatcgtggccactacaggagtgggcactgaaattggcaaaattcgggatcaaatggctgctaccgagcaagacaagacgcccttacagcagaaactcgacgaatttggggagcagcttagcaaagttatttctctgatttgcgtcgccgtctggctgattaacatcggacactttaatgatcccgtacacggaggatcctggttccgtggtgctatatactactttaagatcgctgtggcactggccgtagctgctatccccgaaggcctccccgccgtgatcactacatgtctggctttgggcacacgcaggatggcgaaaaaaaacgctatcgtgcgttcactgccaagcgtggagacactggggtgtacctctgtaatttgttccgataagacaggtacccttacgactaaccagatgagcgtctgcaaaatgttcatcatagataaagtggacggcgacatttgtctgctgaatgagttttccatcactggatctacatatgcaccagaaggcgaggtcttaaagaatgataagccagtgaggcctggccagtacgacggcttggtggagctagctacaatctgtgcactgtgtaacgattcttccttggacttcaacgaagctaagggcgtgtatgaaaaggtgggtgaagctaccgaaactgctctgacaacacttgtggaaaaaatgaacgtgtttaatacagatgtgcggtcactgtctaaagtcgagagggccaacgcctgcaacagcgtgattcgacaattgatgaaaaaggagtttacattagaattcagcagggatcggaaatctatgtctgtgtattgtagtccggccaaatcttctagggctgctgtaggcaataaaatgttcgtgaagggcgcacctgaaggggtgattgacaggtgcaactacgtgcgtgtcgggacaactagggtgcccctcactgggcccgtgaaagagaaaattatggctgtaatcaaagagtggggaaccggacgagatacacttaggtgtctggctctggctacgcgcgatacgccccctaagagggaggaaatggtgctcgacgattccgctaggtttctggagtacgagactgacctcacattcgtcggggtggtaggaatgctggaccctccccggaaggaggtcactggatccatccaactgtgtagggatgccggaataagagtcataatgattaccggcgataacaagggtaccgctatcgctatttgtaggaggattggcatctttggcgagaacgaagaggtggcagatcgagcctataccggccgggagtttgacgatttaccattggcagagcaaagagaagcttgccgccgtgcttgctgtttcgctcgagtggagccgagtcataagtcaaagatcgtggaatacctgcagagctacgacgagataaccgccatgaccggtgatggcgtcaatgatgcccccgctttaaagaaggctgagataggtatcgcgatgggtagcgggactgcagtggcgaaaaccgccagcgagatggtgctggctgatgacaactttagtaccatcgtagccgctgttgaggagggacgagcgatctacaataacatgaagcagtttatccgatacctcatcagctccaatgtcggggaagttgtctgtatttttttgactgccgcgcttggtctgcctgaagccctgattccagtgcaactcctttgggtaaatctagtcaccgatggactgcctgcaacagctctgggtttcaatccgccggatctggatattatggacaggcctccaagatccccaaaagaacccctcataagcggctggctctttttccggtatatggccatcggtgggtacgtgggcgcagccaccgtgggggccgcagcttggtggttcctgtatgctgaggatgggcctcacgtgaattactcacagttgacgcatttcatgcagtgcacggaagacaacacccattttgaagggatcgactgcgaagtatttgaggcacccgaaccgatgaccatggctctttcagttctggtgacaatagaaatgtgtaacgccctcaattccctatcagaaaatcaatcactgctgaggatgcctccttgggtaaacatctggcttctcggatccatctgcctgtctatgtcgcttcacttcttgatcctgtatgttgaccctcttcctatgatatttaagctgcgtgccctcgacctcacgcagtggctaatggtgttgaaaatatctctgccagttataggtctggacgagatcctgaaattcgtggctaggaattaccttgaaggttag

SEQ ID NO: 145079 - DNA, 2985 bp, Artificial Sequence
  derived and/or modified sequence
atggaggccgctcacgccaagaccacagaagagtgcctggcctatttcggcgtgagtgaaaccacgggattaacccctgaccaggtgaaaagaaacctggagaagtatggcttgaacgaactcccagctgaggagggtaaaacactgtgggagctcgtaattgagcagttcgaagatcttctggtgcggattctcctccttgcggcttgcatcagcttcgtgctcgcctggtttgaggagggcgaggagaccattactgctttcgtagagcctttcgttatactcctaatcctgatagccaatgccatagtaggggtctggcaggaacgcaatgcagaaaatgcaatagaggctcttaaagagtacgaacctgagatgggcaaggtgtacagggctgacaggaaatcagtccagagaatcaaagcaagagatatcgtgcctggggacattgtcgaagttgctgtgggcgacaaggtgcctgcggacattcgcatcctggctattaagagtacaaccctccgtgtcgaccagagcattttaactggcgagtcggtgtctgtgataaagcatacagagcctgtgcccgaccccagggcggtgaatcaagacaagaaaaatatgctgtttagcggcactaacatagccgcagggaaggccctgggcatcgtggcaactaccggggtgggcactgagatcgggaaaatcagagatcagatggccgctaccgaacaagataaaacacctttacagcagaagctggacgagttcggtgagcagctttcgaaagtgatttctctcatttgtgtggccgtgtggctcattaacatcggccattttaacgatccagtccatgggggatcttggttcagaggcgcaatttactacttcaaaattgccgtggcattggcggttgcagcaataccagaaggactgcccgcagtgattacaacttgcttggctctaggcactcgccgaatggccaagaaaaacgcaattgtccggagtctcccttcggtggaaactctgggctgcacctccgtcatttgctccgataaaaccggcaccctcaccaccaaccagatgtctgtttgcaaaatgttcatcatcgataaagtggacggcgatatttgcctgctgaacgaattttccattacagggtcaacctacgctccggagggagaagttttgaaaaacgacaagccagtgaggcctggacaatacgatggtttggtcgagctggccactatctgtgcattatgtaacgacagctcccttgacttcaacgaggccaagggagtgtacgagaaagtcggagaggcaacagagaccgccctgactacgctagttgagaagatgaacgtgttcaacaccgacgtccggtctctgtccaaagtagagcgggcaaatgcatgcaattcagtgataagacagctgatgaagaaagagtttactttagagttctcgagggatcgaaaaagtatgtccgtctattgtagccccgcaaaatccagtcgtgctgcagtcggtaacaaaatgttcgttaagggagcacccgagggtgttatcgacagatgcaactacgtccgcgtaggaacaacacgtgtgcctctgactgggcctgtgaaggaaaaaatcatggccgtcatcaaggagtggggtacgggcagggacacccttaggtgtctggccctcgccactcgggatacccccccaaagagagaagaaatggtattggacgacagtgccagatttctggagtacgagaccgacttgacgtttgttggggtggtggggatgctggaccctcccaggaaggaggtgacaggttctatccaactgtgcagagacgccggaattcgggtaattatgatcacgggcgacaataaaggtactgctattgcaatatgtcgtagaattgggattttcggggaaaacgaggaagtcgccgatagggcatatacgggcagagaattcgacgatctccccttggccgaacagcgggaggcctgcaggagggcttgctgttttgctagagttgagccttcacataaaagtaagatcgtggagtacctgcagagctatgacgaaataaccgctatgacaggagatggtgtgaacgacgccccagctctcaaaaaggctgaaattggcattgccatggggtctggtacggctgtggctaagacagcctctgagatggtactcgcggacgacaacttctccacaattgtggctgcagtagaggaaggacgggctatatataacaacatgaagcagtttatcaggtacctgattagctctaacgtcggagaagttgtgtgtatctttctcactgccgcactgggactgcctgaagctttgattccggtccagttgctgtgggtgaacctcgtgaccgatggcctacctgcaacagctctggggtttaacccccctgatctggacatcatggacaggcctccccgtagccctaaggagcccctcatcagtgggtggttgttttttcgatatatggccattggtggatacgtgggagcagctaccgtgggagccgctgcctggtggtttttatatgccgaggatggcccacacgtgaattatagccaactgacgcattttatgcaatgtacagaagacaatacccattttgagggcattgactgtgaggtctttgaagcccctgaacctatgaccatggcgctctctgttctcgtcacgattgaaatgtgtaacgccctcaatagtctttcagagaaccagtcactgctgcgcatgccaccctgggtcaatatatggctgctgggatccatttgccttagcatgtcgctccattttctgattctctacgtcgatcctctcccaatgatttttaagctgagagccctggaccttactcagtggctcatggtcctgaaaatcagcctacctgtgattggcctggacgaaatactgaaattcgtggctaggaactacctggaaggttag

SEQ ID NO: 145080 - DNA, 2985 bp, Artificial Sequence
  derived and/or modified sequence
atggaggccgcccacgccaagaccaccgaggagtgcctggcctacttcggcgtgagcgagaccaccggcctgacccccgaccaggtgaagagaaacctggagaagtacggcctgaacgagctgcccgccgaggagggcaagaccctgtgggagctggtgatcgagcagttcgaggacctgctggtgagaatcctgctgctggccgcctgcatcagcttcgtgctggcctggttcgaggagggcgaggagaccatcaccgccttcgtggagcccttcgtgatcctgctgatcctgatcgccaacgccatcgtgggcgtgtggcaggagagaaacgccgagaacgccatcgaggccctgaaggagtacgagcccgagatgggcaaggtgtacagagccgacagaaagagcgtgcagagaatcaaggccagagacatcgtgcccggcgacatcgtggaggtggccgtgggcgacaaggtgcccgccgacatcagaatcctggccatcaagagcaccaccctgagagtggaccagagcatcctgaccggcgagagcgtgagcgtgatcaagcacaccgagcccgtgcccgaccccagagccgtgaaccaggacaagaagaacatgctgttcagcggcaccaacatcgccgccggcaaggccctgggcatcgtggccaccaccggcgtgggcaccgagatcggcaagatcagagaccagatggccgccaccgagcaggacaagacccccctgcagcagaagctggacgagttcggcgagcagctgagcaaggtgatcagcctgatctgcgtggccgtgtggctgatcaacatcggccacttcaacgaccccgtgcacggcggcagctggttcagaggcgccatctactacttcaagatcgccgtggccctggccgtggccgccatccccgagggcctgcccgccgtgatcaccacctgcctggccctgggcaccagaagaatggccaagaagaacgccatcgtgagaagcctgcccagcgtggagaccctgggctgcaccagcgtgatctgcagcgacaagaccggcaccctgaccaccaaccagatgagcgtgtgcaagatgttcatcatcgacaaggtggacggcgacatctgcctgctgaacgagttcagcatcaccggcagcacctacgcccccgagggcgaggtgctgaagaacgacaagcccgtgagacccggccagtacgacggcctggtggagctggccaccatctgcgccctgtgcaacgacagcagcctggacttcaacgaggccaagggcgtgtacgagaaggtgggcgaggccaccgagaccgccctgaccaccctggtggagaagatgaacgtgttcaacaccgacgtgagaagcctgagcaaggtggagagagccaacgcctgcaacagcgtgatcagacagctgatgaagaaggagttcaccctggagttcagcagagacagaaagagcatgagcgtgtactgcagccccgccaagagcagcagagccgccgtgggcaacaagatgttcgtgaagggcgcccccgagggcgtgatcgacagatgcaactacgtgagagtgggcaccaccagagtgcccctgaccggccccgtgaaggagaagatcatggccgtgatcaaggagtggggcaccggcagagacaccctgagatgcctggccctggccaccagagacaccccccccaagagagaggagatggtgctggacgacagcgccagattcctggagtacgagaccgacctgaccttcgtgggcgtggtgggcatgctggacccccccagaaaggaggtgaccggcagcatccagctgtgcagagacgccggcatcagagtgatcatgatcaccggcgacaacaagggcaccgccatcgccatctgcagaagaatcggcatcttcggcgagaacgaggaggtggccgacagagcctacaccggcagagagttcgacgacctgcccctggccgagcagagagaggcctgcagaagagcctgctgcttcgccagagtggagcccagccacaagagcaagatcgtggagtacctgcagagctacgacgagatcaccgccatgaccggcgacggcgtgaacgacgcccccgccctgaagaaggccgagatcggcatcgccatgggcagcggcaccgccgtggccaagaccgccagcgagatggtgctggccgacgacaacttcagcaccatcgtggccgccgtggaggagggcagagccatctacaacaacatgaagcagttcatcagatacctgatcagcagcaacgtgggcgaggtggtgtgcatcttcctgaccgccgccctgggcctgcccgaggccctgatccccgtgcagctgctgtgggtgaacctggtgaccgacggcctgcccgccaccgccctgggcttcaacccccccgacctggacatcatggacagaccccccagaagccccaaggagcccctgatcagcggctggctgttcttcagatacatggccatcggcggctacgtgggcgccgccaccgtgggcgccgccgcctggtggttcctgtacgccgaggacggcccccacgtgaactacagccagctgacccacttcatgcagtgcaccgaggacaacacccacttcgagggcatcgactgcgaggtgttcgaggcccccgagcccatgaccatggccctgagcgtgctggtgaccatcgagatgtgcaacgccctgaacagcctgagcgagaaccagagcctgctgagaatgcccccctgggtgaacatctggctgctgggcagcatctgcctgagcatgagcctgcacttcctgatcctgtacgtggaccccctgcccatgatcttcaagctgagagccctggacctgacccagtggctgatggtgctgaagatcagcctgcccgtgatcggcctggacgagatcctgaagttcgtggccagaaactacctggagggctag

SEQ ID NO: 145081 - protein, 168 aa, Artificial Sequence
  derived and/or modified sequence
MFQIPEFEPSEQEDSSSAERGLGPSPAGDGPSGSGKHHRQAPGLLWDASHQQEQPTSSSHHGGAGAVEIRSRHSSYPAGTEDDEGMGEEPSPFRGRSRSAPPNLWAAQRYGRELRRMSDEFVDSFKKGLPRPKSAGTATQMRQSSSWTRVFQSWWDRNLGRGSSAPSQ

SEQ ID NO: 145082 - protein, 149 aa, Artificial Sequence
  derived and/or modified sequence
MFQIPEFEPSEQEDSSSAERGLGPSPAGDGPSGSGKHHRQAPGLLWDASHQQEQPTSSSHHGGAGAVEIRSRHSSYPAGTEDDEGMGEEPSPFRGRSRSAPPNLWAAQRYGRELRRMSDEFVDSFKKGLPRPKSAGTATQMRQSSRRLR

SEQ ID NO: 145083 - DNA, 507 bp, Artificial Sequence
  derived and/or modified sequence
atgttccagatccccgagtttgagccaagcgaacaagaagactcaagcagcgcggagagagggttagggccttccccggccggggacggtccaagtgggtctgggaaacatcatcgtcaagcgcctggtttactgtgggatgcctctcaccagcaagagcagcctactagtagcagtcaccacggcggcgcaggcgccgtggaaattcgaagccgtcattcctcctaccctgcagggacagaagacgatgagggaatgggcgaggaaccttcacccttccgcggtcgttcacgaagcgcaccccctaacctgtgggctgcgcaaagatacggccgggagttaaggaggatgtcagatgagttcgtggactccttcaagaaaggcctgccacggccaaagtctgcgggcactgccacgcaaatgcgccagtccagcagttggactcgggtttttcagtcatggtgggaccgtaatcttgggcgtggcagcagtgctcccagccagtag

SEQ ID NO: 145084 - DNA, 507 bp, Artificial Sequence
  derived and/or modified sequence
atgttccagatacccgagtttgagcctagcgagcaggaggatagctcttccgccgagcgtggcctcggccctagtcccgccggcgatggaccatccggatcaggcaaacaccatagacaggcccctggcttgctctgggacgcctcacaccagcaagaacagcctacatcatcctcccatcacggaggggctggcgcagtagagatcaggagccgccacagttcttatcccgccgggaccgaagatgatgagggcatgggtgaggaaccctcgcctttcagagggcgttctaggagcgcaccccccaatctctgggcagctcagcggtacggaagagagctccggagaatgagcgatgagtttgtggactcatttaagaagggcttgcccaggccaaagtccgcgggcacagcgacacagatgagacaaagctccagctggacaagggtgttccagtcttggtgggaccgtaaccttgggaggggctcctcagctccctcacagtag

SEQ ID NO: 145085 - DNA, 450 bp, Artificial Sequence
  derived and/or modified sequence
atgttccaaatccctgagttcgaaccaagcgagcaggaggattcgagtagcgctgagcgaggcctggggcccagccctgcaggcgacgggccaagtggatccggcaaacaccataggcaagcccccggattgctctgggatgccagtcatcaacaggaacagccaacctcctcctctcaccatgggggggctggtgctgtggagatcaggagcaggcattcttcctatccggcaggaactgaagatgatgaaggaatgggcgaagaacctagcccttttcgtggccggagccggagcgccccccccaatttatgggccgcccaacgctacgggcgtgaactgaggaggatgagtgatgagtttgtggacagtttcaagaagggcctgcctagacctaagagcgctggcacagctacacaaatgcgccagtcgtccaggcggctgcggtag

SEQ ID NO: 145086 - DNA, 507 bp, Artificial Sequence
  derived and/or modified sequence
atgttccagatccctgagtttgagcccagcgagcaggaggacagcagcagcgctgagcggggcctgggccccagccctgctggagatggccccagcggcagcggcaagcaccaccggcaggcccctggcctgctgtgggatgccagccaccagcaggagcagcccaccagcagcagccaccacggcggggccggggctgtggagatccgcagccgccacagcagctacccagctggaacagaagatgatgagggcatgggagaggagcccagccccttccggggccgcagccgcagcgccccacccaacctgtgggccgcccagagatatggccgggagctgcggaggatgtctgatgaatttgtggacagcttcaagaagggcctgccccggcccaagtctgctggaacagccacccagatgaggcagagcagctcctggaccagggtcttccagagctggtgggacaggaacctgggccggggcagcagcgcccccagccagtag

SEQ ID NO: 145087 - DNA, 450 bp, Artificial Sequence
  derived and/or modified sequence
atgttccagatccctgagtttgagcccagcgagcaggaggacagcagcagcgctgagcggggcctgggccccagccctgctggagatggccccagcggcagcggcaagcaccaccggcaggcccctggcctgctgtgggatgccagccaccagcaggagcagcccaccagcagcagccaccacggcggggccggggctgtggagatccgcagccgccacagcagctacccagctggaacagaagatgatgagggcatgggagaggagcccagccccttccggggccgcagccgcagcgccccacccaacctgtgggccgcccagagatatggccgggagctgcggaggatgtctgatgaatttgtggacagcttcaagaagggcctgccccggcccaagtctgctggaacagccacccagatgaggcagagcagccggcggctgaggtag

SEQ ID NO: 145088 - DNA, 507 bp, Artificial Sequence
  derived and/or modified sequence
atgttccagatccccgagttcgagcccagcgagcaggaggacagctccagcgcggaaaggggactcggaccgagtcctgccggcgatgggcccagcggcagcggaaagcaccaccgccaggctccaggcctgctgtgggacgccagccaccagcaagagcagccaacatcctcttctcaccacggcggagcgggggccgtagagattagaagccgtcatagttcctaccctgctgggactgaagacgacgagggaatgggcgaagagccttcccccttccggggcagaagccgctccgccccacccaacctgtgggcagctcagcgctatggccgcgagttgagacggatgagcgacgaatttgtagacagttttaaaaaggggctacccaggccaaagagcgctggcactgcaactcaaatgcgacagagttcctcgtggactagagtgtttcagtcttggtgggataggaaccttggccgaggttcaagtgcgcctagccagtag

SEQ ID NO: 145089 - DNA, 507 bp, Artificial Sequence
  derived and/or modified sequence
atgttccagatccccgagttcgagcccagcgagcaggaggacagcagctcagcagagcgaggcctcggcccatcaccagctggcgacggcccaagtggatccggcaagcaccacagacaggcccccggtctgctctgggacgcttcgcatcagcaggagcagcctaccagcagctctcaccacggaggggccggcgctgtggagattcgaagtcgccattccagctacccggccggcactgaagatgatgagggtatgggggaagagcctagccctttcagagggagatccagatccgctcccccgaacttgtgggcggctcagcgttacggtcgggaactgaggcggatgtccgacgagtttgtggatagcttcaaaaagggcctgccccgccccaagtctgctggaaccgcaactcaaatgcggcagtctagcagctggactcgagtctttcagagttggtgggacaggaatctcggacgcggtagttcagccccctcccagtag

SEQ ID NO: 145090 - DNA, 450 bp, Artificial Sequence
  derived and/or modified sequence
atgttccagatccccgagttcgagcccagcgagcaggaggacagcagctcagctgagagggggctcggcccaagccccgcgggcgacgggccttctggcagcggaaagcatcatcggcaagcacctggtcttctgtgggatgcctcacaccagcaggaacagcctacttcatcaagccaccacggaggagctggcgccgtagagatccgttctagacacagcagttacccagcgggaactgaagacgacgagggcatgggagaagagccctctcctttcagaggaaggtcaagatcagcccctcccaatctgtgggcagcacagcggtatgggagagagctccgaagaatgtccgatgagttcgtcgactcttttaagaaaggcttacccagacccaagagcgcaggcactgccacacaaatgcgtcaaagttccaggaggctacggtag

SEQ ID NO: 145091 - DNA, 507 bp, Artificial Sequence
  derived and/or modified sequence
atgttccagatcccagagttcgaaccctcggagcaggaggactcgtcttccgcagagaggggtctaggtccgtcccctgcgggagacgggccatcaggtagtgggaaacatcatcgccaggccccagggctgctgtgggacgcctcacatcaacaagaacagcctacttcctctagtcaccatggaggcgctggagccgtggaaatacgatcccgccattcaagttacccagccggaacggaggacgacgaaggcatgggggaagagccctcacctttccgtgggaggtcccgcagtgcgcctccaaatctgtgggctgcccagcggtacggaagggagctgcgccgaatgtcagacgagtttgtagactccttcaagaaaggactgccgaggcccaagagcgccggaacagctacacagatgcgccagagttcatcctggaccagagtgtttcagtcttggtgggatcggaaccttggcaggggaagcagtgctcctagccagtag

SEQ ID NO: 145092 - DNA, 507 bp, Artificial Sequence
  derived and/or modified sequence
atgttccagattcccgagttcgaacctagtgagcaggaggactcatcctcagccgagcgaggcctcggtcctagccctgccggtgatggtccctctggctcagggaagcaccaccgccaagccccaggcctcctgtgggacgccagccatcagcaggagcagcccacaagctcctcccatcacggcggtgcaggagcagtagagattagatctcgtcactcctcttatcctgctggaaccgaagacgacgagggtatgggcgaggagccttccccattccggggacgctccaggtctgcccctccaaatctatgggccgctcaaagatatgggagggagctcagacggatgtctgatgagtttgtggattcattcaagaaaggcctaccgcgaccgaagtccgccggaaccgcgactcaaatgcggcagtccagcagctggacccgagtctttcaaagctggtgggatcgcaatcttggcaggggatcaagcgcaccatcacaatag

SEQ ID NO: 145093 - DNA, 450 bp, Artificial Sequence
  derived and/or modified sequence
atgttccagatcccggagtttgagccttctgaacaggaggatagttcctccgctgagcgaggactagggccttcaccggctggtgacgggccttctgggtccggtaagcaccacaggcaggcaccaggcttgttgtgggatgcttcgcatcagcaggagcaacccacgtcgagttcgcatcatggtggagccggtgcagttgagataaggtccagacattctagttacccggctggcaccgaggatgacgaaggtatgggagaggaaccatcaccattcaggggacggtcccggtcggccccacccaacctctgggcagcccagcgctacgggcgtgagctcaggcggatgtcagacgaatttgtggactctttcaaaaaaggactcccacgacctaagagcgcgggaactgcaactcagatgaggcaatcatcacgaaggttacgctag

SEQ ID NO: 145094 - DNA, 929 bp, Artificial Sequence
  derived and/or modified sequence
cggcaggcccgggtcaggggcctcgagatcgggcttgggcccagagcatgttccagatcccagagtttgagccgagtgagcaggaagactccagctctgcagagaggggcctgggccccagccccgcaggggacgggccctcaggctccggcaagcatcatcgccaggccccaggcctcctgtgggacgccagtcaccagcaggagcagccaaccagcagcagccatcatggaggcgctggggctgtggagatccggagtcgccacagctcctaccccgcggggacggaggacgacgaagggatgggggaggagcccagcccctttcggggccgctcgcgctcggcgccccccaacctctgggcagcacagcgctatggccgcgagctccggaggatgagtgacgagtttgtggactcctttaagaagggacttcctcgcccgaagagcgcgggcacagcaacgcagatgcggcaaagctccagctggacgcgagtcttccagtcctggtgggatcggaacttgggcaggggaagctccgccccctcccagtgaccttcgctccacatcccgaaactccacccgttcccactgccctgggcagccatcttgaatatgggcggaagtacttccctcaggcctatgcaaaaagaggatccgtgctgtctcctttggagggagggctgacccagattcccttccggtgcgtgtgaagccacggaaggcttggtcccatcggaagttttgggttttccgcccacagccgccggaagtggctccgtggccccgccctcaggctccgggctttcccccaggcgcctgcgctaagtcgcgagccaggtttaaccgttgcgtcaccgggacccgagcccccgcgatgccctgggggccgtgctcactaccaaatgttaataaagcccgcgtctgtgc

SEQ ID NO: 145095 - DNA, 1157 bp, Artificial Sequence
  derived and/or modified sequence
gggcttggggtgagacctgtgcgccgtcaccacgggcggggcggggcctgggtccaccggggttctgaggggagactgaggtcctgagccgacagcctcagctccctgccaggccagacccggcagacagatgagggcccaggaggcctggcgggcctgggggcgctacggtgggagaggaagccaggggtacctgcctctgccttccagggccaccgttggccccagctgtgccttgactacgtaacatcttgtcctcacagcccagagcatgttccagatcccagagtttgagccgagtgagcaggaagactccagctctgcagagaggggcctgggccccagccccgcaggggacgggccctcaggctccggcaagcatcatcgccaggccccaggcctcctgtgggacgccagtcaccagcaggagcagccaaccagcagcagccatcatggaggcgctggggctgtggagatccggagtcgccacagctcctaccccgcggggacggaggacgacgaagggatgggggaggagcccagcccctttcggggccgctcgcgctcggcgccccccaacctctgggcagcacagcgctatggccgcgagctccggaggatgagtgacgagtttgtggactcctttaagaagggacttcctcgcccgaagagcgcgggcacagcaacgcagatgcggcaaagctccagctggacgcgagtcttccagtcctggtgggatcggaacttgggcaggggaagctccgccccctcccagtgaccttcgctccacatcccgaaactccacccgttcccactgccctgggcagccatcttgaatatgggcggaagtacttccctcaggcctatgcaaaaagaggatccgtgctgtctcctttggagggagggctgacccagattcccttccggtgcgtgtgaagccacggaaggcttggtcccatcggaagttttgggttttccgcccacagccgccggaagtggctccgtggccccgccctcaggctccgggctttcccccaggcgcctgcgctaagtcgcgagccaggtttaaccgttgcgtcaccgggacccgagcccccgcgatgccctgggggccgtgctcactaccaaatgttaataaagcccgcgtctgtgccgcc

SEQ ID NO: 145096 - DNA, 634 bp, Artificial Sequence
  derived and/or modified sequence
actagggcccggagcccggggtgctggagggaggcggcaggcccgggtcaggggcctcgagatcgggcttgggcccagagcatgttccagatcccagagtttgagccgagtgagcaggaagactccagctctgcagagaggggcctgggccccagccccgcaggggacgggccctcaggctccggcaagcatcatcgccaggccccaggcctcctgtgggacgccagtcaccagcaggagcagccaaccagcagcagccatcatggaggcgctggggctgtggagatccggagtcgccacagctcctaccccgcggggacggaggacgacgaagggatgggggaggagcccagcccctttcggggccgctcgcgctcggcgccccccaacctctgggcagcacagcgctatggccgcgagctccggaggatgagtgacgagtttgtggactcctttaagaagggacttcctcgcccgaagagcgcgggcacagcaacgcagatgcggcaaagctccaggcgcctgcgctaagtcgcgagccaggtttaaccgttgcgtcaccgggacccgagcccccgcgatgccctgggggccgtgctcactaccaaatgttaataaagcccgcgtctgtgcc

SEQ ID NO: 145097 - DNA, 507 bp, Artificial Sequence
  derived and/or modified sequence
atgttccagatccccgagttcgagcccagcgagcaggaggacagcagcagcgccgagagaggcctgggccccagccccgccggcgacggccccagcggcagcggcaagcaccacagacaggcccccggcctgctgtgggacgccagccaccagcaggagcagcccaccagcagcagccaccacggcggcgccggcgccgtggagatcagaagcagacacagcagctaccccgccggcaccgaggacgacgagggcatgggcgaggagcccagccccttcagaggcagaagcagaagcgccccccccaacctgtgggccgcccagagatacggcagagagctgagaagaatgagcgacgagttcgtggacagcttcaagaagggcctgcccagacccaagagcgccggcaccgccacccagatgagacagagcagcagctggaccagagtgttccagagctggtgggacagaaacctgggcagaggcagcagcgcccccagccagtag

SEQ ID NO: 145098 - DNA, 450 bp, Artificial Sequence
  derived and/or modified sequence
atgttccagatccccgagttcgagcccagcgagcaggaggacagcagcagcgccgagagaggcctgggccccagccccgccggcgacggccccagcggcagcggcaagcaccacagacaggcccccggcctgctgtgggacgccagccaccagcaggagcagcccaccagcagcagccaccacggcggcgccggcgccgtggagatcagaagcagacacagcagctaccccgccggcaccgaggacgacgagggcatgggcgaggagcccagccccttcagaggcagaagcagaagcgccccccccaacctgtgggccgcccagagatacggcagagagctgagaagaatgagcgacgagttcgtggacagcttcaagaagggcctgcccagacccaagagcgccggcaccgccacccagatgagacagagcagcagaagactgagatag

SEQ ID NO: 145099 - protein, 196 aa, Artificial Sequence
  derived and/or modified sequence
MNRSQEVTRDEESTRSEEVTREEMAAAGLTVTVTHSNEKHDLHVTSQQGSSEPVVQDLAQVVEEVIGVPQSFQKLIFKGKSLKEMETPLSALGIQDGCRVMLIGKKNSPQEEVELKKLKHLEKSVEKIADQLEELNKELTGIQQGFLPKDLQAEALCKLDRRVKATIEQFMKILEEIDTLILPENFPTLTLVLNEK

SEQ ID NO: 145100 - protein, 230 aa, Artificial Sequence
  derived and/or modified sequence
MNRSQEVTRDEESTRSEEVTREEMAAAGLTVTVTHSNEKHDLHVTSQQGSSEPVVQDLAQVVEEVIGVPQSFQKLIFKGKSLKEMETPLSALGIQDGCRVMLIGKKNSPQEEVELKKLKHLEKSVEKIADQLEELNKELTGIQQGFLPKDLQAEALCKLDRRVKATIEQFMKILEEIDTLILPENFKDSRLKRKGLVKKVQAFLAECDTVEQNICQETERLQSTNFALAE

SEQ ID NO: 145101 - protein, 345 aa, Artificial Sequence
  derived and/or modified sequence
LAQRGGARRPRGDRERLGSRLRALRPGREPRQSEPPAQRGPPPSGRPPARSTASGHDRPTRGAAAGARRPRMKKKTRRRSTRSEELTRSEELTLSEEATWSEEATQSEEATQGEEMNRSQEVTRDEESTRSEEVTREEMAAAGLTVTVTHSNEKHDLHVTSQQGSSEPVVQDLAQVVEEVIGVPQSFQKLIFKGKSLKEMETPLSALGIQDGCRVMLIGKKNSPQEEVELKKLKHLEKSVEKIADQLEELNKELTGIQQGFLPKDLQAEALCKLDRRVKATIEQFMKILEEIDTLILPENFKDSRLKRKGLVKKVQAFLAECDTVEQNICQETERLQSTNFALAE

SEQ ID NO: 145102 - DNA, 1038 bp, Artificial Sequence
  derived and/or modified sequence
ctcgcccagaggggaggcgccaggaggcccaggggcgatagagagagacttggctctcgtctccgcgcacttcgcccaggccgcgaaccaagacagtccgagccccctgcacaaagaggtcccccgccttcgggacggcccccggctcgtagcaccgcaagtggtcacgacagaccaacccgcggagctgcagccggcgccagacgaccccgcatgaagaaaaagacaaggagacggtctacgaggagcgaagagctgactcgctccgaggaactgactctttctgaagaggccacatggtccgaagaagctacccagtcagaagaggcaactcagggcgaggagatgaatcgcagtcaagaggtgacccgtgacgaggaaagtacccggagcgaggaagtaacacgggaagagatggcagcggcgggccttacggtgaccgtcacgcacagcaacgaaaaacacgacctgcacgtgacatctcagcaaggaagttcagagcccgtcgttcaggacctcgcccaggtagtggaggaggtaatcggtgtgccgcagtccttccaaaaactaatattcaagggtaagagtctgaaggagatggagacccctctctccgctctcggcatacaggatggctgccgcgtgatgctgattgggaagaaaaactccccacaggaggaggtggagctgaaaaagctgaagcacctcgaaaaatccgtggaaaaaatagcagaccagctggaagagctcaataaagagctgactgggatccaacagggctttctgcctaaagaccttcaggcagaggcactgtgtaaactcgatagaagggtgaaggccaccatagagcaatttatgaaaatactggaggaaatcgatactctaattctaccagagaacttcaaagattctcggctcaaacgcaagggcctggtcaaaaaggttcaggccttcctcgcagaatgtgatacagtcgagcagaatatctgtcaggagactgagcggctacaatccacgaattttgctctcgcggagtag

SEQ ID NO: 145103 - DNA, 1038 bp, Artificial Sequence
  derived and/or modified sequence
ctggcccagagaggaggagcccggcggcccaggggggaccgggagcggctgggcagccggctgcgggccctgcggcccggccgggagccccggcagagcgagcccccagcccagaggggccccccacccagcggccggcccccagcccggagcacagccagcggccatgaccggcccaccagaggagctgctgctggggcccggcggcccaggatgaagaagaagacccggcggcgcagcaccaggtctgaggagctgaccaggtctgaggagctgaccctgtctgaggaggccacctggagcgaggaggccacccagagcgaggaggccacccagggcgaggagatgaacagaagccaggaggtgaccagagatgaggagagcaccaggtctgaggaggtgacccgggaggagatggctgctgctggcctgactgtgacagtgacccacagcaatgagaagcatgacctgcacgtgaccagccagcagggcagcagcgagcctgtggtgcaggacctggcccaggtggtggaggaggtgattggagtgccccagagcttccagaagctgatcttcaagggcaagagcctgaaggagatggagacccccctgagcgccctgggcatccaggacggctgccgggtgatgctgattggcaagaagaacagcccccaggaggaggtggagctgaagaagctgaagcacctggagaagtctgtggagaagattgctgaccagctggaggagctgaacaaggagctgaccggcatccagcagggcttcctgcccaaggacctgcaggccgaggccctgtgcaagctggaccggcgggtgaaggccaccatcgagcagttcatgaagatcctggaggagattgacaccctcatcctgcctgagaacttcaaggacagccggctgaagaggaagggcctggtgaagaaggtgcaggccttcctggctgaatgtgacacagtggagcagaacatctgccaggagacagagcggctgcagagcaccaactttgccctggccgagtag

SEQ ID NO: 145104 - DNA, 1038 bp, Artificial Sequence
  derived and/or modified sequence
ctggcccagcggggcggcgcccggcggccccggggcgaccgggagcggctggggtcccgattgagggctctgaggcctggtcgcgagccccgacaatcggagcccccagctcagcgcggacctccaccttctgggaggccccccgctcgatccactgcatccggacatgataggcccacacgcggggcagctgctggggcccgacggccgagaatgaagaagaagactaggcggcggagcactaggagcgaagagttgacccgttcagaagagctcaccctgtccgaagaggcaacatggagcgaagaggcaacccagtcagaggaggccactcagggggaggaaatgaaccggtctcaggaggtgacacgcgacgaagaaagcactaggagcgaggaagtgacccgggaagagatggctgctgcaggcctaaccgtgaccgttacgcatagtaacgagaaacacgacttacacgtgacatcccagcagggttccagcgagcctgtcgtgcaggatcttgctcaagtggttgaagaagttattggcgtgcctcagtctttccaaaagctgatttttaaggggaagagtctgaaggagatggagaccccgctgtctgccttgggcatccaggacggttgccgcgtgatgctgatcggaaaaaagaacagtccacaagaggaggtggaactgaaaaaactcaaacacctcgagaaaagcgtggagaaaatagccgatcagttggaggagctgaataaagagctgaccggtatccagcagggattcctgcctaaggatcttcaggcagaggctctgtgtaagctcgaccgacgggtgaaggctactatcgaacagttcatgaagatcctggaggagatagacacactgattttgcctgagaatttcaaagactcacgcctgaaaaggaagggactggtcaagaaagtgcaggcgttccttgctgaatgcgataccgtagaacagaacatttgtcaagagactgagcgcttacaatcgaccaattttgccctggccgagtag

SEQ ID NO: 145105 - DNA, 1038 bp, Artificial Sequence
  derived and/or modified sequence
ctagcacagcggggaggagccaggaggcccagaggcgacagggagcgactggggtctaggctccgggcactgaggcctggcagagaacctagacaaagcgagccccctgctcagagaggcccaccgccatcaggtcggcctcccgctaggtcaaccgctagcggtcacgatcgtccaaccaggggtgctgctgcaggtgctaggcggccaagaatgaaaaaaaagaccagaaggcgctccacacgctctgaggaacttacccggagcgaagaactcaccctctctgaagaagccacctggtctgaggaagccactcaatccgaagaagctacccagggcgaggagatgaataggtcacaggaggtgacccgggacgaagagtctacacgctccgaggaagtgacacgggaagagatggctgccgctggattaaccgtgacggtcacgcactcaaatgagaaacacgacctgcatgtgacctcccagcaaggaagttccgagcccgtggttcaggatttggcccaggtagtggaggaagtgatcggagtgcctcagtcttttcagaaactgatctttaaaggaaaatctttaaaggagatggaaacacctctctcagcactgggtatccaggacggctgtcgagtcatgctgattgggaaaaaaaactccccccaagaagaagtggagctgaaaaaactcaaacatttggagaagtccgtggaaaaaatagccgatcagttggaggagcttaacaaggaacttacaggaatacagcagggtttccttccaaaagacttacaagctgaggctctctgtaagctcgatcgacgcgtgaaggctactatcgaacagttcatgaaaattctggaggagattgacaccctgatccttcccgagaattttaaggatagtaggctgaagcgaaagggactcgtgaagaaagttcaggctttcctggccgaatgtgacactgtggaacaaaacatctgccaagagaccgaaagactccagagcactaattttgccctagccgagtag

SEQ ID NO: 145106 - DNA, 1038 bp, Artificial Sequence
  derived and/or modified sequence
tagtcgggcggggttgtgagacgccgcgctcagcttccatcgctgggcggtcaacaagtgcgggcctggctcagcgcgggggggcgcggagaccgcgaggcgaccgggagcggctgggttcccggctgcgcgcccttcggccaggccgggagccgcgccagtcggagcccccggcccagcgtggtccgcctccctctgggcgtccacctgcccggagtactgccagcgggcatgaccgacccaccaggggcgccgccgccggcgctcgcaggccgcggatgaagaagaaaacccggcgccgctcgacccggagcgaggagttgacccggagcgaggagttgaccctgagtgaggaagcgacctggagtgaagaggcgacccagagtgaggaggcgacccagggcgaagagatgaatcggagccaggaggtgacccgggacgaggagtcgacccggagcgaggaggtgaccagggaggaaatggcggcagctgggctcaccgtgactgtcacccacagcaatgagaagcacgaccttcatgttacctcccagcagggcagcagtgaaccagttgtccaagacctggcccaggttgttgaagaggtcataggggttccacagtcttttcagaaactcatatttaagggaaaatctctgaaggaaatggaaacaccgttgtcagcacttggaatacaagatggttgccgggtcatgttaattgggaaaaagaacagtccacaggaagaggttgaactaaagaagttgaaacatttggagaagtctgtggagaagatagctgaccagctggaagagttgaataaagagcttactggaatccagcagggttttctgcccaaggatttgcaagctgaagctctctgcaaacttgataggagagtaaaagccacaatagagcagtttatgaagatcttggaggagattgacacactgatcctgccagaaaattttcctactctcacactggttctcaatgaaaaatagtgtctttgtgattttgagtaaagctcctatctgtttt

SEQ ID NO: 145107 - DNA, 1268 bp, Artificial Sequence
  derived and/or modified sequence
gcaggccggggcggggctgggaagtagtcgggcggggttgtgagacgccgcgctcagcttccatcgctgggcggtcaacaagtgcgggcctggctcagcgcgggggggcgcggagaccgcgaggcgaccgggagcggctgggttcccggctgcgcgcccttcggccaggccgggagccgcgccagtcggagcccccggcccagcgtggtccgcctccctctgggcgtccacctgcccggagtactgccagcgggcatgaccgacccaccaggggcgccgccgccggcgctcgcaggccgcggatgaagaagaaaacccggcgccgctcgacccggagcgaggagttgacccggagcgaggagttgaccctgagtgaggaagcgacctggagtgaagaggcgacccagagtgaggaggcgacccagggcgaagagatgaatcggagccaggaggtgacccgggacgaggagtcgacccggagcgaggaggtgaccagggaggaaatggcggcagctgggctcaccgtgactgtcacccacagcaatgagaagcacgaccttcatgttacctcccagcagggcagcagtgaaccagttgtccaagacctggcccaggttgttgaagaggtcataggggttccacagtcttttcagaaactcatatttaagggaaaatctctgaaggaaatggaaacaccgttgtcagcacttggaatacaagatggttgccgggtcatgttaattgggaaaaagaacagtccacaggaagaggttgaactaaagaagttgaaacatttggagaagtctgtggagaagatagctgaccagctggaagagttgaataaagagcttactggaatccagcagggttttctgcccaaggatttgcaagctgaagctctctgcaaacttgataggagagtaaaagccacaatagagcagtttatgaagatcttggaggagattgacacactgatcctgccagaaaatttcaaagacagtagattgaaaaggaaaggcttggtaaaaaaggttcaggcattcctagccgagtgtgacacagtggagcagaacatctgccaggagactgagcggctgcagtctacaaactttgccctggccgagtgaggtgtagcagaaaaaggctgtgctgccctgaagaatggcgccaccagctctgccgtctctggagcggaatttacctgatttcttcagggctgctgggggcaactggccatttgccaattttcctactctcacactggttct

SEQ ID NO: 145108 - DNA, 3865 bp, Artificial Sequence
  derived and/or modified sequence
aggccggggcggggctgggaagtagtcgggcggggttgtgagacgccgcgctcagcttccatcgctgggcggtcaacaagtgcgggcctggctcagcgcgggggggcgcggagaccgcgaggcgaccgggagcggctgggttcccggctgcgcgcccttcggccaggccgggagccgcgccagtcggagcccccggcccagcgtggtccgcctccctctgggcgtccacctgcccggagtactgccagcgggcatgaccgacccaccaggggcgccgccgccggcgctcgcaggccgcggatgaagaagaaaacccggcgccgctcgacccggagcgaggagttgacccggagcgaggagttgaccctgagtgaggaagcgacctggagtgaagaggcgacccagagtgaggaggcgacccagggcgaagagatgaatcggagccaggaggtgacccgggacgaggagtcgacccggagcgaggaggtgaccagggaggaaatggcggcagctgggctcaccgtgactgtcacccacagcaatgagaagcacgaccttcatgttacctcccagcagggcagcagtgaaccagttgtccaagacctggcccaggttgttgaagaggtcataggggttccacagtcttttcagaaactcatatttaagggaaaatctctgaaggaaatggaaacaccgttgtcagcacttggaatacaagatggttgccgggtcatgttaattgggaaaaagaacagtccacaggaagaggttgaactaaagaagttgaaacatttggagaagtctgtggagaagatagctgaccagctggaagagttgaataaagagcttactggaatccagcagggttttctgcccaaggatttgcaagctgaagctctctgcaaacttgataggagagtaaaagccacaatagagcagtttatgaagatcttggaggagattgacacactgatcctgccagaaaatttcaaagacagtagattgaaaaggaaaggcttggtaaaaaaggttcaggcattcctagccgagtgtgacacagtggagcagaacatctgccaggagactgagcggctgcagtctacaaactttgccctggccgagtgaggtgtagcagaaaaaggctgtgctgccctgaagaatggcgccaccagctctgccgtctctggagcggaatttacctgatttcttcagggctgctgggggcaactggccatttgccaattttcctactctcacactggttctcaatgaaaaatagtgtctttgtgattttgagtaaagctcctatctgttttctccttctgtctctgtggttgtactgtccagcaatccaccttttctggagagggccacctctgcccaaattttcccagctgtttggacctctgggtgctttctttgggctggtgagagctctaatttgccttgggccagtttcaggtttataggccccctcagtcttcagatacatgagggcttctttgctcttgtgatcgtgtagtcccatagctgtaaaaccagaatcaccaggaggttgcacctagtcaggaatattgggaatggcctagaacaaggtgtttggcacataagtagaccacttatccctcattgtgacctaattccagagcatctggctgggttgttgggttctagactttgtcctcacctcccagtgaccctgactagccacaggccatgagataccagggggccgttccttggatggagcctgtggttgatgcaaggcttccttgtccccaagcaagtcttcagaaggttagaacccagtgttgactgagtctgtgcttgaaaccaggccagagccatggattaggaagggcaaagagaaggcaccagaatgagtaaagcaggcaggtggtgaagccaaccataaacttctcaggagtgacatgtgcttccttcaaaggcatttttgttaaccatatccttctgagttctatgtttccttcacagctgttctatccattttgtggactgtcccccacccccaccccatcattgtttttaaaaaattaaggcctggcgcagcagctcatgcctataatcccagcactttgggaggctgaggcgggcggatcacttgaggccaggagtttgagaccagcccaggcaacatagcaaaaccccattctgctttaaaaaaaaaaaaaaaaaaaattagcttggcgtagtggcatgtgcctataatcccagctactggggaggctgaggcacaagaatcatttgaacctgggaggtagaggttgctgtgagccgagattacgcccctgcactccagcctgggtcacagagtgagactccatctcagaaaaaaaaaaaattgagtcaggtgcagtagctccttcctgtagtcccagctacttgggaggctgaggctagaggatcacttgagcccaggagtttgagtctagtctgggcaacatagcaagaccccatctctaaaatttaagtaagtaaaagtagataaataaaaagaaaaaaaaactgtttatgtgctcatcataaagtagaagagtggtttgcttttttttttttttttggattaatgaggaaatcattctgtggctctagtcataatttatgcttaataacattgatagtagccctttgcgctataactctacctaaagactcacatcatttggcagagagagagtcgttgaagtcccaggaattcaggactgggcaggttaagacctcagacaaggtagtagaggtagacttgtggacaaggctcgggtcccagcccaccgcaccccaactttaatcagagtggttcactattgatctatttttgtgtgatagctgtgtggcgtgggccacaacatttaatgagaagttactgtgcaccaaactgccgaacaccattctaaactattcatatatattagtcatttaattcttacataacttgagaggtagacagatatccttattttagagatgaggaaaccaagagaacttaggtcattagcgcaaggttgtagagtaagcggcaaagccaagacacaaagctgggtggtttggtttcagagccagtgcttttcccctctactgtactgcctctcaaccaacacagggttgcacaggcccattctctgatttttttcctcttgtcctctgcctctccctctagctcccacttcctctctgctctagttcattttctttagagcagcccgagtgatcatgaagtgcaaatcttgccatgtcagtcccctgcttagaaccctccaatggctcactttctctttaggcaaaagtctttaccccatgccttctcccatctcatctcaaccccctcatttgttggctgtctgctgtcagccactcttctttcaggtcctcagatgcactgcaccctctcctgcctgggggtctttgctcctgctactacctctgcttgaacagctcctcaccttccttcctccaaccctacccttgtataggtgacttttgttcatccttcagaattcaactcacatgtctcttgcatggagaaccctcacctactgtgttgagaccctgtccagcccccaggtgggatcctctctcgacttcccatacatttctttcacagcatttacatagtccatgatagtttacttgtgggattatttggttaatctttgcctttaacaccagggttccttgggtgaaggagcttctttatcttggtaacagcattatttcaagcataacttgtaatatagttatattacatatataacatatatatatataacataacatatataacatatataacaagcataacttgttatatagtcttgtatatagtaagacctcaataaatatttgg

SEQ ID NO: 145109 - DNA, 1038 bp, Artificial Sequence
  derived and/or modified sequence
ctggcccagagaggcggcgccagaagacccagaggcgacagagagagactgggcagcagactgagagccctgagacccggcagagagcccagacagagcgagccccccgcccagagaggccccccccccagcggcagaccccccgccagaagcaccgccagcggccacgacagacccaccagaggcgccgccgccggcgccagaagacccagaatgaagaagaagaccagaagaagaagcaccagaagcgaggagctgaccagaagcgaggagctgaccctgagcgaggaggccacctggagcgaggaggccacccagagcgaggaggccacccagggcgaggagatgaacagaagccaggaggtgaccagagacgaggagagcaccagaagcgaggaggtgaccagagaggagatggccgccgccggcctgaccgtgaccgtgacccacagcaacgagaagcacgacctgcacgtgaccagccagcagggcagcagcgagcccgtggtgcaggacctggcccaggtggtggaggaggtgatcggcgtgccccagagcttccagaagctgatcttcaagggcaagagcctgaaggagatggagacccccctgagcgccctgggcatccaggacggctgcagagtgatgctgatcggcaagaagaacagcccccaggaggaggtggagctgaagaagctgaagcacctggagaagagcgtggagaagatcgccgaccagctggaggagctgaacaaggagctgaccggcatccagcagggcttcctgcccaaggacctgcaggccgaggccctgtgcaagctggacagaagagtgaaggccaccatcgagcagttcatgaagatcctggaggagatcgacaccctgatcctgcccgagaacttcaaggacagcagactgaagagaaagggcctggtgaagaaggtgcaggccttcctggccgagtgcgacaccgtggagcagaacatctgccaggagaccgagagactgcagagcaccaacttcgccctggccgagtag

SEQ ID NO: 145110 - protein, 218 aa, Artificial Sequence
  derived and/or modified sequence
MDGSGEQPRGGGPTSSEQIMKTGALLLQGFIQDRAGRMGGEAPELALDPVPQDASTKKLSECLKRIGDELDSNMELQRMIAAVDTDSPREVFFRVAADMFSDGNFNWGRVVALFYFASKLVLKALCTKVPELIRTIMGWTLDFLRERLLGWIQDQGGWVRLLKPPHPHHRALTTAPAPPSLPPATPLGPWAFWSRSQWCPLPIFRSSDVVYNAFSLRV

SEQ ID NO: 145111 - DNA, 657 bp, Artificial Sequence
  derived and/or modified sequence
atggacggatcaggtgaacagcctcgaggagggggaccaacaagttccgagcagatcatgaaaacaggagcactgctgttgcaagggtttatccaggacagggctggaagaatgggcggggaagccccagagttggcactcgatcccgtgcctcaggacgcctcaacaaaaaagctgagcgagtgtcttaagaggattggagacgagcttgatagtaatatggaactgcagaggatgatcgctgctgtggacaccgacagcccccgggaagtcttttttcgcgtggccgctgacatgttcagtgacggcaattttaattgggggcgcgtggttgcccttttttacttcgcctccaaactagtgttgaaagccctgtgtaccaaagtccccgagttgataaggaccatcatggggtggacccttgattttttaagagagagactgctgggatggattcaagaccagggcggatgggtacggctgctcaagccaccccaccctcatcacagggcattaacaaccgctcctgccccaccatctttaccacccgccacacccctgggtccatgggcattttggtcacggtctcagtggtgccctctgccgattttcagatcttccgacgtggtttacaatgcattctccctacgcgtctag

SEQ ID NO: 145112 - DNA, 657 bp, Artificial Sequence
  derived and/or modified sequence
atggatggcagcggggagcagccccggggcggcggccccaccagcagcgagcagatcatgaagacaggagccctgctgctgcagggcttcatccaggacagagctggccgcatgggcggggaggcccctgagctggccctggaccctgtgccccaggatgccagcaccaagaagctgtctgaatgtctgaagagaattggagatgagctggacagcaacatggagctgcagaggatgattgctgctgtggacacagacagcccccgggaggtgttcttccgggtggccgctgacatgttcagtgatggcaacttcaactggggccgggtggtggccctcttctactttgccagcaagctggtgctgaaggccctgtgcaccaaggtgcctgagctgatccgcaccatcatgggctggaccctggacttcctgcgggagcggctgctgggctggatccaggaccagggcggctgggtgcggctgctgaagccaccccacccccaccaccgggccctgaccacagccccagccccacccagcctgcccccagccacccccctgggcccctgggccttctggagccgcagccagtggtgccccctgcccatcttccgcagcagtgatgtggtgtacaatgccttcagcctgcgggtgtag

SEQ ID NO: 145113 - DNA, 657 bp, Artificial Sequence
  derived and/or modified sequence
atggacggcagcggcgagcagccccggggcggcggccccaccagcagcgagcagatcatgaagacgggcgccttgctgcttcaaggtttcattcaggaccgcgccggaagaatgggaggtgaggccccagagctggcactcgatcccgtgccacaggacgcatctacgaaaaaactcagtgaatgtctgaagagaattggcgacgagctggattcaaacatggagttacagcgcatgatcgccgccgtcgacaccgactctcctcgggaggtgttcttccgcgtggcagcggatatgtttagcgatggaaattttaactggggcagggtggtcgcacttttctacttcgccagcaaacttgtcttgaaagcattgtgcaccaaggtgccagagttgatccgtacaataatgggctggaccttggactttctgagagaacgtctcctcggctggattcaggatcagggcggttgggtacggctcctgaagcctccacatcctcatcaccgggcacttactacagccccggcaccccccagcctgcctccagcaacaccattggggccttgggccttctggtcacgtagccagtggtgccccctgcctatcttcaggtcctcagacgtggtctacaatgccttttctctgcgcgtatag

SEQ ID NO: 145114 - DNA, 657 bp, Artificial Sequence
  derived and/or modified sequence
atggacggttctggcgaacagcccaggggcggagggcctacttcatcggagcagatcatgaagaccggcgctctcctgctgcaggggttcattcaggatagagctggcagaatgggcggagaggcgccagaattggctttggaccctgtacctcaggatgccagcactaagaagctgtccgagtgtctgaaacggataggtgatgaactggactccaacatggaactccagaggatgatagccgcagtcgacactgattctcctcgcgaagtattttttagagtggccgctgacatgttctctgatggtaactttaattggggccgtgtggtcgctctgttttactttgcatctaaactggtgctcaaagccctgtgtaccaaagtgcctgagttgatccgaacgataatgggctggaccctggattttctgcgggaaaggctgctaggctggatacaggaccagggaggctgggtgaggctgctaaagcctccccaccctcatcatcgcgcattgactaccgctcctgcaccccctagcctgccacctgccacaccactgggcccatgggcattttggtctaggagccaatggtgtcccttgccgatatttcggtcttctgacgtcgtttacaatgcgttctccttgcgggtttag

SEQ ID NO: 145115 - DNA, 1358 bp, Artificial Sequence
  derived and/or modified sequence
atggacgggtccggggagcagcccagaggcggggggcccaccagctctgagcagatcatgaagacaggggcccttttgcttcagggtttcatccaggatcgagcagggcgaatggggggggaggcacccgagctggccctggacccggtgcctcaggatgcgtccaccaagaagctgagcgagtgtctcaagcgcatcggggacgaactggacagtaacatggagctgcagaggatgattgccgccgtggacacagactccccccgagaggtctttttccgagtggcagctgacatgttttctgacggcaacttcaactggggccgggttgtcgcccttttctactttgccagcaaactggtgctcaaggccctgtgcaccaaggtgccggaactgatcagaaccatcatgggctggacattggacttcctccgggagcggctgttgggctggatccaagaccagggtggttgggtgagactcctcaagcctcctcacccccaccaccgcgccctcaccaccgcccctgccccaccgtccctgccccccgccactcctctgggaccctgggccttctggagcaggtcacagtggtgccctctccccatcttcagatcatcagatgtggtctataatgcgttttccttacgtgtctgatcaatccccgattcatctaccctgctgacctcccagtgacccctgacctcactgtgaccttgacttgattagtgccttctgccctccctggagcctccactgcctctggaattgctcaagttcattgatgaccctctgaccctagctctttcctttttttttttttccccactgagaaggggtctcgctatgttgcccaggttggtctcgaactcctggcctcaagcgatcctcccgcctcagcctctcaaagtgctgggattacaggtgtgagccaccatgcctggcctgagtccagctctttaatgcccgttcatctcagtcccctgcccgcaatcctgccttctggcctcctccgtccctgatcccgcctctgcctgcccaggggctgcccctggccgagtcactgaagcgactgatgtccctgtctccaggacggcctcctctcctactttgggacgcccacgtggcagaccgtgaccatctttgtggcgggagtgctcaccgcctcactcaccatctggaagaagatgggctgaggcccccagctgccttggactgtgtttttcctccataaattatggcatttttctgggaggggtggggattgggggacgtgggcatttttcttacttttgtaattattggggggtgtggggaagagtggtcttgagggggtaataaacctccttcgggacaca

SEQ ID NO: 145116 - DNA, 657 bp, Artificial Sequence
  derived and/or modified sequence
atggacggcagcggcgagcagcccagaggcggcggccccaccagcagcgagcagatcatgaagaccggcgccctgctgctgcagggcttcatccaggacagagccggcagaatgggcggcgaggcccccgagctggccctggaccccgtgccccaggacgccagcaccaagaagctgagcgagtgcctgaagagaatcggcgacgagctggacagcaacatggagctgcagagaatgatcgccgccgtggacaccgacagccccagagaggtgttcttcagagtggccgccgacatgttcagcgacggcaacttcaactggggcagagtggtggccctgttctacttcgccagcaagctggtgctgaaggccctgtgcaccaaggtgcccgagctgatcagaaccatcatgggctggaccctggacttcctgagagagagactgctgggctggatccaggaccagggcggctgggtgagactgctgaagcccccccacccccaccacagagccctgaccaccgcccccgccccccccagcctgccccccgccacccccctgggcccctgggccttctggagcagaagccagtggtgccccctgcccatcttcagaagcagcgacgtggtgtacaacgccttcagcctgagagtgtag

SEQ ID NO: 145117 - protein, 465 aa, Artificial Sequence
  derived and/or modified sequence
MVDPVGFAEAWKAQFPDSEPPRMELRSVGDIEQELERCKASIRRLEQEVNQERFRMIYLQTLLAKEKKSYDRQRWGFRRAAQAPDGASEPRASASRPQPAPADGADPPPAEEPEARPDGEGSPGKARPGTARRPGAAASGERDDRGPPASVAALRSNFERIRKGHGQPGADAEKPFYVNVEFHHERGLVKVNDKEVSDRISSLGSQAMQMERKKSQHGAGSSVGDASRPPYRGRSSESSCGVDGDYEDAELNPRFLKDNLIDANGGSRPPWPPLEYQPYQSIYVGGMMEGEGKGPLLRSQSTSEQEKRLTWPRRSYSPRSFEDCGGGYTPDCSSNENLTSSEEDFSSGQSSRVSPSPTTYRMFRDKSRSPSQNSQQSFDSSSPPTPQCHKRHRHCPVVVSEATIVGVRKTGQIWPNDGEGAFHGEHPGAAEEVFQKLLPDIRGAADADQLVCETPDCPQHSADHQ

SEQ ID NO: 145118 - protein, 458 aa, Artificial Sequence
  derived and/or modified sequence
MVDPVGFAEAWKAQFPDSEPPRMELRSVGDIEQELERCKASIRRLEQEVNQERFRMIYLQTLLAKEKKSYDRQRWGFRRAAQAPDGASEPRASASRPQPAPADGADPPPAEEPEARPDGEGSPGKARPGTARRPGAAASGERDDRGPPASVAALRSNFERIRKGHGQPGADAEKPFYVNVEFHHERGLVKVNDKEVSDRISSLGSQAMQMERKKSQHGAGSSVGDASRPPYRGRSSESSCGVDGDYEDAELNPRFLKDNLIDANGGSRPPWPPLEYQPYQSIYVGGMMEGEGKGPLLRSQSTSEQEKRLTWPRRSYSPRSFEDCGGGYTPDCSSNENLTSSEEDFSSGQSSRVSPSPTTYRMFRDKSRSPSQNSQQSFDSSSPPTPQCHKRHRHCPVVVSEATIVGVRKTGQIWPNDGEGAFHGDADGSFGTPPGYGCLCLPAWPSGCTAATARVTRS

SEQ ID NO: 145119 - protein, 1271 aa, Artificial Sequence
  derived and/or modified sequence
MVDPVGFAEAWKAQFPDSEPPRMELRSVGDIEQELERCKASIRRLEQEVNQERFRMIYLQTLLAKEKKSYDRQRWGFRRAAQAPDGASEPRASASRPQPAPADGADPPPAEEPEARPDGEGSPGKARPGTARRPGAAASGERDDRGPPASVAALRSNFERIRKGHGQPGADAEKPFYVNVEFHHERGLVKVNDKEVSDRISSLGSQAMQMERKKSQHGAGSSVGDASRPPYRGRSSESSCGVDGDYEDAELNPRFLKDNLIDANGGSRPPWPPLEYQPYQSIYVGGMMEGEGKGPLLRSQSTSEQEKRLTWPRRSYSPRSFEDCGGGYTPDCSSNENLTSSEEDFSSGQSSRVSPSPTTYRMFRDKSRSPSQNSQQSFDSSSPPTPQCHKRHRHCPVVVSEATIVGVRKTGQIWPNDGEGAFHGDADGSFGTPPGYGCAADRAEEQRRHQDGLPYIDDSPSSSPHLSSKGRGSRDALVSGALESTKASELDLEKGLEMRKWVLSGILASEETYLSHLEALLLPMKPLKAAATTSQPVLTSQQIETIFFKVPELYEIHKEFYDGLFPRVQQWSHQQRVGDLFQKLASQLGVYRAFVDNYGVAMEMAEKCCQANAQFAEISENLRARSNKDAKDPTTKNSLETLLYKPVDRVTRSTLVLHDLLKHTPASHPDHPLLQDALRISQNFLSSINEEITPRRQSMTVKKGEHRQLLKDSFMVELVEGARKLRHVFLFTDLLLCTKLKKQSGGKTQQYDCKWYIPLTDLSFQMVDELEAVPNIPLVPDEELDALKIKISQIKNDIQREKRANKGSKATERLKKKLSEQESLLLLMSPSMAFRVHSRNGKSYTFLISSDYERAEWRENIREQQKKCFRSFSLTSVELQMLTNSCVKLQTVHSIPLTINKEDDESPGLYGFLNVIVHSATGFKQSSNLYCTLEVDSFGYFVNKAKTRVYRDTAEPNWNEEFEIELEGSQTLRILCYEKCYNKTKIPKEDGESTDRLMGKGQVQLDPQALQDRDWQRTVIAMNGIEVKLSVKFNSREFSLKRMPSRKQTGVFGVKIAVVTKRERSKVPYIVRQCVEEIERRGMEEVGIYRVSGVATDIQALKAAFDVNNKDVSVMMSEMDVNAIAGTLKLYFRELPEPLFTDEFYPNFAEGIALSDPVAKESCMLNLLLSLPEANLLTFLFLLDHLKRVAEKEAVNKMSLHNLATVFGPTLLRPSEKESKLPANPSQPITMTDSWSLEVMSQVQVLLYFLQLEAIPAPDSKRQSILFSTEV

SEQ ID NO: 145120 - protein, 936 aa, Artificial Sequence
  derived and/or modified sequence
PSAPRVSTVGLLCSGAGPHLCPCAEEGTGGLESQGEIIPSRGSRKPDGVSGSRRLFSSLCKSQEGSRKECLRKHRRLGPAMPVSSPGFPGPLARSEHHLDTAALQTGQRSSAGTKMGCPTLMTRPPHRPTSAARAGAAGMRWSREPWSPLKRSELDLEKGLEMRKWVLSGILASEETYLSHLEALLLPMKPLKAAATTSQPVLTSQQIETIFFKVPELYEIHKEFYDGLFPRVQQWSHQQRVGDLFQKLASQLGVYRAFVDNYGVAMEMAEKCCQANAQFAEISENLRARSNKDAKDPTTKNSLETLLYKPVDRVTRSTLVLHDLLKHTPASHPDHPLLQDALRISQNFLSSINEEITPRRQSMTVKKGEHRQLLKDSFMVELVEGARKLRHVFLFTDLLLCTKLKKQSGGKTQQYDCKWYIPLTDLSFQMVDELEAVPNIPLVPDEELDALKIKISQIKNDIQREKRANKGSKATERLKKKLSEQESLLLLMSPSMAFRVHSRNGKSYTFLISSDYERAEWRENIREQQKKCFRSFSLTSVELQMLTNSCVKLQTVHSIPLTINKEDDESPGLYGFLNVIVHSATGFKQSSNLYCTLEVDSFGYFVNKAKTRVYRDTAEPNWNEEFEIELEGSQTLRILCYEKCYNKTKIPKEDGESTDRLMGKGQVQLDPQALQDRDWQRTVIAMNGIEVKLSVKFNSREFSLKRMPSRKQTGVFGVKIAVVTKRERSKVPYIVRQCVEEIERRGMEEVGIYRVSGVATDIQALKAAFDVNNKDVSVMMSEMDVNAIAGTLKLYFRELPEPLFTDEFYPNFAEGIALSDPVAKESCMLNLLLSLPEANLLTFLFLLDHLKRVAEKEAVNKMSLHNLATVFGPTLLRPSEKESKLPANPSQPITMTDSWSLEVMSQVQVLLYFLQLEAIPAPDSKRQSILFSTEV

SEQ ID NO: 145121 - protein, 467 aa, Artificial Sequence
  derived and/or modified sequence
MVDPVGFAEAWKAQFPDSEPPRMELRSVGDIEQELERCKASIRRLEQEVNQERFRMIYLQTLLAKEKKSYDRQRWGFRRAAQAPDGASEPRASASRPQPAPADGADPPPAEEPEARPDGEGSPGKARPGTARRPGAAASGERDDRGPPASVAALRSNFERIRKGHGQPGADAEKPFYVNVEFHHERGLVKVNDKEVSDRISSLGSQAMQMERKKSQHGAGSSVGDASRPPYRGRSSESSCGVDGDYEDAELNPRFLKDNLIDANGGSRPPWPPLEYQPYQSIYVGGMMEGEGKGPLLRSQSTSEQEKRLTWPRRSYSPRSFEDCGGGYTPDCSSNENLTSSEEDFSSGQSSRVSPSPTTYRMFRDKSRSPSQNSQQSFDSSSPPTPQCHKRHRHCPVVVSEATIVGVRKTGQIWPNDGEGAFHGDAVLKTEVPHQGVRRARLSLEALGEDPSFLFPASDGPRHSSTW

SEQ ID NO: 145122 - protein, 454 aa, Artificial Sequence
  derived and/or modified sequence
MVDPVGFAEAWKAQFPDSEPPRMELRSVGDIEQELERCKASIRRLEQEVNQERFRMIYLQTLLAKEKKSYDRQRWGFRRAAQAPDGASEPRASASRPQPAPADGADPPPAEEPEARPDGEGSPGKARPGTARRPGAAASGERDDRGPPASVAALRSNFERIRKGHGQPGADAEKPFYVNVEFHHERGLVKVNDKEVSDRISSLGSQAMQMERKKSQHGAGSSVGDASRPPYRGRSSESSCGVDGDYEDAELNPRFLKDNLIDANGGSRPPWPPLEYQPYQSIYVGGMMEGEGKGPLLRSQSTSEQEKRLTWPRRSYSPRSFEDCGGGYTPDCSSNENLTSSEEDFSSGQSSRVSPSPTTYRMFRDKSRSPSQNSQQSFDSSSPPTPQCHKRHRHCPVVVSEATIVGVRKTGQIWPNDGEGAFHGDADGSFGTPPGYGCAAGRPPHLTELPVQHQ

SEQ ID NO: 145123 - DNA, 3816 bp, Artificial Sequence
  derived and/or modified sequence
atggtggatccagtgggatttgcagaggcttggaaggctcagttccccgacagcgaaccacctcgcatggagctgcgatcggtaggagatattgaacaagaattggagcgttgcaaagccagtatccggcgactggagcaggaggtgaatcaggaacgcttccgcatgatttacctacagacactcttggctaaggagaagaagtcctacgaccggcagcggtggggctttaggagagcggcccaggccccggacggcgcctctgaaccgcgagcgagcgcaagtcgcccccaacctgcacccgcagatggtgcagatcccccgcccgccgaagagccagaggcccggccagatggcgagggctcaccagggaaagcccggcccggaaccgcaagacgacccggagccgctgcctccggcgagcgcgatgacagaggaccgccagccagcgtggccgccttacgaagcaatttcgagagaatacgcaagggccacggccagcccggcgccgatgcagaaaagccgttctacgtaaatgtggaatttcatcatgagaggggtctggttaaggtgaatgataaagaggtatcagatagaatatctagcttagggtcccaagcaatgcagatggagcgcaaaaagtcccagcatggcgcaggctcctccgtgggtgatgcctcacgaccaccatataggggcagatcaagtgaatcatcctgtggggtagatggcgactatgaagatgcggaactcaatcctcgatttctcaaggacaacctgatcgatgcaaatgggggtagtcggcccccttggccgcccttggaataccagccctaccagtctatttatgtcggcggaatgatggagggggaaggcaaaggccccctccttcggagccagtcaacctcagagcaggaaaaacgcctgacctggccccggcgctcgtacagccctagaagcttcgaagattgcggaggggggtacacaccggactgttcaagtaatgagaacctcacttcaagcgaagaagattttagttctgggcagagttccagggtttctccatctcccaccacctaccgcatgttccgggataagagccggtccccctcacagaattcccagcagtcctttgatagcagttccccccccaccccacagtgtcacaagcgacaccgccattgtccagtggtggtgagcgaagctacgattgtcggcgttaggaagactgggcagatttggccaaatgacggcgagggagcctttcatggtgacgccgacgggtcattcggtacaccccccgggtatggctgcgcagctgaccgggccgaagaacaaaggagacaccaagatggattaccctatattgatgattcaccatcctcatccccccacctgtcctccaaaggacggggtagcagagatgctcttgtgagcggagctctcgagagcacaaaagctagcgagctggacctggaaaaaggcttggagatgagaaagtgggttctttccggcattctcgcctccgaggagacttatctcagccatcttgaagccctgttgctgccaatgaagccacttaaggccgccgctaccacaagccagcccgtcctcaccagtcagcaaatcgagacgatcttcttcaaagtgcccgagctctatgaaattcataaggagttttacgatgggttgtttcctcgggttcaacagtggtcacaccaacagcgcgtgggggatctcttccaaaagctggctagccagctcggagtgtatagagcctttgtggacaattacggcgtcgccatggaaatggcagagaaatgttgccaggcaaacgcgcaatttgccgaaatatctgagaacttaagagctcggtccaacaaggacgccaaagatcccacaactaagaattcattggaaaccttgctctacaagccggttgaccgagttacccggtccaccctggtgctccacgacctgctcaagcacacacctgcctcccaccccgatcaccccctgttgcaggacgccctcaggataagtcaaaattttctcagcagtatcaatgaagagataactccacgccgccagtcaatgacagtcaagaagggtgagcacagacagttgcttaaggactcttttatggtcgaacttgtggaaggggcccgtaagctgcgccacgtgtttctgttcactgatttattactttgcaccaaactcaagaaacagagcggtgggaaaacccagcagtacgattgcaagtggtacatcccgttaacagacctctcattccaaatggtggacgagcttgaggcggtgcccaatataccactggtccccgatgaagaactggatgcattgaagatcaaaatcagtcaaatcaaaaacgatattcaaagggagaaacgcgccaataagggttccaaagccaccgagagactgaagaaaaaactctctgaacaggagagccttctgttactgatgtccccgagcatggccttccgtgtccactctcggaatggaaagtcttacactttcctgatttccagcgactacgaacgcgcggagtggcgggagaacattagagagcagcagaaaaagtgttttagatcctttagtctgacgtcagttgagctacagatgctcacaaatagttgtgtcaaattgcagactgtgcatagcatccccttaactataaataaggaggacgacgagagccccggcctgtatggattcctaaacgtgattgtacactcagcaaccggctttaaacaatcaagcaatctgtactgtacgctagaggtcgactcttttggttatttcgtgaacaaagccaaaacaagggtttacagggacacagccgagccgaactggaacgaagaatttgaaatcgagttagagggttcccaaaccctccgcatcctatgctacgaaaagtgctacaacaagaccaagatccccaaggaggacggggaaagtacagataggcttatgggaaaagggcaagttcagttggatcctcaggcacttcaagatagagattggcaacggaccgtgatcgctatgaacggcatagaggtcaagcttagcgtaaagttcaatagccgagagttcagcctgaaacgaatgcccagccggaagcagacaggcgtctttggtgtgaaaattgcggtcgttactaaaagggagcgctcgaaggtcccatacatcgtcaggcaatgcgtggaagaaatcgagaggcggggcatggaggaagttggaatttatagggtttctggggtcgccaccgacatccaagcgctaaaagcagccttcgacgtcaacaacaaggatgtctccgttatgatgagtgaaatggacgttaatgccatagcgggaacacttaaactgtactttagggagctgccagaacctctctttacggacgaattttacccaaatttcgccgaggggattgccctaagtgacccggttgcaaaggaaagctgtatgctgaatctactgctgagccttccagaggctaatctgctgacatttttattcctgctggaccatttgaaacgagtggccgaaaaggaagcagtgaacaagatgtcattgcataacctcgccaccgtctttgggcccacgctcctcaggcctagtgaaaaggagagtaaacttccagcgaacccctctcaacccattaccatgacagacagttggtccctggaggtcatgtctcaggtgcaggtcctcttgtacttcttgcagctcgaagctatcccagcgcctgatagcaagaggcagtctatactattctccacagaggtttag

SEQ ID NO: 145124 - DNA, 2811 bp, Artificial Sequence
  derived and/or modified sequence
ccttcagctccccgggttagcaccgtgggactcttatgttccggtgcaggtccacacctctgcccctgcgcagaggagggaacggggggcctggagagccaaggggagatcatcccgtctcgggggtctagaaagccggacggtgtcagcggatcccgccgcttattcagcagcctgtgtaagtcccaagagggttcaagaaaagaatgcctgaggaaacaccgacggctaggccctgcaatgccagtttccagcccaggtttcccaggcccattggcacgcagtgaacaccatcttgataccgccgcactccagactggccagagatcctccgccggtacaaaaatgggatgtccaaccctgatgacccggccccctcacaggccgaccagcgccgcgagggccggggcggcaggcatgcgatggagcagagagccatggtcccctcttaagaggtctgagctggacttggaaaagggcctggaaatgaggaaatgggtgttatcaggcatcttagccagcgaagagacatacctgagccacttggaggccctactgctgcccatgaagcccctgaaggcggccgcaactactagccaaccggtgttgaccagccagcagatagaaaccattttttttaaggtcccagagttgtatgagatccataaagaattctatgatgggctcttcccgagagtacagcaatggagtcatcagcaacgggtaggagacttatttcagaaattggcctcacagctgggagtgtaccgggcattcgtggacaactacggggtggctatggagatggccgaaaagtgttgccaagccaatgcgcagtttgctgagatctcagagaacttgagggcacgatccaataaagacgccaaggatcctacaaccaagaactcgttggaaacattactgtataaacctgtagatcgggtgacgcgtagcacactggtgcttcatgacttgctgaaacataccccagcatcacatccagatcatccactgctccaggatgccctgcgtatctctcagaattttctttcctcaattaacgaagagatcactcccaggagacagagcatgacagtgaaaaaaggggaacacagacaactgctcaaggattcgtttatggtggagctggtagaaggggcccgtaaactacgacacgtcttcctgtttacagaccttttactgtgcacaaaactgaaaaagcaatctgggggcaagacccagcagtacgattgtaaatggtatattcctctcaccgatctgagctttcaaatggtcgatgagctggaggctgtgccaaatatcccactagtgcctgacgaggagttggacgccctgaaaattaaaattagccagataaaaaacgatatccagcgtgagaaacgggctaataagggctcaaaggcgaccgagcgcctgaaaaaaaaactgagtgagcaggaatctctgctgctgttaatgtccccttccatggcattccgcgtgcattctcgcaatggaaaaagttatacattcctcatctcaagcgattacgagagggcggaatggagagagaacatccgggaacagcagaagaaatgtttcaggagtttctcgctgacatctgtggagctccagatgctgacaaacagctgcgtcaagctacagaccgttcatagcatacccctcaccattaacaaggaagacgacgaatctcccggcctgtatggctttctgaatgtgatagtacattcagccactggttttaagcagtcctccaacttatattgcactctcgaggtagacagcttcggctactttgtaaataaggcaaaaacacgagtctatagagatacggctgaacccaattggaatgaagaattcgagattgaactggaagggagccaaacgttgcgtattctgtgttacgagaaatgctacaataaaactaagatccctaaggaggatggcgaaagtacagatcggttaatgggcaagggtcaggtgcaattagatccccaagccctgcaggacagggactggcagcggaccgttatagcaatgaatggcatcgaagtcaaactgtccgttaagttcaattcacgggagttctcactgaagaggatgccctctcgcaagcagactggagtgttcggcgtgaagatcgccgtggtgacaaagagagaacgttctaaggtcccctacattgttcgtcagtgcgttgaagaaattgagcggcgagggatggaggaggttgggatctaccgggtgagtggagtggccaccgatatacaagccctgaaggccgccttcgacgtcaacaataaggacgtttccgtcatgatgtccgaaatggacgttaacgccatcgcaggtaccttaaagctgtactttcgtgagctcccagaaccactcttcacagatgaattctatcccaatttcgctgagggaatcgccctctcagaccccgtcgccaaggaatcgtgcatgctgaatcttctactgtcactgcccgaggccaatttgctgactttcctgttccttctcgatcacctgaaacgggtggccgaaaaagaagccgtgaataaaatgagtctgcacaacctagccacagtttttggccccacactgctcagaccttccgaaaaagagtctaagttgccagcaaatccttctcagccaatcaccatgactgactcttggtcactggaagtgatgagccaagtacaggttctcctgtatttcctgcaactggaggccatccctgctccagattccaagcgtcaatccatactgttcagcaccgaggtctag

SEQ ID NO: 145125 - DNA, 3816 bp, Artificial Sequence
  derived and/or modified sequence
atggtggaccctgtgggctttgctgaggcctggaaggcccagttcccagacagcgagccccccaggatggagctgcggtctgtgggggacatcgagcaggagctggagcgctgcaaggccagcatccggcggctggagcaggaggtgaaccaggagcgcttcaggatgatctacctgcagaccctgctggccaaggagaagaagagctatgaccggcagcgctggggcttccggcgggccgcccaggccccagatggagccagcgagccccgggccagcgccagccggccccagcctgccccagcagatggagctgaccccccacctgctgaggagcctgaggcccggccagatggagagggcagccctgggaaggcccggcccggcacagcccggcggcctggagctgctgccagcggggagagagatgaccggggccccccagcctctgtggccgccctgcggagcaactttgagcgcatcagaaaaggacatggccagcccggggctgatgctgagaagcccttctacgtgaatgtggagttccaccacgagcggggcctggtgaaggtgaatgacaaggaggtgtctgaccgcatcagcagcctgggcagccaggccatgcagatggagaggaagaagagccagcacggggccggcagctctgtgggagatgccagcaggcctccctaccggggccgcagcagcgagagcagctgtggggtggatggagactatgaagatgctgagctgaacccccgcttcctgaaggacaacctgattgatgccaacggcggcagcaggcctccctggccacccctggagtaccagccctaccagagcatctacgtgggcggcatgatggagggggagggcaagggccccctgctgcggagccagagcaccagcgagcaggagaagaggctgacctggcccaggaggagctacagccccaggagctttgaggactgtggcggcggctacaccccagactgcagcagcaatgaaaacctgaccagcagcgaggaggacttcagcagcggccagagcagccgggtgagccccagccccaccacctacaggatgttccgggacaagagccgcagccccagccagaacagccagcagagctttgacagcagcagcccccccaccccccagtgccacaagaggcaccgccactgccctgtggtggtgtctgaggccaccatcgtgggcgtgaggaagacaggccagatctggcccaatgatggagagggcgccttccatggagatgctgatggcagctttggcaccccacctggctacggctgtgccgctgacagagctgaggagcagaggaggcaccaggacggcctgccctacattgatgacagccccagcagcagcccccacctgagcagcaagggccggggcagcagagatgccctggtgtctggggccctggagagcaccaaggccagcgagctggacctggagaagggcctggagatgaggaagtgggtgctgagcggcatcctggccagcgaggagacctacctgagccacctggaggccctgctgctgcccatgaagcccctgaaggccgccgccaccaccagccagcctgtgctgaccagccagcagatcgagaccatcttcttcaaggtgcctgagctgtatgagatccacaaggagttctatgatggcctcttcccccgggtgcagcagtggagccaccagcagagggtgggggacctcttccagaagctggccagccagctgggcgtgtaccgggcctttgtggacaactacggcgtggccatggagatggccgagaagtgctgccaggccaatgcccagtttgctgagatcagcgagaacctgcgggcccggagcaacaaggatgccaaggaccccaccaccaagaacagcctggagaccctgctgtacaagcctgtggacagagtgaccaggagcaccctggtgctgcatgacctgctgaagcacaccccagccagccacccagaccaccccctgctgcaggatgccctgcgcatcagccagaacttcctgagcagcatcaatgaggagatcaccccccggcggcagagcatgacagtgaagaagggggagcaccggcagctgctgaaggacagcttcatggtggagctggtggagggcgccaggaagctgcggcacgtgttcctgttcacagacctgctgctgtgcaccaagctgaagaagcagagcggcggcaagacccagcagtatgactgcaagtggtacatccccctgacagacctgtccttccagatggtggatgagctggaggccgtgcccaacatccccctggtgcctgatgaggagctggatgccctgaagatcaagatcagccagatcaagaatgacatccagcgggagaagagggccaacaagggcagcaaggccacagagcggctgaagaagaagctgtctgagcaggagagcctgctgctgctgatgagccccagcatggccttccgggtgcacagcagaaatggcaagagctacaccttcctgatcagcagtgactatgaaagagctgagtggagggagaacatccgggagcagcagaagaagtgcttccgctccttcagcctgacctctgtggagctgcagatgctgaccaacagctgtgtgaagctgcagacagtgcacagcatccccctgaccatcaacaaggaggatgatgagagccctggcctgtatggcttcctgaatgtcatcgtgcacagcgccaccggcttcaagcagagcagcaacctgtactgcaccctggaggtggacagctttggctactttgtgaacaaggccaagaccagggtgtacagagacacagctgagcccaactggaatgaggagtttgaaattgagctggagggcagccagaccctgcgcatcctgtgctatgagaagtgctacaacaagaccaagatccccaaggaggatggagagagcacagaccggctgatgggcaagggccaggtgcagctggacccccaggccctgcaggaccgggactggcagaggacagtcatcgccatgaatggaattgaggtgaagctgtctgtgaagttcaacagccgggagttcagcctgaagaggatgcccagcaggaagcagacaggagtgtttggagtgaagattgctgtggtgaccaagcgggagaggagcaaggtgccctacatcgtgcggcagtgtgtggaggagattgaaagaagaggcatggaggaggtgggcatctacagagtgtctggagtggccacagacatccaggccctgaaggccgcctttgatgtgaacaacaaggatgtgtctgtgatgatgtctgagatggatgtgaatgccatcgccggcaccctgaagctgtacttccgggagctgcctgagcccctcttcacagatgagttctaccccaactttgctgagggcatcgccctgagtgaccctgtggccaaggagagctgcatgctgaacctgctgctgagcctgcctgaggccaacctgctgaccttcctgttcctgctggaccacctgaagagggtggccgagaaggaggccgtgaacaagatgagcctgcacaacctggccaccgtgtttggccccaccctgctgcggcccagcgagaaggagagcaagctgcctgccaaccccagccagcccatcaccatgacagacagctggagcctggaggtgatgagccaggtgcaggtgctgctgtacttcctgcagctggaggccatcccagccccagacagcaagaggcagagcatcctcttcagcacagaggtgtag

SEQ ID NO: 145126 - DNA, 2811 bp, Artificial Sequence
  derived and/or modified sequence
cccagcgccccccgggtgtccacagtgggcctgctgtgcagcggggccggcccccacctgtgcccctgtgccgaggagggcaccggcggcctggagagccagggcgagatcatccccagccggggcagcaggaagccagatggagtgtctggcagcagaagactcttcagcagcctgtgcaagagccaggagggcagcaggaaagaatgtctgaggaagcaccggcggctgggccctgccatgcctgtgagcagccctggcttccctggccccctggcccggtctgagcaccacctggacacagctgccctgcagacaggccagaggagcagcgctggcaccaagatgggctgccccaccctgatgaccaggcctccccaccggcccaccagcgctgcccgggccggggccgccggcatgcgctggagccgggagccctggagccccctgaagaggtctgagctggacctggagaagggcctggagatgaggaagtgggtgctgagcggcatcctggccagcgaggagacctacctgagccacctggaggccctgctgctgcccatgaagcccctgaaggctgctgccaccaccagccagcctgtgctgaccagccagcagatcgagaccatcttcttcaaggtgcctgagctgtatgagatccacaaggagttctatgatggcctcttcccccgggtgcagcagtggagccaccagcagagggtgggggacctcttccagaagctggccagccagctgggcgtgtaccgggcctttgtggacaactatggagtggccatggagatggccgagaagtgctgccaggccaatgcccagtttgctgagatcagcgagaacctgcgggcccggagcaacaaggatgccaaggaccccaccaccaagaacagcctggagaccctgctgtacaagcctgtggacagagtgaccaggagcaccctggtgctgcatgacctgctgaagcacaccccagccagccacccagaccaccccctgctgcaggatgccctgcgcatcagccagaacttcctgagcagcatcaatgaggagatcaccccccggcggcagagcatgacagtgaagaagggggagcaccggcagctgctgaaggacagcttcatggtggagctggtggagggcgccaggaagctgcggcacgtgttcctgttcacagacctgctgctgtgcaccaagctgaagaagcagagcggcggcaagacccagcagtatgactgcaagtggtacatccccctgacagacctgtccttccagatggtggatgagctggaggccgtgcccaacatccccctggtgcctgatgaggagctggatgccctgaagatcaagatcagccagatcaagaatgacatccagcgggagaagagggccaacaagggcagcaaggccacagagcggctgaagaagaagctgtctgagcaggagagcctgctgctgctgatgagccccagcatggccttccgggtgcacagcagaaatggcaagagctacaccttcctgatcagcagtgactatgagcgggcagagtggagggagaacatccgggagcagcagaagaagtgcttccgctccttcagcctgacctctgtggagctgcagatgctgaccaacagctgtgtgaagctgcagacagtgcacagcatccccctgaccatcaacaaggaggatgatgagagccctggcctgtatggcttcctgaatgtgattgtgcacagcgccaccggcttcaagcagagcagcaacctgtactgcaccctggaggtggacagctttggctactttgtgaacaaggccaagaccagggtgtacagagacacagctgagcccaactggaatgaggagtttgaaattgagctggagggcagccagaccctgcgcatcctgtgctatgagaagtgctacaacaagaccaagatccccaaggaggatggagagagcacagaccggctgatgggcaagggccaggtgcagctggacccccaggccctgcaggaccgggactggcagaggacagtgattgccatgaatggcatcgaggtgaagctgtctgtgaagttcaacagccgggagttcagcctgaagaggatgcccagcaggaagcagacaggagtgtttggagtgaagattgctgtggtgaccaagcgggagaggagcaaggtgccctacatcgtgcggcagtgtgtggaggagattgaaagaagaggcatggaggaggtgggcatctacagagtgtctggagtggccacagacatccaggccctgaaggccgcctttgatgtgaacaacaaggatgtgtctgtgatgatgtctgagatggatgtgaatgccatcgccggcaccctgaagctgtacttccgggagctgcctgagcccctcttcacagatgagttctaccccaactttgctgagggcatcgccctgagtgaccctgtggccaaggagagctgcatgctgaacctgctgctgagcctgcctgaggccaacctgctgaccttcctgttcctgctggaccacctgaagagggtggccgagaaggaggccgtgaacaagatgagcctgcacaacctggccaccgtgtttggccccaccctgctgcggcccagcgagaaggagagcaagctgcctgccaaccccagccagcccatcaccatgacagacagctggagcctggaggtgatgagccaggtgcaggtgctgctgtacttcctgcagctggaggccatcccagccccagacagcaagaggcagagcatcctcttcagcacagaggtgtag

SEQ ID NO: 145127 - DNA, 3816 bp, Artificial Sequence
  derived and/or modified sequence
atggtggaccccgtgggcttcgccgaggcctggaaggcccagttcccagatagcgaacccccacgcatggagcttagatctgtaggcgacattgagcaggaactagagcggtgtaaagcctccattaggcggctcgaacaagaagtgaaccaggagcgctttcgcatgatttacctgcaaacgcttctggccaaggaaaagaaatcttatgaccggcagcgctggggattcaggcgagctgcccaggcccccgacggtgcttccgaaccacgagcatctgccagccgtcctcagccggcaccagcagatggcgctgatccaccccccgccgaggaacctgaagctcggcctgacggcgaaggatccccaggaaaggccaggccgggaactgcacgaaggccaggcgctgccgcgtctggtgagcgggatgatcgcggtccacccgcaagtgtggcagcgcttagaagtaattttgagcgaatcaggaaaggccacgggcagcccggcgcggatgcagaaaagccattctacgtaaatgtcgagtttcaccacgagagaggacttgtaaaggtgaacgacaaagaagtgagcgacagaatcagctcccttggaagccaggccatgcagatggagcgaaaaaaatcacaacatggggcgggttcatcagtgggggacgctagtaggccaccctataggggccggtcttctgaatcatcatgtggcgtggatggcgactatgaagacgctgagctaaaccctcgatttcttaaagacaatctgattgacgctaatggcgggtcaaggccgccatggccacccctggagtaccaaccttatcaaagcatttacgttgggggaatgatggagggtgaagggaaggggcctttgctacggtcccagtcaacctcagagcaggagaaaaggctgacgtggcctaggcgctcgtacagccccagatccttcgaagactgcggtggaggttatactccagactgctcgagtaatgagaatctgactagttctgaggaggactttagctccgggcagtcgagtagagtatcaccaagtcccaccacttaccgaatgttcagggacaaaagccggtcgcctagccagaacagtcagcaaagtttcgattcttcttcacccccaacgccacagtgtcacaagagacatcgccactgtccagtagtcgtatcagaagccacaattgtgggcgtcaggaagacaggccagatctggcccaatgatggagaaggagccttccacggggatgcggacggctcatttggcacccctccagggtacggctgtgccgcagacagagcggaagaacaacgtagacaccaggatggcttgccctatattgatgactcccccagttcatcccctcatctgtcttctaaaggtagaggttcacgtgacgccctagtgtcgggagccctagagtcaacgaaggcatccgaattggatctagaaaagggactcgaaatgaggaaatgggttttatccggaatcctcgctagtgaagagacctatctctcccacctggaggccctgttacttcctatgaaaccactgaaagctgccgcaaccacttcccagccagtgctcacttcacagcaaattgagacaatctttttcaaggtaccagagctgtatgaaattcacaaagagttttacgatggcctgttcccaagagttcagcagtggtcacatcagcagagagtcggcgatcttttccagaagttggccagtcagttaggcgtatatcgcgcgtttgtggacaattacggagtcgcaatggaaatggccgagaagtgttgccaggccaacgctcagtttgcagaaatatcagagaatttacgagcacggtctaataaagatgctaaggacccaacgacaaaaaattcactcgagacattgctttataaaccggtggatagagtaactcgctccactcttgtcttgcatgacctcttaaagcatacaccagcttctcacccagatcaccccctgttgcaagacgctctgcgtattagtcagaattttttgtcctcaatcaacgaagagattacgcctaggcgtcagtctatgaccgtcaaaaaaggtgaacaccgtcaactgctgaaagacagcttcatggtggagctcgtggaaggcgcgaggaaactccgacacgtgtttttgtttactgacctcttgctgtgcaccaagcttaagaaacaatcaggcggaaagacccaacagtacgactgtaagtggtacataccactgacggatttatcttttcaaatggtggatgaactggaagcggtgcctaacatccctttagtacctgacgaggaactggatgctctgaagatcaaaatctcacaaatcaaaaatgatattcagcgcgagaaacgggctaataagggatccaaagctaccgagagattaaaaaaaaagttatctgagcaggagtccctcctcctgctgatgtccccatccatggcatttcgagtccattcacggaacggtaagtcgtatacattccttatttcaagtgactatgaacgcgctgagtggcgagagaatattcgtgaacaacagaaaaagtgctttcgtagcttttcactcacctctgtcgagttacagatgttaaccaatagttgcgtgaaactgcaaacggtgcatagcatacccctgaccatcaacaaagaagacgacgagagcccgggcctgtatggatttttgaacgttattgtccacagcgccactgggtttaaacagtccagcaatctttactgtaccctggaagttgatagttttgggtatttcgtaaataaagctaagaccagagtgtacagggataccgccgagcccaactggaacgaagagttcgaaatcgagctcgagggctcccaaacgctgagaatcctttgttatgaaaaatgctataacaagactaaaatcccgaaagaagatggggaatcgaccgatagactgatgggaaaggggcaggtccaacttgatcctcaggccctgcaggaccgagattggcagcgcactgttattgctatgaatgggatagaggtgaagctgtctgtgaaatttaattcgagggagttcagtttaaagagaatgcccagcagaaagcaaacaggagtcttcggtgtgaagatcgcggttgtgactaagcgcgaacgcagtaaagtgccctacatcgtacgtcaatgtgtcgaagaaatcgagagacgcggtatggaggaagtcggaatctatagagtgtcaggggtggcgaccgatatacaggcactcaaagccgcatttgacgttaacaataaggacgtgtctgtgatgatgtccgagatggacgtgaacgctatagcaggtactctcaaactctactttcgagagttgccagaacctctgttcaccgatgagttttacccaaactttgcagaaggtattgctctgagcgaccccgtcgcaaaagaatcctgtatgctgaatttgctgctcagtctgccggaggcaaatctcctcaccttcctctttctgctggaccatctgaagagggtggctgaaaaggaggccgtcaacaagatgtctttgcacaatctggccacagtctttggccccacattgctgaggccttccgagaaggagagcaagcttcccgccaatccgtcgcagccgatcactatgacagactcttggagtctcgaggtcatgagtcaagtccaggtcctgctgtatttcctccagttggaggccattccggctcccgactccaagcgccagtcaattctgtttagcactgaagtttag

SEQ ID NO: 145128 - DNA, 2811 bp, Artificial Sequence
  derived and/or modified sequence
cccagcgccccccgggtgagcaccgtgggcctgctgtgcagcggcgcggggccgcatctctgcccgtgcgcagaagagggaacagggggactggagtctcagggcgagatcatcccctctcgcggcagcaggaaacccgatggcgtctctggttccagaaggctgttctccagcctgtgcaaatcccaggaaggtagtaggaaggaatgcctgcggaaacatcggcgccttggccccgctatgcccgtttccagtccagggttccccggaccgttggcccgcagcgagcaccatctagacaccgccgccttgcagaccggtcagcgctcctctgctggcaccaagatgggctgtcctaccctcatgacccggccgcctcatcgccctacctccgcagctcgtgccggtgctgcgggaatgaggtggagcagggaaccctggagccccctgaaacggtccgaactggacctggaaaaaggcctcgagatgcggaaatgggtgttgtctggcattttagcctcggaggagacttacttgtctcatctggaagccctattattgccgatgaaaccactcaaggccgctgctacaaccagccagcccgttctgacttcccagcagatcgagacaatcttttttaaagtgcccgaactgtacgagatccacaaggagttttatgacggcttgtttccacgggttcagcagtggtcacaccaacagagagtgggggacctgtttcaaaagctggcgagtcagctgggggtttatcgagcttttgttgacaattacggcgtagccatggaaatggctgaaaaatgttgccaggccaacgcgcagttcgcagaaatctctgagaatctcagagcacgcagcaataaagacgcaaaagacccaacaaccaaaaacagtctggagacgttgctctataaacccgtagatcgtgtgacccgttccaccctggtgcttcacgatctcctgaagcacacacccgcttcccaccctgatcaccccttactgcaggacgctctgcggatatcccagaacttcctttcttcgattaacgaggagataactccacgccggcagtccatgaccgtaaagaagggtgagcaccgacagttactgaaagactccttcatggtggagctcgtcgagggcgcacgcaaactgaggcacgtcttcctgttcactgacctgctcttatgcaccaaactaaagaaacagagtggtggaaaaactcagcagtatgactgtaaatggtatattccactgacagacttgagttttcaaatggtggacgaactcgaggccgtccccaacattcctctagtcccagacgaggagctcgacgcgctcaagattaaaatctctcagatcaagaatgacattcagcgcgagaaacgggcaaacaagggcagtaaggccactgagagacttaaaaagaagctgagtgaacaggaaagcttgctacttttgatgtccccctctatggctttcagggtgcactctagaaatgggaaaagttataccttcttgatcagcagtgactatgaacgtgcagagtggcgggaaaacatccgcgaacaacagaaaaagtgtttccgatccttcagcctcacctctgtggagctccagatgttgacaaatagctgtgtcaagttacaaacggtgcatagcataccgctgaccatcaataaagaagacgatgagtctcccgggctgtacggcttcctgaacgtaatcgtgcacagtgctactggcttcaaacagagtagcaatctttactgtaccctggaagtggacagctttggctactttgtaaacaaggccaagactagggtgtacagagacactgccgaaccaaattggaatgaggagttcgagatcgaacttgaaggcagccagaccctacggatcctctgctatgagaaatgttacaataaaaccaagatcccaaaggaagacggtgagagcacagataggctcatggggaagggacaggttcagttggatcctcaagccctccaagaccgcgattggcaaaggaccgtcatcgcgatgaatgggattgaggtcaaactgagcgtaaaattcaactcccgggaattctcattgaagcgcatgccgtcgcggaagcagacaggagtctttggagtgaaaatcgccgtggtcactaagcgagagaggagcaaggtgccctacatcgtgcgccagtgcgtcgaggaaattgagcgccggggaatggaggaggtgggtatatacagagtgtcaggggtggctaccgatatacaagctcttaaggccgcgtttgacgtgaataataaggacgtttctgtgatgatgtccgaaatggacgttaacgctatcgcaggcacactaaaattgtatttcagggaattgccagaacccctgttcaccgacgagttctaccccaatttcgccgagggcattgcactgtctgaccccgtcgccaaggaatcctgtatgctgaacctgctcctcagtttgcctgaggctaatctgctaacattcctgtttctgctggaccatctgaagcgagtggccgagaaagaggccgtaaacaaaatgtcactgcacaacctggcaactgtcttcggtcccacgctactacgtccgtcagagaaggagtctaaactgcccgcaaatccttcacagccgatcaccatgacagacagttggagtcttgaagtgatgtcacaagtgcaagtcctgctctacttcctacagctcgaggccatccctgctcccgatagcaaacgacagtccatacttttctccactgaagtgtag

SEQ ID NO: 145129 - DNA, 3816 bp, Artificial Sequence
  derived and/or modified sequence
atggtcgatcccgtggggtttgccgaagcatggaaagcacagtttccggacagcgagcccccacggatggagctgagatccgtcggggatatcgagcaagagcttgagcgctgcaaagcctccatcagacgactggaacaggaggtgaatcaagagcgattccggatgatctacttgcaaactttattggcaaaagagaaaaagtcctatgacaggcagcggtggggcttcagacgcgctgctcaagcacccgatggagcttctgagcccagagcctcagcttcgcgcccacagccagctccagccgatggagcagatccccctcctgccgaggagccggaggcccgtccagacggcgagggcagccccggtaaggccaggccgggaacagctcggcgacccggtgctgccgctagcggagaacgcgatgatagagggcctcccgcttcagttgccgctctaaggagtaattttgaaagaatcaggaaagggcacgggcagcctggggctgacgcagaaaagcccttctacgtgaacgtggagttccatcatgagcgcggactcgtcaaggtcaatgacaaggaggtctcggatcggatctcctctctcggctctcaggccatgcaaatggagcggaaaaaaagccaacatggcgctggatccagcgtcggcgacgcctcccgccctccatacagagggaggagctccgagtcttcatgtggggtggatggagactacgaagatgccgagctgaacccacgctttctgaaggacaatctgattgatgccaacgggggatctcggcctccttggcctcctcttgagtaccaaccctatcagagcatctatgttggcggaatgatggaaggggagggcaaggggcctctactacgctcccagagtaccagtgagcaggaaaaacgtctgacctggcctaggcgctcctatagccccaggtctttcgaggattgtggcggaggctacacgcccgactgcagttctaatgagaacctgaccagcagtgaagaggactttagttctggccagtctagtagagtgagtcccagccctacaacctaccgtatgttccgggataaaagccgtagtcccagccagaattcacagcagagcttcgactcatcctccccacctactccccagtgccacaaacgccacagacactgtcctgtggtagtctctgaggctacgattgtcggggtcaggaagacaggtcagatatggccaaacgacggtgaaggagcattccacggcgatgcagatgggtctttcgggacacctcccggttatggctgtgccgctgaccgagccgaagagcagaggcgccatcaggatggtttaccctatatcgatgactccccctccagctccccacacctctctagcaagggacggggatccagagatgcactcgtgagcggtgcccttgagtccaccaaggcctccgaactggatctggaaaaaggacttgaaatgcggaaatgggtattatcaggcatcctggcctccgaagagacctacctgagtcatcttgaggctcttctgttgcccatgaagcccctgaaagcggcagccacaacaagtcagccggtgctgacttcccaacagatcgagaccattttctttaaggtgcctgaactgtacgaaatccacaaggaattttacgatgggcttttcccaagggtccagcagtggagccaccaacagcgcgtgggagatctgttccagaagcttgccagtcagctcggagtataccgagccttcgtggataattacggcgtcgctatggagatggcagaaaagtgttgtcaagccaacgcgcagtttgcggagatttcggaaaatctgagggcacgcagcaataaggacgccaaagaccctacaacgaagaactctcttgagaccttgctgtacaagccggttgatagagtgacaagatctacactcgtccttcacgatcttctgaagcacacgcccgcatcccatcctgatcatccacttcttcaggacgccctgaggatcagccagaatttcctctcttccatcaacgaagaaataacacctagacggcagtctatgacagtaaaaaaaggtgaacaccggcagttactgaaggatagtttcatggttgaactggtagaaggtgccagaaaactgaggcacgtattcttatttaccgacttgttgttgtgtacaaaactgaaaaagcagtccgggggtaaaacacagcagtacgattgtaagtggtacatcccactaacggacctgagctttcagatggtagacgagctggaggccgtacctaatatccccctagtccccgacgaggaactcgatgctctgaaaatcaaaatatctcaaattaagaatgacatacagcgggagaaacgagccaacaaagggtccaaggcgacggaaagactgaagaagaagctgagtgagcaagagagtctactcctgctgatgtctccgtcgatggcgtttcgagtgcactcacgcaacggaaaaagttatacctttctgatctcctccgattacgagagggccgagtggagggagaatatcagagagcagcagaaaaagtgtttccggtcctttagtctgaccagcgtggagttgcaaatgttaaccaattcttgcgtgaagctccaaaccgtccattcaattccactgaccatcaataaggaagatgatgagagtcctggcttgtatggatttctgaacgtgatcgtgcatagcgcgacaggctttaagcagagctccaacttatactgtaccctggaggttgattcatttggatatttcgttaataaggcaaagacaagggtgtaccgggacacagctgagcctaattggaatgaagaatttgagatcgaactggagggcagccagaccctccgaattctctgttatgagaagtgctacaacaaaaccaaaatacccaaggaggacggtgagagcacggatcgtctgatgggcaagggccaggtgcagctggacccccaggcactccaggatcgcgactggcagagaaccgtgatcgcaatgaatggaattgaagtcaagctgagcgtgaagtttaactcccgggaattctcactcaaaaggatgccgtctagaaagcagaccggcgtgttcggggtaaagatagccgttgtcaccaagagggaaagatccaaggtgccatatatcgtcagacagtgcgtggaggagatcgaaaggcggggtatggaggaagttggaatctatagagtgtcgggcgtggccacagatatccaggccctgaaagccgcttttgacgtgaacaacaaggacgtaagcgttatgatgagtgagatggacgttaacgcaatcgccggaaccttaaagctgtacttcagagagttgccagagcctcttttcacagacgagttctacccaaattttgcagagggcatagcacttagcgaccctgtggctaaggaaagttgtatgcttaacctcttattgagcctaccagaggctaatcttctgacattcttgttccttctcgatcatttaaaaagagtggccgagaaagaggctgtgaacaaaatgtccctgcacaacttagcgactgtgttcggccctacactcctgaggcccagtgaaaaggagagcaagttgcccgctaatccttctcagccaatcaccatgaccgactcgtggagtctggaagttatgtcccaggtgcaagtgctgctgtacttcctacagctggaggccatcccagctccagacagcaagagacagagtattctgttttccaccgaggtctag

SEQ ID NO: 145130 - DNA, 2811 bp, Artificial Sequence
  derived and/or modified sequence
ccatctgcccctagagtgtccacagtgggcctgctgtgttctggagccggacctcacttatgcccttgcgctgaagagggaactggaggactggaatcccagggtgagatcattccctctcgcggaagccgcaagccagacggcgtctccggctcccgcagactgttctctagtttgtgcaagtctcaggagggaagccgaaaagaatgtctacggaaacatcggcgattaggacccgctatgccagtgtcctcccctggtttccccggtcctctggcaaggtcagaacatcacttggacaccgctgcactacagacaggacagcggtctagcgctggaactaagatgggttgtcccacactgatgactaggccgcctcacaggcccacaagcgcagcacgcgctggggctgcagggatgcgctggtcaagagagccctggtcccctctgaagagatctgaactggatctcgaaaagggcctcgaaatgcggaagtgggtcctgtcaggaattctggcaagtgaggagacatatctttctcaccttgaggccctcctgttgcccatgaagccactgaaagccgcagctacaacgagtcagccagtcctcacaagtcagcagatcgaaacaatattctttaaagtaccagaattgtatgagattcataaggagttttatgacgggttatttcccagagtacagcagtggtcacatcagcagagggtgggtgatctatttcagaagctcgcctcccagctgggggtctacagggcatttgtcgataattatggtgtggcgatggaaatggccgaaaaatgctgccaggccaacgcacagttcgccgagatctccgagaacctgagagccaggtccaataaggatgccaaggatcctacgaccaagaacagtcttgagacactgctgtacaagccggtggatcgcgtgacccggtccacacttgtgctgcacgaccttctcaaacatactcccgcttctcaccccgatcaccccctactgcaggacgcattgcggatatcccagaactttctcagctctataaatgaggagatcacccctcgacggcagagcatgaccgtgaagaaaggcgaacataggcagctactaaaagacagtttcatggtggaactcgtggaaggggcaagaaagttgaggcatgtttttttattcaccgacctcctactctgtacgaaactgaagaagcagagtggaggcaaaacccagcagtacgactgcaaatggtacatccctctgacagacttgtcatttcagatggtggacgagctggaggccgttcccaacatccctctggtcccagacgaggaactcgacgccctcaagatcaaaattagtcagatcaaaaacgatattcaaagagagaagcgcgctaataaggggtctaaggccacagagagactgaaaaaaaagctgtcagaacaagaatctttgctactgttaatgagcccgagtatggcgtttagagttcactcacggaacggcaaatcctatacatttctcatctccagtgattatgaaagggccgagtggcgcgaaaatattcgcgagcagcagaagaaatgtttcaggtcctttagcctcacctcggtagaactccagatgttgactaatagctgtgtgaaactgcaaacagtgcattccatccccctaacgatcaataaggaggacgacgagtccccgggtctttacggatttctgaatgttattgttcatagcgctaccggctttaaacagtcatcaaacctgtattgtaccctcgaagtggactcttttggttacttcgtgaataaagcaaagacccgggtgtatcgcgatacagctgagccaaattggaatgaagaatttgagatagaactcgaaggttcccaaacgctccgcattttatgctatgaaaaatgctataataaaacaaagattcccaaagaagacggagagtccacagatcgactcatgggcaaaggccaggtgcagctggatccccaagcgctgcaggaccgagactggcaacgtacagtgattgccatgaatggcatcgaggtaaaattgtccgtcaaatttaattctagggagttcagcttgaagagaatgcccagcagaaaacagaccggcgtgtttggcgtgaaaatcgctgtggtcactaaacgagagagatctaaagtgccatatatcgtgcgccagtgcgtggaggaaattgagcgaagaggcatggaagaagttggcatatatagggtgagtggagtggctacagacattcaggcgctgaaggctgcattcgatgtgaacaataaggacgtctctgtgatgatgtcagaaatggatgtgaacgcaatcgctggaactttgaaactatattttcgagagcttcctgagccactcttcaccgacgagttttaccccaacttcgccgagggaattgcgttgagcgatccagtggctaaagaaagctgtatgttgaatctgctcctaagcctcccagaagcgaacctgcttacgtttctgttccttctggaccacctgaaaagggtcgccgagaaggaagctgtaaataaaatgtctctccataacttagcgacagtctttggaccgacactgctgaggccttctgaaaaggagtcaaagttgccagctaacccaagccagcccatcacaatgaccgactcctggtccctcgaagtcatgtcacaagtgcaggtgttactctacttccttcagctggaggctattcccgcacctgactccaagcgccagagcatcctcttctctacagaggtctag

SEQ ID NO: 145131 - DNA, 7082 bp, Artificial Sequence
  derived and/or modified sequence
ttccaggactgcagaactggcccagacctctgtattggaaaggtctttatggaccagggagtccggtgtcttttttacgggggacccctgggctgcgagttgcacagtccaattcgctgttgttagggcctcagtttcccaaaaggcacagggacggggggagggtggcggctcgatgggggagccgcctccagggggcccccccgccctgtgcccacggcgcggcccctttaagaggcccgcctggctccgtcatccgcgccgcggccacctccccccggccctccccttcctgcggcgcagagtgcgggccgggcgggagtgcggcgagagccggctggctgagcttagcgtccgaggaggcggcggcggcggcggcggcacggcggcggcggggctgtggggcggtgcggaagcgagaggcgaggagcgcgcgggccgtggccagagtctggcggcggcctggcggagcggagagcagcgcccgcgcctcgccgtgcggaggagccccgcacacaatagcggcgcgcgcagcccgcgcccttccccccggcgcgccccgccccgcgcgccgagcgccccgctccgcctcacctgccaccagggagtgggcgggcattgttcgccgccgccgccgccgcgcgggccatgggggccgcccggcgcccggggccgggctggcgaggcgccgcgccgccgctgagacgggccccgcgcgcagcccggcggcgcaggtaaggccggccgcgccatggtggacccggtgggcttcgcggaggcgtggaaggcgcagttcccggactcagagcccccgcgcatggagctgcgctcagtgggcgacatcgagcaggagctggagcgctgcaaggcctccattcggcgcctggagcaggaggtgaaccaggagcgcttccgcatgatctacctgcagacgttgctggccaaggaaaagaagagctatgaccggcagcgatggggcttccggcgcgcggcgcaggcccccgacggcgcctccgagccccgagcgtccgcgtcgcgcccgcagccagcgcccgccgacggagccgacccgccgcccgccgaggagcccgaggcccggcccgacggcgagggttctccgggtaaggccaggcccgggaccgcccgcaggcccggggcagccgcgtcgggggaacgggacgaccggggaccccccgccagcgtggcggcgctcaggtccaacttcgagcggatccgcaagggccatggccagcccggggcggacgccgagaagcccttctacgtgaacgtcgagtttcaccacgagcgcggcctggtgaaggtcaacgacaaagaggtgtcggaccgcatcagctccctgggcagccaggccatgcagatggagcgcaaaaagtcccagcacggcgcgggctcgagcgtgggggatgcatccaggcccccttaccggggacgctcctcggagagcagctgcggcgtcgacggcgactacgaggacgccgagttgaacccccgcttcctgaaggacaacctgatcgacgccaatggcggtagcaggcccccttggccgcccctggagtaccagccctaccagagcatctacgtcgggggcatgatggaaggggagggcaagggcccgctcctgcgcagccagagcacctctgagcaggagaagcgccttacctggccccgcaggtcctactccccccggagttttgaggattgcggaggcggctataccccggactgcagctccaatgagaacctcacctccagcgaggaggacttctcctctggccagtccagccgcgtgtccccaagccccaccacctaccgcatgttccgggacaaaagccgctctccctcgcagaactcgcaacagtccttcgacagcagcagtccccccacgccgcagtgccataagcggcaccggcactgcccggttgtcgtgtccgaggccaccatcgtgggcgtccgcaagaccgggcagatctggcccaacgatggcgagggcgccttccatggagacgcagatggctcgttcggaacaccacctggatacggctgcgctgcagaccgggcagaggagcagcgccggcaccaagatgggctgccctacattgatgactcgccctcctcatcgccccacctcagcagcaagggcaggggcagccgggatgcgctggtctcgggagccctggagtccactaaagcgagtgagctggacttggaaaagggcttggagatgagaaaatgggtcctgtcgggaatcctggctagcgaggagacttacctgagccacctggaggcactgctgctgcccatgaagcctttgaaagccgctgccaccacctctcagccggtgctgacgagtcagcagatcgagaccatcttcttcaaagtgcctgagctctacgagatccacaaggagttctatgatgggctcttcccccgcgtgcagcagtggagccaccagcagcgggtgggcgacctcttccagaagctggccagccagctgggtgtgtaccgggccttcgtggacaactacggagttgccatggaaatggctgagaagtgctgtcaggccaatgctcagtttgcagaaatctccgagaacctgagagccagaagcaacaaagatgccaaggatccaacgaccaagaactctctggaaactctgctctacaagcctgtggaccgtgtgacgaggagcacgctggtcctccatgacttgctgaagcacactcctgccagccaccctgaccaccccttgctgcaggacgccctccgcatctcacagaacttcctgtccagcatcaatgaggagatcacaccccgacggcagtccatgacggtgaagaagggagagcaccggcagctgctgaaggacagcttcatggtggagctggtggagggggcccgcaagctgcgccacgtcttcctgttcaccgacctgcttctctgcaccaagctcaagaagcagagcggaggcaaaacgcagcagtatgactgcaaatggtacattccgctcacggatctcagcttccagatggtggatgaactggaggcagtgcccaacatccccctggtgcccgatgaggagctggacgctttgaagatcaagatctcccagatcaagaatgacatccagagagagaagagggcgaacaagggcagcaaggctacggagaggctgaagaagaagctgtcggagcaggagtcactgctgctgcttatgtctcccagcatggccttcagggtgcacagccgcaacggcaagagttacacgttcctgatctcctctgactatgagcgtgcagagtggagggagaacatccgggagcagcagaagaagtgtttcagaagcttctccctgacatccgtggagctgcagatgctgaccaactcgtgtgtgaaactccagactgtccacagcattccgctgaccatcaataaggaagatgatgagtctccggggctctatgggtttctgaatgtcatcgtccactcagccactggatttaagcagagttcaaatctgtactgcaccctggaggtggattcctttgggtattttgtgaataaagcaaagacgcgcgtctacagggacacagctgagccaaactggaacgaggaatttgagatagagctggagggctcccagaccctgaggatactgtgctatgaaaagtgttacaacaagacgaagatccccaaggaggacggcgagagcacggacagactcatggggaagggccaggtccagctggacccgcaggccctgcaggacagagactggcagcgcaccgtcatcgccatgaatgggatcgaagtaaagctctcggtcaagttcaacagcagggagttcagcttgaagaggatgccgtcccgaaaacagacaggggtcttcggagtcaagattgctgtggtcaccaagagagagaggtccaaggtgccctacatcgtgcgccagtgcgtggaggagatcgagcgccgaggcatggaggaggtgggcatctaccgcgtgtccggtgtggccacggacatccaggcactgaaggcagccttcgacgtcaataacaaggacgtgtcggtgatgatgagcgagatggacgtgaacgccatcgcaggcacgctgaagctgtacttccgtgagctgcccgagcccctcttcactgacgagttctaccccaacttcgcagagggcatcgctctttcagacccggttgcaaaggagagctgcatgctcaacctgctgctgtccctgccggaggccaacctgctcaccttccttttccttctggaccacctgaaaagggtggcagagaaggaggcagtcaataagatgtccctgcacaacctcgccacggtctttggccccacgctgctccggccctccgagaaggagagcaagctccctgccaaccccagccagcctatcaccatgactgacagctggtccttggaggtcatgtcccaggtccaggtgctgctgtacttcctgcagctggaggccatccctgccccggacagcaagagacagagcatcctgttctccaccgaagtctaaaggtcccagtccatctcctggaggcggacagatggcctggaaacctctggctaatcgggccatccgtagagcgggaaccttcctgaggtgtccttgggccacccccaagtgttgggccatctgccaagagacagcgacccaaagccgaaggacaggtggcctggaaagatcccgcccaggtctgggagccccaggctggcctcagactgtggttttttatgtggccacctgagggcgccccaagccagttcatctcggagtccaggcctggccctgggagacagggtgaagggagtggtttttatgaacttaacttagagtctaaaagatttctactggatcacttgtcaagatgcgccctctctggggagaagggaacgtgactggattccctcactgttgtatcttgaataaacgctgctgcttcatcctgtgggggccgtggccctgtccctgtgtgggtggggcctcttccatttccctgacttagaaaccacactccacttctaacagggtttgagaggcttagtcagcactgggtagcgttttgactccattcttggctttctttttctttccagaaggatttttgtgcagaaatgggtcttttgttgccatgttagtcctccttggaaggcagctcagaaggcctgtgaaatgtcaggggacaggacccccagggagggaaccccaggctacgcactttagggttcgttctccagggagagcgacctcgtcccccgatcctgaccgcccttccggcccacgctctcctgtttggcttccacaggcctggacttctctggcttctctgcccacacactccctgcccccagtgtccctgcccctgccccagcacaggtgacttcatttctgtcctctcagctcagtggactcgctcaacttttgtataagtctccacttggtggcagcagcttgctgatgacttgttttaaaactttcatcctaaataaccttttgatacttgaatatttgtaagttttatacatagtttctaatttttttccgaacagatccagatacctaataagatgctggaatgtaatccctggacaatccgtgtcctggcagcatttggtcttcctctaagcgcctggctccgctgttctcaggagtgggttctgaagtctctggagaacaggatacgtggagggttaggaaggggccaggcctagagacgggagactccctcccggagcaggtggaggcacaggaccattcgctaccccatctgccgacacctgcgggggagcccaggcattctttgtaaaccctcctgaccacctggctcaaagaaaacagaagcatggagaccgccaagtattttcaagaaataaccccatgaatattccatcacttttttagaaagaggggcttggggcaggcagaggagagaagggagagcaaactgagagccaagtttccacacggtcctgcaggaggagaggatgcagctgcccagagggaagcaggatcacatttaaggaagtgtgtggggtccctggatgacaccagcacccagtgcggctctgtctggcacccgctcccaaggtgggaggagtgggtgtcccctgtgtgtcagtgggcagctcctgctgaacccgcagctcactagggagcctgacagtggggccatgcgcctgacactcctctctgcttgtggacctggcaaggcagggagcagaaaacagccacttgaaggctttctgtctgcgtctgtgtgcagtgtggatttagttgtgcttttttcttgctgggagagcacagccaccatttacaagcagtgtcaccgtcgtgggtggcgaggacagaacaggagcctctgctctctgtacctatctgggcccggtgggctcccttgtcctggcttccatctctgtctcagcgaccattcagccctgcgcaggaacacgtgttgcttagaaaagccaaatccagccttgtctctgcctcctctggtctcatgatgtgcatctgttaccttgaaactggaaaccagtctatcaatgtctgtgccaattttttattccctccccaacctccttccccatacgactttttatttatgtaggatgtgtgctgtctaatgatgggatgaccacacttttccatgttctaaaagtgctcctctcccgcagggtcccagggctggtggttgctttgggtctacagctacgtcttacccacctcctgcctcaacagcctgtgtggtggcaaagccggtgtggggctggggaacgcagcgttctccaggagggggacctggctctccttctgcaatgcaggcgaaggcctagatgccagtgtgacctcccacaaggcgtggcttccagactccccggccggaagtgatgcttttttgccttgggccctgggtttgaagcagcctggctttctcttggtaagtggctggtgtcttagcagctgcaatctgagctcagccacctacacaccaccgtggccgacactttcattaaaaagtttcctgagacga

SEQ ID NO: 145132 - DNA, 2951 bp, Artificial Sequence
  derived and/or modified sequence
ccgagtgctccccgagtgtccaccgtcggcctgctctgttccggggcagggccacatctttgtccgtgtgccgaggaggggactggtgggctggagtcccagggggagattattccaagtaggggctccagaaagccagatggtgtgagtggctccagaagactcttctcttctctgtgcaagagccaggaaggctctagaaaggaatgtctgaggaagcatcggagactgggtcccgccatgcctgtgtcatctcctggcttccccggccctttggctcgttcggaacaccacctggatacggctgcgctgcagaccgggcagaggagcagcgccggcaccaagatgggctgccctacattgatgactcgccctcctcatcgccccacctcagcagcaagggcaggggcagccgggatgcgctggtctcgggagccctggagtccactaaagcggagtgagctggacttggaaaagggcttggagatgagaaaatgggtcctgtcgggaatcctggctagcgaggagacttacctgagccacctggaggcactgctgctgcccatgaagcctttgaaagccgctgccaccacctctcagccggtgctgacgagtcagcagatcgagaccatcttcttcaaagtgcctgagctctacgagatccacaaggagttctatgatgggctcttcccccgcgtgcagcagtggagccaccagcagcgggtgggcgacctcttccagaagctggccagccagctgggtgtgtaccgggccttcgtggacaactacggagttgccatggaaatggctgagaagtgctgtcaggccaatgctcagtttgcagaaatctccgagaacctgagagccagaagcaacaaagatgccaaggatccaacgaccaagaactctctggaaactctgctctacaagcctgtggaccgtgtgacgaggagcacgctggtcctccatgacttgctgaagcacactcctgccagccaccctgaccaccccttgctgcaggacgccctccgcatctcacagaacttcctgtccagcatcaatgaggagatcacaccccgacggcagtccatgacggtgaagaagggagagcaccggcagctgctgaaggacagcttcatggtggagctggtggagggggcccgcaagctgcgccacgtcttcctgttcaccgacctgcttctctgcaccaagctcaagaagcagagcggaggcaaaacgcagcagtatgactgcaaatggtacattccgctcacggatctcagcttccagatggtggatgaactggaggcagtgcccaacatccccctggtgcccgatgaggagctggacgctttgaagatcaagatctcccagatcaagaatgacatccagagagagaagagggcgaacaagggcagcaaggctacggagaggctgaagaagaagctgtcggagcaggagtcactgctgctgcttatgtctcccagcatggccttcagggtgcacagccgcaacggcaagagttacacgttcctgatctcctctgactatgagcgtgcagagtggagggagaacatccgggagcagcagaagaagtgtttcagaagcttctccctgacatccgtggagctgcagatgctgaccaactcgtgtgtgaaactccagactgtccacagcattccgctgaccatcaataaggaagatgatgagtctccggggctctatgggtttctgaatgtcatcgtccactcagccactggatttaagcagagttcaaatctgtactgcaccctggaggtggattcctttgggtattttgtgaataaagcaaagacgcgcgtctacagggacacagctgagccaaactggaacgaggaatttgagatagagctggagggctcccagaccctgaggatactgtgctatgaaaagtgttacaacaagacgaagatccccaaggaggacggcgagagcacggacagactcatggggaagggccaggtccagctggacccgcaggccctgcaggacagagactggcagcgcaccgtcatcgccatgaatgggatcgaagtaaagctctcggtcaagttcaacagcagggagttcagcttgaagaggatgccgtcccgaaaacagacaggggtcttcggagtcaagattgctgtggtcaccaagagagagaggtccaaggtgccctacatcgtgcgccagtgcgtggaggagatcgagcgccgaggcatggaggaggtgggcatctaccgcgtgtccggtgtggccacggacatccaggcactgaaggcagccttcgacgtcaataacaaggacgtgtcggtgatgatgagcgagatggacgtgaacgccatcgcaggcacgctgaagctgtacttccgtgagctgcccgagcccctcttcactgacgagttctaccccaacttcgcagagggcatcgctctttcagacccggttgcaaaggagagctgcatgctcaacctgctgctgtccctgccggaggccaacctgctcaccttccttttccttctggaccacctgaaaagggtggcagagaaggaggcagtcaataagatgtccctgcacaacctcgccacggtctttggccccacgctgctccggccctccgagaaggagagcaagctccctgccaaccccagccagcctatcaccatgactgacagctggtccttggaggtcatgtcccaggtccaggtgctgctgtacttcctgcagctggaggccatccctgccccggacagcaagagacagagcatcctgttctccaccgaagtctaaaggtcccagtccatctcctggaggcggacagatggcctggaaacctctggctaatcgggccatccgtagagcgggaaccttcctgaggtgtccttgggccacccccaagtgttgggccatctgccaagagacagcgaccc

SEQ ID NO: 145133 - DNA, 3816 bp, Artificial Sequence
  derived and/or modified sequence
atggtggaccccgtgggcttcgccgaggcctggaaggcccagttccccgacagcgagccccccagaatggagctgagaagcgtgggcgacatcgagcaggagctggagagatgcaaggccagcatcagaagactggagcaggaggtgaaccaggagagattcagaatgatctacctgcagaccctgctggccaaggagaagaagagctacgacagacagagatggggcttcagaagagccgcccaggcccccgacggcgccagcgagcccagagccagcgccagcagaccccagcccgcccccgccgacggcgccgaccccccccccgccgaggagcccgaggccagacccgacggcgagggcagccccggcaaggccagacccggcaccgccagaagacccggcgccgccgccagcggcgagagagacgacagaggcccccccgccagcgtggccgccctgagaagcaacttcgagagaatcagaaagggccacggccagcccggcgccgacgccgagaagcccttctacgtgaacgtggagttccaccacgagagaggcctggtgaaggtgaacgacaaggaggtgagcgacagaatcagcagcctgggcagccaggccatgcagatggagagaaagaagagccagcacggcgccggcagcagcgtgggcgacgccagcagacccccctacagaggcagaagcagcgagagcagctgcggcgtggacggcgactacgaggacgccgagctgaaccccagattcctgaaggacaacctgatcgacgccaacggcggcagcagacccccctggccccccctggagtaccagccctaccagagcatctacgtgggcggcatgatggagggcgagggcaagggccccctgctgagaagccagagcaccagcgagcaggagaagagactgacctggcccagaagaagctacagccccagaagcttcgaggactgcggcggcggctacacccccgactgcagcagcaacgagaacctgaccagcagcgaggaggacttcagcagcggccagagcagcagagtgagccccagccccaccacctacagaatgttcagagacaagagcagaagccccagccagaacagccagcagagcttcgacagcagcagcccccccaccccccagtgccacaagagacacagacactgccccgtggtggtgagcgaggccaccatcgtgggcgtgagaaagaccggccagatctggcccaacgacggcgagggcgccttccacggcgacgccgacggcagcttcggcaccccccccggctacggctgcgccgccgacagagccgaggagcagagaagacaccaggacggcctgccctacatcgacgacagccccagcagcagcccccacctgagcagcaagggcagaggcagcagagacgccctggtgagcggcgccctggagagcaccaaggccagcgagctggacctggagaagggcctggagatgagaaagtgggtgctgagcggcatcctggccagcgaggagacctacctgagccacctggaggccctgctgctgcccatgaagcccctgaaggccgccgccaccaccagccagcccgtgctgaccagccagcagatcgagaccatcttcttcaaggtgcccgagctgtacgagatccacaaggagttctacgacggcctgttccccagagtgcagcagtggagccaccagcagagagtgggcgacctgttccagaagctggccagccagctgggcgtgtacagagccttcgtggacaactacggcgtggccatggagatggccgagaagtgctgccaggccaacgcccagttcgccgagatcagcgagaacctgagagccagaagcaacaaggacgccaaggaccccaccaccaagaacagcctggagaccctgctgtacaagcccgtggacagagtgaccagaagcaccctggtgctgcacgacctgctgaagcacacccccgccagccaccccgaccaccccctgctgcaggacgccctgagaatcagccagaacttcctgagcagcatcaacgaggagatcacccccagaagacagagcatgaccgtgaagaagggcgagcacagacagctgctgaaggacagcttcatggtggagctggtggagggcgccagaaagctgagacacgtgttcctgttcaccgacctgctgctgtgcaccaagctgaagaagcagagcggcggcaagacccagcagtacgactgcaagtggtacatccccctgaccgacctgagcttccagatggtggacgagctggaggccgtgcccaacatccccctggtgcccgacgaggagctggacgccctgaagatcaagatcagccagatcaagaacgacatccagagagagaagagagccaacaagggcagcaaggccaccgagagactgaagaagaagctgagcgagcaggagagcctgctgctgctgatgagccccagcatggccttcagagtgcacagcagaaacggcaagagctacaccttcctgatcagcagcgactacgagagagccgagtggagagagaacatcagagagcagcagaagaagtgcttcagaagcttcagcctgaccagcgtggagctgcagatgctgaccaacagctgcgtgaagctgcagaccgtgcacagcatccccctgaccatcaacaaggaggacgacgagagccccggcctgtacggcttcctgaacgtgatcgtgcacagcgccaccggcttcaagcagagcagcaacctgtactgcaccctggaggtggacagcttcggctacttcgtgaacaaggccaagaccagagtgtacagagacaccgccgagcccaactggaacgaggagttcgagatcgagctggagggcagccagaccctgagaatcctgtgctacgagaagtgctacaacaagaccaagatccccaaggaggacggcgagagcaccgacagactgatgggcaagggccaggtgcagctggacccccaggccctgcaggacagagactggcagagaaccgtgatcgccatgaacggcatcgaggtgaagctgagcgtgaagttcaacagcagagagttcagcctgaagagaatgcccagcagaaagcagaccggcgtgttcggcgtgaagatcgccgtggtgaccaagagagagagaagcaaggtgccctacatcgtgagacagtgcgtggaggagatcgagagaagaggcatggaggaggtgggcatctacagagtgagcggcgtggccaccgacatccaggccctgaaggccgccttcgacgtgaacaacaaggacgtgagcgtgatgatgagcgagatggacgtgaacgccatcgccggcaccctgaagctgtacttcagagagctgcccgagcccctgttcaccgacgagttctaccccaacttcgccgagggcatcgccctgagcgaccccgtggccaaggagagctgcatgctgaacctgctgctgagcctgcccgaggccaacctgctgaccttcctgttcctgctggaccacctgaagagagtggccgagaaggaggccgtgaacaagatgagcctgcacaacctggccaccgtgttcggccccaccctgctgagacccagcgagaaggagagcaagctgcccgccaaccccagccagcccatcaccatgaccgacagctggagcctggaggtgatgagccaggtgcaggtgctgctgtacttcctgcagctggaggccatccccgcccccgacagcaagagacagagcatcctgttcagcaccgaggtgtag

SEQ ID NO: 145134 - DNA, 2811 bp, Artificial Sequence
  derived and/or modified sequence
cccagcgcccccagagtgagcaccgtgggcctgctgtgcagcggcgccggcccccacctgtgcccctgcgccgaggagggcaccggcggcctggagagccagggcgagatcatccccagcagaggcagcagaaagcccgacggcgtgagcggcagcagaagactgttcagcagcctgtgcaagagccaggagggcagcagaaaggagtgcctgagaaagcacagaagactgggccccgccatgcccgtgagcagccccggcttccccggccccctggccagaagcgagcaccacctggacaccgccgccctgcagaccggccagagaagcagcgccggcaccaagatgggctgccccaccctgatgaccagacccccccacagacccaccagcgccgccagagccggcgccgccggcatgagatggagcagagagccctggagccccctgaagagaagcgagctggacctggagaagggcctggagatgagaaagtgggtgctgagcggcatcctggccagcgaggagacctacctgagccacctggaggccctgctgctgcccatgaagcccctgaaggccgccgccaccaccagccagcccgtgctgaccagccagcagatcgagaccatcttcttcaaggtgcccgagctgtacgagatccacaaggagttctacgacggcctgttccccagagtgcagcagtggagccaccagcagagagtgggcgacctgttccagaagctggccagccagctgggcgtgtacagagccttcgtggacaactacggcgtggccatggagatggccgagaagtgctgccaggccaacgcccagttcgccgagatcagcgagaacctgagagccagaagcaacaaggacgccaaggaccccaccaccaagaacagcctggagaccctgctgtacaagcccgtggacagagtgaccagaagcaccctggtgctgcacgacctgctgaagcacacccccgccagccaccccgaccaccccctgctgcaggacgccctgagaatcagccagaacttcctgagcagcatcaacgaggagatcacccccagaagacagagcatgaccgtgaagaagggcgagcacagacagctgctgaaggacagcttcatggtggagctggtggagggcgccagaaagctgagacacgtgttcctgttcaccgacctgctgctgtgcaccaagctgaagaagcagagcggcggcaagacccagcagtacgactgcaagtggtacatccccctgaccgacctgagcttccagatggtggacgagctggaggccgtgcccaacatccccctggtgcccgacgaggagctggacgccctgaagatcaagatcagccagatcaagaacgacatccagagagagaagagagccaacaagggcagcaaggccaccgagagactgaagaagaagctgagcgagcaggagagcctgctgctgctgatgagccccagcatggccttcagagtgcacagcagaaacggcaagagctacaccttcctgatcagcagcgactacgagagagccgagtggagagagaacatcagagagcagcagaagaagtgcttcagaagcttcagcctgaccagcgtggagctgcagatgctgaccaacagctgcgtgaagctgcagaccgtgcacagcatccccctgaccatcaacaaggaggacgacgagagccccggcctgtacggcttcctgaacgtgatcgtgcacagcgccaccggcttcaagcagagcagcaacctgtactgcaccctggaggtggacagcttcggctacttcgtgaacaaggccaagaccagagtgtacagagacaccgccgagcccaactggaacgaggagttcgagatcgagctggagggcagccagaccctgagaatcctgtgctacgagaagtgctacaacaagaccaagatccccaaggaggacggcgagagcaccgacagactgatgggcaagggccaggtgcagctggacccccaggccctgcaggacagagactggcagagaaccgtgatcgccatgaacggcatcgaggtgaagctgagcgtgaagttcaacagcagagagttcagcctgaagagaatgcccagcagaaagcagaccggcgtgttcggcgtgaagatcgccgtggtgaccaagagagagagaagcaaggtgccctacatcgtgagacagtgcgtggaggagatcgagagaagaggcatggaggaggtgggcatctacagagtgagcggcgtggccaccgacatccaggccctgaaggccgccttcgacgtgaacaacaaggacgtgagcgtgatgatgagcgagatggacgtgaacgccatcgccggcaccctgaagctgtacttcagagagctgcccgagcccctgttcaccgacgagttctaccccaacttcgccgagggcatcgccctgagcgaccccgtggccaaggagagctgcatgctgaacctgctgctgagcctgcccgaggccaacctgctgaccttcctgttcctgctggaccacctgaagagagtggccgagaaggaggccgtgaacaagatgagcctgcacaacctggccaccgtgttcggccccaccctgctgagacccagcgagaaggagagcaagctgcccgccaaccccagccagcccatcaccatgaccgacagctggagcctggaggtgatgagccaggtgcaggtgctgctgtacttcctgcagctggaggccatccccgcccccgacagcaagagacagagcatcctgttcagcaccgaggtgtag

SEQ ID NO: 145135 - protein, 532 aa, Artificial Sequence
  derived and/or modified sequence
MPQLYIYIRLLGAYLFIISRVQGQNLDSMLHGTGMKSDSDQKKSENGVTLAPEDTLPFLKCYCSGHCPDDAINNTCITNGHCFAIIEEDDQGETTLASGCMKYEGSDFQCKDSPKAQLRRTIECCRTNLCNQYLQPTLPPVVIGPFFDGSIRWLVLLISMAVCIIAMIIFSSCFCYKHYCKSISSRRRYNRDLEQDEAFIPVGESLKDLIDQSQSSGSGSGLPLLVQRTIAKQIQMVRQVGKGRYGEVWMGKWRGEKVAVKVFFTTEEASWFRETEIYQTVLMRHENILGFIAADIKGTGSWTQLYLITDYHENGSLYDFLKCATLDTRALLKLAYSAACGLCHLHTEIYGTQGKPAIAHRDLKSKNILIKKNGSCCIADLGLAVKFNSDTNEVDVPLNTRVGTKRYMAPEVLDESLNKNHFQPYIMADIYSFGLIIWEMARRCITGGIVEEYQLPYYNMVPSDPSYEDMREVVCVKRLRPIVSNRWNSDECLRAVLKLMSECWAHNPASRLTALRIKKTLAKMVESQDVKI

SEQ ID NO: 145136 - DNA, 1599 bp, Artificial Sequence
  derived and/or modified sequence
atgccccagctgtacatctacatcagactgctgggcgcctacctgttcatcatcagcagagtgcagggccagaacctggacagcatgctgcacggcaccggcatgaagagcgacagcgaccagaagaagagcgagaacggcgtgaccctggcccccgaggacaccctgcccttcctgaagtgctactgcagcggccactgccccgacgacgccatcaacaacacctgcatcaccaacggccactgcttcgccatcatcgaggaggacgaccagggcgagaccaccctggccagcggctgcatgaagtacgagggcagcgacttccagtgcaaggacagccccaaggcccagctgagaagaaccatcgagtgctgcagaaccaacctgtgcaaccagtacctgcagcccaccctgccccccgtggtgatcggccccttcttcgacggcagcatcagatggctggtgctgctgatcagcatggccgtgtgcatcatcgccatgatcatcttcagcagctgcttctgctacaagcactactgcaagagcatcagcagcagaagaagatacaacagagacctggagcaggacgaggccttcatccccgtgggcgagagcctgaaggacctgatcgaccagagccagagcagcggcagcggcagcggcctgcccctgctggtgcagagaaccatcgccaagcagatccagatggtgagacaggtgggcaagggcagatacggcgaggtgtggatgggcaagtggagaggcgagaaggtggccgtgaaggtgttcttcaccaccgaggaggccagctggttcagagagaccgagatctaccagaccgtgctgatgagacacgagaacatcctgggcttcatcgccgccgacatcaagggcaccggcagctggacccagctgtacctgatcaccgactaccacgagaacggcagcctgtacgacttcctgaagtgcgccaccctggacaccagagccctgctgaagctggcctacagcgccgcctgcggcctgtgccacctgcacaccgagatctacggcacccagggcaagcccgccatcgcccacagagacctgaagagcaagaacatcctgatcaagaagaacggcagctgctgcatcgccgacctgggcctggccgtgaagttcaacagcgacaccaacgaggtggacgtgcccctgaacaccagagtgggcaccaagagatacatggcccccgaggtgctggacgagagcctgaacaagaaccacttccagccctacatcatggccgacatctacagcttcggcctgatcatctgggagatggccagaagatgcatcaccggcggcatcgtggaggagtaccagctgccctactacaacatggtgcccagcgaccccagctacgaggacatgagagaggtggtgtgcgtgaagagactgagacccatcgtgagcaacagatggaacagcgacgagtgcctgagagccgtgctgaagctgatgagcgagtgctgggcccacaaccccgccagcagactgaccgccctgagaatcaagaagaccctggccaagatggtggagagccaggacgtgaagatctag

SEQ ID NO: 145137 - DNA, 1599 bp, Artificial Sequence
  derived and/or modified sequence
atgccacagctgtacatctacatacgtctgctcggggcatacctctttataatttcccgcgtgcaaggccagaacctcgatagtatgttgcacggcaccgggatgaagagtgacagcgatcaaaaaaagtcagaaaatggcgtaacccttgcgccagaagatactctaccattccttaaatgctattgcagcggtcattgtcctgacgacgccatcaacaacacctgtatcaccaatggccactgctttgcaatcattgaggaagacgaccaaggggagacaaccctcgcatcaggttgcatgaagtacgaaggttccgactttcagtgtaaggattcccccaaggctcagcttcgtcggacgatcgagtgctgccggacaaacctgtgcaaccaatacctgcagcccaccctcccgccggttgtgattgggccattcttcgatggatccatcagatggctggtgctactgatttctatggccgtctgcattatcgcgatgataatattctccagctgtttttgctacaaacactattgtaagagcatctctagccggcggcgctacaatcgcgacctcgagcaggacgaggcctttatacccgtaggcgagtcgttaaaggatctgattgatcagagtcagagttcgggaagcgggagtggcttgcctcttttagtgcagcggactatcgcaaaacagatccagatggtgcgtcaagtcggcaaaggcaggtatggcgaagtatggatgggaaaatggagaggcgagaaagtggcagtgaaagttttctttacaaccgaagaagctagctggttccgcgagacagagatttatcagactgttttgatgcgccacgagaatattctggggttcattgctgccgacattaaggggactggcagctggacacaactgtatctgattacagactatcacgagaacggttctctctatgattttcttaagtgcgctaccttggacacaagagcccttctcaaactggcatactctgccgcttgtgggctgtgccatctccacactgagatttacggcacacaaggaaagccagctattgcacaccgggacctgaagagtaaaaatatcctgattaaaaaaaatggatcctgctgcattgctgacctcggcctcgctgtgaaattcaattctgacacgaatgaggtcgatgtgcctctgaatactagagttggcactaagaggtatatggcgcccgaggtgctggacgaatctttgaacaagaaccactttcagccttatattatggcggatatctacagcttcggtctgatcatatgggagatggctcgacgatgcatcaccggtgggattgttgaggagtatcaactgccatattacaacatggtgccctctgacccgtcatatgaagacatgcgcgaggtggtttgcgttaaacgactgagaccaatagtttctaatcggtggaattctgacgagtgcctgcgtgcggtattaaagctgatgagtgaatgttgggctcacaacccagctagtagactgaccgctctgcgtatcaaaaagactcttgcaaagatggtggaatcccaagatgttaagatttag

SEQ ID NO: 145138 - DNA, 1599 bp, Artificial Sequence
  derived and/or modified sequence
atgccccagctgtacatctacatccggctgctgggcgcctacctgttcatcatcagccgggtgcagggccagaacctggacagcatgctgcatggaacaggcatgaagagtgacagcgaccagaagaagtcagaaaatggagtgaccctggcccctgaggacaccctgcccttcctgaagtgctactgcagcggccactgcccagatgatgccatcaacaacacctgcatcaccaacggccactgctttgccatcatcgaggaggatgaccagggcgagaccaccctggccagcggctgcatgaagtatgagggcagtgacttccagtgcaaggacagccccaaggcccagctgcggaggaccatcgagtgctgcaggaccaacctgtgcaaccagtacctgcagcccaccctgccccctgtggtgattggccccttctttgatggcagcatccgctggctggtgctgctgatctccatggctgtgtgcatcatcgccatgatcatcttcagcagctgcttctgctacaagcactactgcaagagcatcagcagcagaagacgctacaacagagacctggagcaggatgaggccttcatccctgtgggggagagcctgaaggacctgattgaccagagccagagcagcggcagcggcagcggcctgcccctgctggtgcagaggaccatcgccaagcagatccagatggtgcggcaggtgggcaagggccgctatggagaggtgtggatgggcaagtggagaggagagaaggtggccgtgaaggtgttcttcaccacagaggaggcctcctggttccgggagacagagatctaccagacagtgctgatgagacatgagaacatcctgggcttcatcgctgctgacatcaagggcaccggctcctggacccagctgtacctgatcacagactaccatgaaaatggcagcctgtatgacttcctgaagtgtgccaccctggacacccgggccctgctgaagctggcctacagcgctgcctgtggcctgtgccacctgcacacagagatctacggcacccagggcaagccagccatcgcccaccgggacctgaagagcaagaacatcctgatcaagaagaatggcagctgctgcatcgctgacctgggcctggccgtgaagttcaacagcgacaccaatgaggtggatgtgcccctgaacaccagggtgggcaccaagcgctacatggcccctgaggtgctggatgagagcctgaacaagaaccacttccagccctacatcatggctgacatctacagctttggcctcatcatctgggagatggcccggcgctgcatcaccggcggcatcgtggaggagtaccagctgccctactacaacatggtgcccagcgaccccagctatgaggacatgagggaggtggtgtgtgtgaagaggctgcggcccatcgtgagcaaccgctggaacagtgatgaatgtctgcgggctgtgctgaagctgatgtctgagtgctgggcccacaacccagccagccggctgacagccctgcgcatcaagaagaccctggccaagatggtggagagccaggatgtgaagatctag

SEQ ID NO: 145139 - DNA, 1599 bp, Artificial Sequence
  derived and/or modified sequence
atgccccagctgtacatctacatccggctgctgggcgcctacctgttcatcatcagccgtgtgcaaggccaaaatctggatagcatgctccacggcaccggcatgaagagtgacagcgaccagaagaagagtgaaaacggcgtcacactggccccggaggatactttgccattcttgaagtgttactgtagcgggcactgtcctgatgacgctattaataatacatgcataaccaacgggcactgctttgcgattattgaagaggacgatcagggcgaaaccaccctcgcatcaggttgtatgaaatacgaggggagcgactttcaatgtaaggacagcccaaaggcccaactgcgccgtacaattgagtgttgccgcactaacttgtgtaaccagtatctgcagcccaccctgcctcctgtggtgattggccctttttttgatgggtcgattcgctggttagtgctgcttattagcatggctgtgtgtatcatcgcgatgataatattttcaagctgcttttgttataaacactattgcaagtctatctcctccagacggcgatacaatcgcgacctggagcaggatgaagccttcatccctgtgggtgaatccttaaaagacctcatagatcagtcacagtcttcaggctccggcagcggcttgccactgcttgttcagaggaccattgctaagcaaatccaaatggtccgccaggttggcaaggggagatacggcgaggtgtggatgggaaaatggaggggtgagaaggtggccgtgaaagtgtttttcaccacagaagaggctagttggttccgggagactgagatctaccagacagtgttgatgcggcacgaaaacatccttgggttcatagctgcggacattaaaggtacaggtagttggactcagctatacttgattaccgattatcacgaaaatggtagcctgtacgattttctaaagtgtgccacccttgatacaagagccttgctgaagctggcttatagcgcggcttgcggcttgtgccatctgcataccgagatttatgggacccaagggaagcccgcaatagcacacagagatctcaaatccaaaaacatcctgatcaaaaagaatggctcctgctgtattgcagacttagggttagccgtcaaattcaactcagacacaaatgaggtggacgtgccacttaatacaagggtcggcaccaagcgctacatggcccccgaagttctggacgaatccctcaataagaatcactttcaaccctacattatggccgatatttatagcttcgggctgatcatttgggaaatggcccggaggtgcatcacaggggggattgtggaggagtatcaactgccttactataatatggtgccatcagatccatcctatgaagacatgagggaggtcgtgtgcgtgaagagactacgacctatcgtgagtaacagatggaattccgacgagtgtctgcgtgccgtgttaaaactgatgtccgaatgctgggcccacaatcccgcctcaagactgaccgctctgcgcatcaagaaaacactcgctaaaatggtggagtcccaggacgtcaagatttag

SEQ ID NO: 145140 - DNA, 1599 bp, Artificial Sequence
  derived and/or modified sequence
atgcctcagctgtacatatacattagactcttaggcgcttatctgttcatcatttcccgcgtccagggccagaatctagattcaatgctccacggcactggaatgaagtcggactctgatcagaaaaaaagcgagaatggggttaccctggccccagaagacacactgcctttcctaaagtgttattgtagcggtcattgccctgacgacgctatcaataacacgtgcatcacaaacggccactgttttgctataattgaggaggatgatcagggggagaccacactggcctccgggtgcatgaagtatgaaggcagcgacttccagtgtaaggactcccctaaagctcaactgcggcgaacaatcgaatgctgccgtacaaacctctgcaatcagtatctgcagcccaccctgccaccggtggtaatcggacccttctttgatgggtctatccgttggctagtgctgctgatttctatggccgtttgcatcattgcgatgataatcttctcttcttgtttctgctacaaacactattgcaagtccatcagtagtcggcgacgctacaaccgagacttggaacaggacgaggcctttatcccagttggcgaaagtttgaaagacctgatagatcaaagccagagcagcggctctggatccggtctcccactgttagttcagagaaccatcgccaagcagattcagatggtcaggcaagtaggcaaaggaagatatggcgaagtgtggatgggaaagtggcgaggggagaaggtagccgtaaaagtcttttttaccaccgaagaggcttcttggtttagggagaccgaaatctatcagaccgtcttaatgagacacgagaatatccttggctttattgccgctgatataaaggggactggatcttggactcagttgtacctcatcaccgattaccacgaaaatgggtccctatatgacttcttgaaatgtgctaccttggatactcgtgccctgttgaaactcgcttacagtgctgcctgcgggctgtgtcaccttcacacagagatttacggcacccagggaaaacctgctatcgctcaccgcgacctcaaatctaagaacatcctgatcaaaaagaacggcagctgctgtatagcagatttggggttggccgtgaagttcaattccgataccaatgaggtggatgtgccgctaaatactagggtcggcactaaacggtatatggctccagaagttctggacgaaagtctcaataaaaaccactttcaaccatatatcatggctgacatttattcttttggcctcatcatttgggaaatggccaggaggtgcatcacaggaggcatcgtggaagagtaccagttgccttattacaacatggtccctagcgacccgtcctatgaagacatgcgggaagtggtatgtgtcaagcggctccgccctattgtgtctaatagatggaatagcgacgagtgtttgagagctgtgctgaaattaatgagcgagtgctgggcccacaaccctgcttcacggctgacggcactcagaatcaaaaaaaccctcgctaagatggtggagtcccaagacgtgaagatttag

SEQ ID NO: 145141 - DNA, 1599 bp, Artificial Sequence
  derived and/or modified sequence
atgcctcagctgtatatttacatccgcctactgggtgcataccttttcatcatttcaagggtgcagggtcagaatctggatagtatgcttcacggtacagggatgaagagcgattccgaccagaagaagtccgagaatggcgtgaccctcgccccggaagataccttgccatttctaaagtgctattgttctggccattgcccggatgacgccatcaataacacatgcattaccaacggccactgcttcgccattattgaggaggatgaccagggtgagaccaccctggcatcggggtgtatgaaatatgaaggaagtgattttcaatgcaaagactcccccaaagcccagctgcgtcggacgattgagtgctgcagaacaaacctctgtaaccaatatctgcaaccaactctgccccctgtggtaatcggccccttcttcgatggttctataagatggttagttttgctcatttccatggcagtgtgtattatagctatgattatttttagttcctgcttctgctacaagcactattgtaagtctatctcttcgcgacgacggtacaatagagatctggagcaggatgaagcgtttatcccggtgggagaatctctgaaggatcttatcgaccagagtcagagcagtgggagcggttccggcctgcccctgctggtgcagcggactattgcaaaacaaattcagatggtaagacaagtgggcaaaggccgctatggggaagtgtggatgggcaagtggaggggggagaaggttgccgtgaaagttttttttacaactgaggaagcctcctggtttagggagactgagatctaccagaccgtgctgatgcgtcacgaaaacattttagggttcattgctgccgatatcaaaggaaccggaagttggacccagctgtacctcatcacagactaccatgagaatggatcactgtatgacttcttgaagtgcgccaccctcgacactagagccttattgaaactggcgtacagcgctgcctgcggattgtgccacctgcatactgaaatatatggcacacagggaaaacctgcgattgcccatcgcgacctgaagtccaaaaatattctgattaaaaaaaacggcagctgctgtattgctgatctagggctagccgtcaaattcaattctgataccaatgaggttgacgtgcctctgaacacaagagttgggaccaagcggtatatggccccagaagtcttggacgagagtctgaacaagaaccattttcagccgtacattatggctgatatttactccttcggactgattatttgggagatggctcgacggtgtattactgggggcatcgtcgaagagtaccagctcccctactacaacatggttccatcggacccctcttacgaggatatgcgcgaggtggtgtgcgtcaagaggctgagacccatcgtgtcgaatcggtggaactccgatgaatgcctccgcgctgttctgaagcttatgagtgagtgctgggcacacaatccagcatcacggctgactgccctgcggattaagaagaccctcgccaaaatggttgagagccaggacgtgaagatctag

SEQ ID NO: 145142 - DNA, 1599 bp, Artificial Sequence
  derived and/or modified sequence
atgccccagctgtacatctacatccggctgctgggcgcctacctgttcatcatatccagagtgcaaggtcaaaatttggactccatgcttcacggcaccggaatgaaaagcgactctgaccagaaaaaaagcgagaatggtgtcacgctggcccctgaggatacattgcccttccttaagtgctattgctcagggcattgtcccgatgacgcgattaataacacctgcatcactaacgggcattgcttcgccattatcgaagaggatgatcaaggagagacaacgcttgcttcaggatgtatgaaatacgaaggtagcgacttccagtgcaaggactccccaaaagctcagctgcgtcggactattgagtgctgccgcacgaatctctgcaaccagtacctgcaacccacccttccccccgtggtgattggccccttttttgacggaagtatccgctggctggtcctgttgatttcgatggcggtctgtataatcgccatgatcatattctcttcttgcttctgttataaacactactgcaagtcaattagttctaggcggcgctataaccgcgatttggagcaagatgaggcatttatcccagttggcgagagtctgaaggacctcatcgaccagagccagagctccggttcgggctcaggcctgccactattggtccagaggaccatcgcaaaacaaatccagatggtgcggcaggtcgggaaaggaagatacggagaagtgtggatgggcaaatggaggggcgaaaaagttgccgtcaaagtgttttttaccactgaggaagcttcctggtttagggagaccgaaatttaccagaccgtcctgatgagacacgaaaatattttggggtttatcgccgcagacatcaagggcactggctcttggacccaactgtacctcatcacagattatcacgagaacgggtccctgtacgactttctgaaatgcgcgacactggacacacgggccttgttgaagctggcgtattccgccgcctgcggcctatgccatttacatactgaaatttatggtacccaggggaagcctgctattgcacacagggatttaaaaagcaaaaacatactcattaaaaaaaatggcagctgttgcattgccgacctgggcctggcggtgaagtttaattccgataccaatgaagtagatgtgccacttaatacaagagtgggaacaaaaaggtatatggcacccgaggtgctagacgagagtctgaataagaatcattttcaaccctacatcatggctgacatctactcgtttggcctgatcatctgggaaatggcgagacgatgtatcaccggcggcatcgtcgaggagtaccaactgccatattacaatatggttccgtcggacccaagttacgaagacatgcgggaggtagtgtgcgtcaaacgattgcgacccattgtgtctaaccggtggaattccgacgagtgtttaagagcggtgctcaagctcatgtcggaatgctgggcccacaaccccgcctcccgactgactgctcttcgaatcaagaagaccctggctaagatggttgagtcacaggacgtgaagatctag

SEQ ID NO: 145143 - DNA, 1599 bp, Artificial Sequence
  derived and/or modified sequence
atgcctcagctgtatatctatatccgcctcctgggtgcctacctgttcatcatcagcagagtccagggccagaacctggacagtatgctgcacggcacagggatgaaatctgattctgaccagaagaagtccgaaaatggcgtgactctggctccagaagataccctaccatttctcaagtgttactgcagtggacactgtcctgatgatgcgatcaacaatacttgtattactaatggtcactgtttcgccatcatagaggaagacgatcagggagaaacaactctagcaagtggctgtatgaagtacgaaggaagcgattttcagtgtaaggattccccaaaagcccaactccgccgaacaatcgagtgctgcagaactaacctttgtaaccaatatttgcagccgactctgccaccagtcgtcatcggtcccttttttgatgggtccatccgatggcttgtgctcctgatttctatggcagtctgcataatcgccatgattatattcagttcatgcttctgctataaacactactgcaagagtatctcctcgaggcgcagatacaatcgtgatttggaacaagatgaggcattcatacccgtgggtgaaagtttaaaggatctgattgatcaatcacaaagcagcggtagcgggtctggcctgccattacttgtgcagcgcacaatagcaaagcaaatccaaatggtgaggcaggtgggcaagggacggtatggcgaggtatggatggggaaatggcgcggtgaaaaggtggcagttaaagtgttctttactaccgaggaggcgtcatggtttcgggaaaccgaaatttatcaaacagttcttatgagacacgaaaatatcctcgggtttatcgcagctgatattaagggcacagggtcatggactcaactgtatttgattaccgattatcatgagaatggaagcctctatgactttttaaaatgcgcaaccctggacacgagagctctgttgaagctggcgtacagcgcagcatgcggtctctgtcacctgcataccgaaatttatggtactcagggaaagcctgctatcgcacatcgcgatctcaaatcgaagaacattttgattaagaaaaatgggtcctgctgtattgccgatctgggtctggctgtcaaattcaacagcgacaccaacgaggtggatgtaccgctgaacacgcgggtgggaacaaaaagatatatggcccctgaggtcctcgatgaatcgctgaacaagaaccattttcagccctatatcatggctgatatctactccttcggactgatcatttgggagatggcgagacggtgtattacaggcggtatcgtggaggagtaccaattgccgtattataacatggtgccctcagatccttcctacgaagacatgagagaggtagtgtgcgtgaagagactgaggcctattgtgtctaaccgctggaacagcgacgagtgcctgagagccgtgctgaagttgatgtccgagtgctgggcccacaacccagcaagcagacttacagcattacggataaaaaagaccctggccaagatggtggagtctcaagatgttaaaatctag

SEQ ID NO: 145144 - DNA, 3613 bp, Artificial Sequence
  derived and/or modified sequence
gcggccgctgcagagattggaatccgcctgccgggcttggcgaaggagaagggaggaggcaggagcgaggagggaggagggccaagggcgggcaggaaggcttaggctcggcgcgtccgtccgcgcgcggcgaagatcgcacggcccgatcgaggggcgaccgggtcggggccgctgcacgccaagggcgaaggccgattcgggccccacttcgccccggcggctcgccgcgcccacccgctccgcgccgagggctggaggatgcgttccctggggtccggacttatgaaaatatgcatcagtttaatactgtcttggaattcatgagatggaagcataggtcaaagctgtttggagaaaatcagaagtacagttttatctagccacatcttggaggagtcgtaagaaagcagtgggagttgaagtcattgtcaagtgcttgcgatcttttacaagaaaatctcactgaatgatagtcatttaaattggtgaagtagcaagaccaattattaaaggtgacagtacacaggaaacattacaattgaacaatgcctcagctatacatttacatcagattattgggagcctatttgttcatcatttctcgtgttcaaggacagaatctggatagtatgcttcatggcactgggatgaaatcagactccgaccagaaaaagtcagaaaatggagtaaccttagcaccagaggataccttgccttttttaaagtgctattgctcagggcactgtccagatgatgctattaataacacatgcataactaatggacattgctttgccatcatagaagaagatgaccagggagaaaccacattagcttcagggtgtatgaaatatgaaggatctgattttcagtgcaaagattctccaaaagcccagctacgccggacaatagaatgttgtcggaccaatttatgtaaccagtatttgcaacccacactgccccctgttgtcataggtccgttttttgatggcagcattcgatggctggttttgctcatttctatggctgtctgcataattgctatgatcatcttctccagctgcttttgttacaaacattattgcaagagcatctcaagcagacgtcgttacaatcgtgatttggaacaggatgaagcatttattccagttggagaatcactaaaagaccttattgaccagtcacaaagttctggtagtgggtctggactacctttattggttcagcgaactattgccaaacagattcagatggtccggcaagttggtaaaggccgatatggagaagtatggatgggcaaatggcgtggcgaaaaagtggcggtgaaagtattctttaccactgaagaagccagctggtttcgagaaacagaaatctaccaaactgtgctaatgcgccatgaaaacatacttggtttcatagcggcagacattaaaggtacaggttcctggactcagctctatttgattactgattaccatgaaaatggatctctctatgacttcctgaaatgtgctacactggacaccagagccctgcttaaattggcttattcagctgcctgtggtctgtgccacctgcacacagaaatttatggcacccaaggaaagcccgcaattgctcatcgagacctaaagagcaaaaacatcctcatcaagaaaaatgggagttgctgcattgctgacctgggccttgctgttaaattcaacagtgacacaaatgaagttgatgtgcccttgaataccagggtgggcaccaaacgctacatggctcccgaagtgctggacgaaagcctgaacaaaaaccacttccagccctacatcatggctgacatctacagcttcggcctaatcatttgggagatggctcgtcgttgtatcacaggagggatcgtggaagaataccaattgccatattacaacatggtaccgagtgatccgtcatacgaagatatgcgtgaggttgtgtgtgtcaaacgtttgcggccaattgtgtctaatcggtggaacagtgatgaatgtctacgagcagttttgaagctaatgtcagaatgctgggcccacaatccagcctccagactcacagcattgagaattaagaagacgcttgccaagatggttgaatcccaagatgtaaaaatctgatggttaaaccatcggaggagaaactctagactgcaagaactgtttttacccatggcatgggtggaattagagtggaataaggatgttaacttggttctcagactctttcttcactacgtgttcacaggctgctaatattaaacctttcagtactcttattaggatacaagctgggaacttctaaacacttcattctttatatatggacagctttattttaaatgtggtttttgatgcctttttttaagtgggtttttatgaactgcatcaagacttcaatcctgattagtgtctccagtcaagctctgggtactgaattgcctgttcataaaacggtgctttctgtgaaagccttaagaagataaatgagcgcagcagagatggagaaatagactttgccttttacctgagactttcagttcgtttgtattctacctttgtaaaacagcctatagatgatgatgtgtttgggatactgcttattttatgatagtttgtcctgtgtccttagtgatgtgtgtgtgtctccatgcacatgcacgccgggattcctctgctgccatttgaattagaagaaaataatttatatgcatgcacaggaagatattggtggccggtggttttgtgctttaaaaatgcaatatctgaccaagattcgccaatctcatacaagccatttactttgcaagtgagatagcttccccaccagctttattttttaacatgaaagctgatgccaaggccaaaagaagtttaaagcatctgtaaatttggactgttttccttcaaccaccattttttttgtggttattatttttgtcacggaaagcatcctctccaaagttggagcttctattgccatgaaccatgcttacaaagaaagcacttcttattgaagtgaattcctgcatttgatagcaatgtaagtgcctataaccatgttctatattctttattctcagtaacttttaaaagggaagttatttatattttgtgtataatgtgctttatttgcaaatcacccactcctttacaaccatactttatatatgtacatacattcatactgtagaaaccagctcatgtgtacctcatatcccatccttaagagaagaaatgttataaagtagaactaaatataaattttcagaattaatgcattcaaagtaatatatcaaatccaggactttgttaacttcaggtaaaaacttcattagggtaatatcatctcaattttttcaaatgaaaggattctctaattagaaatttatatgtcagagctgttataaatttatcaactgtcaaatatgttctggacagctaaatcatttgagatttttggttttttgatttctattccctaacttgtgaagacaatgaaaaatcaggcagaaatatttagtatctagtcagtatctgtagctacactgtataactgttcttcaataaaatggttcatattttat

SEQ ID NO: 145145 - DNA, 3613 bp, Artificial Sequence
  derived and/or modified sequence
agagattggaatccgcctgccgggcttggcgaaggagaagggaggaggcaggagcgaggagggaggagggccaagggcgggcaggaaggcttaggctcggcgcgtccgtccgcgcgcggcgaagatcgcacggcccgatcgaggggcgaccgggtcggggccgctgcacgccaagggcgaaggccgattcgggccccacttcgccccggcggctcgccgcgcccacccgctccgcgccgagggctggaggatgcgttccctggggtccggacttatgaaaatatgcatcagtttaatactgtcttggaattcatgagatggaagcataggtcaaagctgtttggagaaaatcagaagtacagttttatctagccacatcttggagtctttcaggagtcgtaagaaagcagtgggagttgaagtcattgtcaagtgcttgcgatcttttacaagaaaatctcactgaatgatagtcatttaaattggtgaagtagcaagaccaattattaaaggtgacagtacacaggaaacattacaattgaacaatgcctcagctatacatttacatcagattattgggagcctatttgttcatcatttctcgtgttcaaggacagaatctggatagtatgcttcatggcactgggatgaaatcagactccgaccagaaaaagtcagaaaatggagtaaccttagcaccagaggataccttgccttttttaaagtgctattgctcagggcactgtccagatgatgctattaataacacatgcataactaatggacattgctttgccatcatagaagaagatgaccagggagaaaccacattagcttcagggtgtatgaaatatgaaggatctgattttcagtgcaaagattctccaaaagcccagctacgccggacaatagaatgttgtcggaccaatttatgtaaccagtatttgcaacccacactgccccctgttgtcataggtccgttttttgatggcagcattcgatggctggttttgctcatttctatggctgtctgcataattgctatgatcatcttctccagctgcttttgttacaaacattattgcaagagcatctcaagcagacgtcgttacaatcgtgatttggaacaggatgaagcatttattccagttggagaatcactaaaagaccttattgaccagtcacaaagttctggtagtgggtctggactacctttattggttcagcgaactattgccaaacagattcagatggtccggcaagttggtaaaggccgatatggagaagtatggatgggcaaatggcgtggcgaaaaagtggcggtgaaagtattctttaccactgaagaagccagctggtttcgagaaacagaaatctaccaaactgtgctaatgcgccatgaaaacatacttggtttcatagcggcagacattaaaggtacaggttcctggactcagctctatttgattactgattaccatgaaaatggatctctctatgacttcctgaaatgtgctacactggacaccagagccctgcttaaattggcttattcagctgcctgtggtctgtgccacctgcacacagaaatttatggcacccaaggaaagcccgcaattgctcatcgagacctaaagagcaaaaacatcctcatcaagaaaaatgggagttgctgcattgctgacctgggccttgctgttaaattcaacagtgacacaaatgaagttgatgtgcccttgaataccagggtgggcaccaaacgctacatggctcccgaagtgctggacgaaagcctgaacaaaaaccacttccagccctacatcatggctgacatctacagcttcggcctaatcatttgggagatggctcgtcgttgtatcacaggagggatcgtggaagaataccaattgccatattacaacatggtaccgagtgatccgtcatacgaagatatgcgtgaggttgtgtgtgtcaaacgtttgcggccaattgtgtctaatcggtggaacagtgatgaatgtctacgagcagttttgaagctaatgtcagaatgctgggcccacaatccagcctccagactcacagcattgagaattaagaagacgcttgccaagatggttgaatcccaagatgtaaaaatctgatggttaaaccatcggaggagaaactctagactgcaagaactgtttttacccatggcatgggtggaattagagtggaataaggatgttaacttggttctcagactctttcttcactacgtgttcacaggctgctaatattaaacctttcagtactcttattaggatacaagctgggaacttctaaacacttcattctttatatatggacagctttattttaaatgtggtttttgatgcctttttttaagtgggtttttatgaactgcatcaagacttcaatcctgattagtgtctccagtcaagctctgggtactgaattgcctgttcataaaacggtgctttctgtgaaagccttaagaagataaatgagcgcagcagagatggagaaatagactttgccttttacctgagactttcagttcgtttgtattctacctttgtaaaacagcctatagatgatgatgtgtttgggatactgcttattttatgatagtttgtcctgtgtccttagtgatgtgtgtgtgtctccatgcacatgcacgccgggattcctctgctgccatttgaattagaagaaaataatttatatgcatgcacaggaagatattggtggccggtggttttgtgctttaaaaatgcaatatctgaccaagattcgccaatctcatacaagccatttactttgcaagtgagatagcttccccaccagctttattttttaacatgaaagctgatgccaaggccaaaagaagtttaaagcatctgtaaatttggactgttttccttcaaccaccattttttttgtggttattatttttgtcacggaaagcatcctctccaaagttggagcttctattgccatgaaccatgcttacaaagaaagcacttcttattgaagtgaattcctgcatttgatagcaatgtaagtgcctataaccatgttctatattctttattctcagtaacttttaaaagggaagttatttatattttgtgtataatgtgctttatttgcaaatcacccactcctttacaaccatactttatatatgtacatacattcatactgtagaaaccagctcatgtgtacctcatatcccatccttaagagaagaaatgttataaagtagaactaaatataaattttcagaattaatgcattcaaagtaatatatcaaatccaggactttgttaacttcaggtaaaaacttcattagggtaatatcatctcaattttttcaaatgaaaggattctctaattagaaatttatatgtcagagctgttataaatttatcaactgtcaaatatgttctggacagctaaatcatttgagatttttggttttttgatttctattccctaacttgtgaagacaatgaaaaatcaggcagaaatatttagtatctagtcagtatctgtagctacactgtataactgttcttcaataaaatggttcatattttataga

SEQ ID NO: 145146 - protein, 435 aa, Artificial Sequence
  derived and/or modified sequence
MLCGFQEDATPPPPPRPRRLHRRLPRPEEVGMLSLPPGLLTVSGSAAAADAVPLRPGDWAGVSTADRGERAPLGPAFCDLAVSPTSPAWRGEEDEGAKASSGDIGSLDYQEFVVDIESRLRMEGVELKEEWQDEDFPIPLPEDDSIEADILAITGPEDQPGSLEVNGNKVRKKLMAPDISLTLDPSDGSVLSDDLDESGEIDLDGLDTPSENSNEFEWEDDLPKPKTTEVIRKGSITEYTAAEEKEDGRRWRMFRIGEQDHRVDMKAIEPYKKVISHGGYYGDGLNAIVVFAVCFMPESSQPNYRYLMDNLFKYVIGTLELLVAENYMIVYLNGATTRRKMPSLGWLRKCYQQIDRRLRKNLKSLIIVHPSWFIRTLLAVTRPFISSKFSQKIRYVFNLAELAELVPMEYVGIPECIKQVDQELNGKQDEPKNEQ

SEQ ID NO: 145147 - protein, 376 aa, Artificial Sequence
  derived and/or modified sequence
MEPCPSSAPPPFYPGVGEVAGLRWFSIYDQRPSWYRTKKLGLLDIGSLDYQEFVVDIESRLRMEGVELKEEWQDEDFPIPLPEDDSIEADILAITGPEDQPGSLEVNGNKVRKKLMAPDISLTLDPSDGSVLSDDLDESGEIDLDGLDTPSENSNEFEWEDDLPKPKTTEVIRKGSITEYTAAEEKEDGRRWRMFRIGEQDHRVDMKAIEPYKKVISHGGYYGDGLNAIVVFAVCFMPESSQPNYRYLMDNLFKYVIGTLELLVAENYMIVYLNGATTRRKMPSLGWLRKCYQQIDRRLRKNLKSLIIVHPSWFIRTLLAVTRPFISSKFSQKIRYVFNLAELAELVPMEYVGIPECIKQVDQELNGKQDEPKNEQ

SEQ ID NO: 145148 - DNA, 1308 bp, Artificial Sequence
  derived and/or modified sequence
atgctgtgtggatttcaggaagacgcgacacctccacctcctcctcggcccagaaggctgcaccgacgcttaccccgaccggaggaagtaggaatgcttagtcttccgccaggtctgctgactgtctcaggctcagcagccgccgcggacgccgtgcccttgcgccccggagattgggctggcgtctccacagccgataggggcgagagagcccccctgggcccagctttttgtgacctggctgtcagtcccacatctccggcctggcggggtgaggaagacgaaggcgctaaggcgtcatcaggcgacatcggatccctcgattaccaggagtttgtggtggatatcgagtctcgcctgcgcatggaaggggtggagctcaaagaggaatggcaggatgaagacttccctattccgctgccagaggatgacagcatcgaagccgacattcttgccattaccggccccgaggatcaacctgggtcattagaggtcaatggtaacaaggtccgcaaaaaactcatggccccagatatttccctgactctggatccttctgatgggtctgttttgagcgacgaccttgacgaatcaggggagatagatcttgacggattggatactcccagtgagaatagcaacgagttcgaatgggaggatgatctgcctaagccaaaaacaaccgaggtgattcgaaaggggtcaatcaccgaatatacagccgcagaggagaaggaggatggtaggagatggaggatgttccgaatcggagaacaagaccatagagtggatatgaaggcaattgagccatacaagaaagtgatctcacatggcggctattacggcgacggtcttaacgcaatagtagtttttgcagtgtgctttatgcccgagagctcgcagccgaactaccgctacctgatggataatctgtttaagtacgtgataggaaccctagagttgctggtggcagaaaactacatgatagtgtacttaaatggcgccactaccaggcgaaaaatgccaagtctgggttggttgcgaaagtgttatcaacagatcgataggcgtctacgcaaaaacttgaaatccctcatcatcgtgcacccatcctggtttatccgtaccctgctggctgttacaagaccattcatctcaagcaaattctctcaaaagatccgatatgtatttaatttggcagagcttgccgaactggtaccaatggagtatgttggcattcctgaatgtatcaagcaggtggaccaagaactgaatggcaaacaagatgagccaaaaaatgagcagtag

SEQ ID NO: 145149 - DNA, 1131 bp, Artificial Sequence
  derived and/or modified sequence
atggaaccctgtccaagcagtgctcctccaccattttacccaggcgtgggagaggtcgctgggcttaggtggttctcaatttacgaccagaggccaagctggtataggactaaaaagctgggactcttggacatcggatcattggactaccaggagttcgtcgtagacatcgagtccaggctgagaatggaaggagtggagcttaaagaagaatggcaagatgaagatttccccatcccccttccagaagacgacagtattgaggccgatattctcgccattacaggtccagaggaccaacccggatccctggaagttaatggcaacaaggttaggaaaaagctgatggcccctgacattagcctgacactggatccgtccgacggatcagtgttgtcggatgacctggacgagagtggtgagattgacctagacggccttgatacaccttctgaaaacagcaacgagtttgaatgggaagatgacttacccaagcctaaaaccaccgaggtgattcggaagggttctataaccgaatacaccgcagcggaggagaaggaggatggtagaaggtggcggatgtttcgcattggtgagcaagaccatcgggtggacatgaaggcgatcgagccatataaaaaggtaatttcacacgggggttactatggggatggactaaacgctattgtagtgttcgccgtgtgttttatgcccgagtcctcccagcccaattatcggtatctgatggacaacctcttcaaatatgtgattggaacactcgaactgctggtcgcagagaattatatgatcgtttacctgaatggggctacgacccgacgcaagatgccatctcttggctggcttaggaagtgttatcagcagatcgaccgcagacttagaaaaaatcttaaaagtttaataattgtccaccctagttggtttattcggacactgttagccgtgacacggccattcataagctcaaaattctctcagaaaatccggtacgttttcaatttagcagagttggcagagctcgtgcctatggaatatgtgggcattcccgagtgcattaagcaagttgatcaggagttaaatggcaaacaggatgagccaaagaatgagcaatag

SEQ ID NO: 145150 - DNA, 1308 bp, Artificial Sequence
  derived and/or modified sequence
atgctgtgtggcttccaggaggatgccaccccacctcctccaccccggccccggcggctgcaccggcggctgcccaggcctgaggaggtgggcatgctgagcctgcccccaggcctgctgactgtgtctggcagcgctgctgctgctgatgctgtgcccctgcggcctggggactgggccggcgtgtccacagctgacagaggagagcgggcccccctgggccctgccttctgtgacctggccgtgagccccaccagccctgcctggagaggagaagaagatgagggcgccaaggccagcagcggggacatcggcagcctggactaccaggagtttgtggtggacatcgagagccggctgaggatggagggcgtggagctgaaggaggagtggcaggatgaggacttccccatccccctgcctgaagatgacagcattgaggccgacatcctggccatcaccggccctgaggaccagcccggcagcctggaggtgaatggaaacaaggtgaggaagaagctgatggccccagacatcagcctgaccctggaccccagtgatggctctgtgctgagtgatgacctggatgagagcggggagattgacctggatggcctggacacccccagcgagaacagcaatgaatttgagtgggaggatgacctgcccaagcccaagaccacagaggtgatcaggaagggcagcatcacagagtacacagctgctgaggagaaggaggatggaagacgctggaggatgttccgcatcggggagcaggaccaccgggtggacatgaaggccatcgagccctacaagaaggtgatcagccatggaggctactatggagatggcctgaatgccatcgtggtgtttgctgtgtgcttcatgcctgagagcagccagcccaactaccgctacctgatggacaacctcttcaagtatgtgattggcaccctggagctgctggtggccgagaactacatgattgtgtacctgaatggagccaccaccaggaggaagatgcccagcctgggctggctgaggaagtgctaccagcagattgaccggcggctgaggaagaacctgaagagcctcatcatcgtgcaccccagctggttcatccgcaccctgctggccgtgacccggcccttcatcagcagcaagttcagccagaagatccgctacgtgttcaacctggccgagctggccgagctggtgcccatggagtatgtgggcatccctgagtgcatcaagcaggtggaccaggagctgaatggcaagcaggatgagcccaagaatgagcagtag

SEQ ID NO: 145151 - DNA, 1131 bp, Artificial Sequence
  derived and/or modified sequence
atggagccctgccccagcagcgcccccccacccttctacccaggagtgggggaggtggccggcctgcgctggttcagcatctatgaccagaggcccagctggtaccgcaccaagaagctgggcctgctggacatcggcagcctggactaccaggagtttgtggtggacatcgagagccggctgaggatggagggcgtggagctgaaggaggagtggcaggatgaggacttccccatccccctgcctgaagatgacagcattgaagctgacatcctggccatcactggacctgaggaccagcccggcagcctggaggtgaatggaaacaaggtgaggaagaagctgatggccccagacatcagcctgaccctggaccccagtgatggctctgtgctgagtgatgacctggatgaaagtggagaaattgacctggatggcctggacaccccatctgagaacagcaatgaatttgagtgggaggatgacctgcccaagcccaagaccacagaggtgatcaggaagggcagcatcacagagtacacagctgctgaggagaaggaggatggccgccgctggaggatgttcagaattggagagcaggaccaccgggtggacatgaaggccatcgagccctacaagaaggtgatcagccacggcggctactatggagatggcctgaatgccatcgtggtgtttgctgtgtgcttcatgcctgagagcagccagcccaactaccgctacctgatggacaacctcttcaagtatgtgattggcaccctggagctgctggtggccgagaactacatgattgtgtacctgaatggagccaccaccaggaggaagatgcccagcctgggctggctgaggaagtgctaccagcagattgaccggcggctgaggaagaacctgaagagcctcatcatcgtgcaccccagctggttcatccgcaccctgctggccgtgacccggcccttcatcagcagcaagttcagccagaagatccgctacgtgttcaacctggccgagctggccgagctggtgcccatggagtatgtgggcatccctgagtgcatcaagcaggtggaccaggagctgaatggcaagcaggatgagcccaagaatgagcagtag

SEQ ID NO: 145152 - DNA, 1308 bp, Artificial Sequence
  derived and/or modified sequence
atgctgtgcggcttccaggaggacgccacccccccccccccccccagaccaagaaggttacatcgaagactgcccagaccggaagaagtcggcatgttatcccttccaccaggcctacttacggtgtccggtagtgcggcagccgccgacgcagttccactgagaccgggtgattgggccggtgtgtcaaccgcggacaggggcgagcgggcccctctgggaccagcattctgtgatttggcagtctcacccacttccccggcttggagaggggaagaggacgagggagcaaaagcatcatctggtgacatcgggagcttggactaccaggagtttgtagtagatattgaaagcagactgagaatggagggtgtcgagctgaaggaggagtggcaggatgaagactttcccattccactgcccgaggacgattccattgaagctgacatccttgccatcacaggccccgaagatcagcctggtagcctggaggtgaacggcaataaagtgcgtaagaaactgatggcccctgatatctctctgactttggaccctagcgacggcagtgtgcttagcgatgaccttgacgaatctggagagattgatctagatgggttagatactccgtctgagaattcaaacgagttcgagtgggaagatgacttaccaaagcccaagactactgaggtgattcggaagggttccattactgagtacacagctgcagaggagaaagaggatggccgtaggtggagaatgtttcgcataggagagcaggaccacagggtggacatgaaggcaatcgagccttacaagaaagtcatctctcacggaggttactacggggatggtctcaatgccatcgtggtttttgccgtgtgctttatgcctgagtctagccaacccaattaccgctacctaatggacaacttgttcaagtatgtgattgggactcttgagctgctcgtcgccgagaactacatgattgtttatcttaatggtgccactacacgacgcaaaatgcctagcctgggctggttgcggaagtgctaccagcagatcgataggagactgaggaaaaacctgaaatccttgataattgtgcatcctagctggttcattagaaccctgctggccgtgacgcggccgtttatttcttcaaaattttcgcagaagattcgctatgtttttaacctggcggaacttgccgagctggtgccaatggaatatgttgggatcccagagtgtattaaacaggtggatcaagagctgaatggcaagcaagacgagccaaaaaacgaacaatag

SEQ ID NO: 145153 - DNA, 1131 bp, Artificial Sequence
  derived and/or modified sequence
atggagccctgccccagcagcgcccccccccccttctaccccggcgtgggcgaggtcgcaggactgagatggttttccatctacgatcagagaccaagttggtaccgtactaaaaagctaggcttgttggatatcggaagcctcgactaccaagagtttgttgtggacatagaatcacggcttaggatggagggtgtggagttaaaggaggagtggcaggatgaggatttcccaatcccgctgccagaagatgactctatagaggccgacattctagcaattactggcccggaggaccaaccaggatctctcgaagtgaatggcaacaaggtccggaagaaactgatggctccggatatctccttgaccctcgatcctagtgatggctcggtactgtcagatgaccttgatgagtccggcgagattgacctggatggtttggacacgcccagcgagaattctaacgagttcgagtgggaagatgatttaccaaagccaaagaccaccgaggtgatcaggaaaggttctataacggagtacacagccgctgaagaaaaggaagatggcaggagatggagaatgtttcgcattggcgagcaagatcacagggtggacatgaaagcaattgaaccatacaagaaagttatctctcacggaggatattatggtgacgggcttaatgcgatcgtcgtgtttgccgtgtgcttcatgcctgagagtagtcaaccaaactatcggtacctgatggacaatttgttcaaatacgtgatcggaactctcgagctgctcgttgcagagaattacatgattgtgtaccttaacggcgctacgacacgcagaaagatgcccagtctgggatggctgcggaaatgctaccagcagatcgatcgcagactacgaaagaatctcaagagcttgatcattgtgcacccgtcctggtttatccgaacattgctggctgtcacgcgccccttcatctctagcaagttttctcaaaaaataagatacgtctttaacttagctgagttggcagaactggtgccaatggaatatgtgggaatacctgaatgtattaaacaggtagatcaagagctgaacgggaagcaggatgagcctaagaacgagcaatag

SEQ ID NO: 145154 - DNA, 1308 bp, Artificial Sequence
  derived and/or modified sequence
atgctctgcggcttccaggaggatgccacgcctcctcctcctccgaggcctcgacgattacaccggagattgccgagacccgaagaggtcggtatgctgagtctgcctcccggattgctcactgtgtccggctcggcagccgcagccgatgcagtgccactgagacctggcgactgggcaggcgtgtctactgcagacaggggagaacgggctccactcgggcctgccttctgtgacctcgcggtctcacctaccagtcccgcttggcgcggagaagaggacgaaggcgctaaagcatcttctggggacattgggagcctcgattatcaggagttcgtcgtggacattgagtctcggctgcgtatggaaggagtggagcttaaagaggaatggcaggacgaagattttccaatccctctccccgaggatgacagcattgaggccgacattctcgcaataaccgggccagaagatcaacctgggtccctggaagtgaacggcaataaagtgcgcaagaaactcatggctccggacatcagcctgacattggacccttctgacgggagtgtgctgtctgatgatctggatgagtccggagaaatcgatctagacgggctcgatactccttcagaaaattctaatgagttcgagtgggaagacgacctgccgaaaccaaagaccacagaggtcatcaggaaagggtccattactgagtacactgctgctgaagagaaggaggacggaaggagatggcgtatgtttcgtatcggtgagcaagaccatagggtagacatgaaagcaattgagccatataagaaggttatttctcatggcggatactatggggatggactgaacgccatcgtggtttttgccgtgtgtttcatgccagagagttcgcagcccaactacaggtacctgatggacaacctattcaagtatgtgatcggcactctcgaattactggtcgcagagaactatatgattgtgtatttaaacggagccaccacgcggagaaaaatgccctcactgggctggctgcgcaagtgctaccagcaaatcgatcgacgtctgcggaaaaatttgaagtctctgattattgtgcatccatcgtggtttatcaggaccctcctggcggtcactaggcccttcatcagctctaagttctctcagaaaattcgctacgtgttcaacctcgcggaacttgcagagctcgtccccatggagtacgtgggaattccagaatgcattaagcaggtcgaccaggaactgaacggcaagcaggacgagcccaagaacgagcagtag

SEQ ID NO: 145155 - DNA, 1131 bp, Artificial Sequence
  derived and/or modified sequence
atggagccctgccccagcagtgctcccccacctttttaccctggagtgggcgaagtagcaggccttcgttggttctccatctacgaccagcgcccaagttggtatcggacgaagaaactcggcctccttgacatcggcagcctggattaccaggagttcgtagttgacatagaaagtcggctccgcatggagggagtggagctcaaagaagaatggcaggatgaagacttcccaatccctctgcccgaagatgatagcattgaagcagatatcctggccatcactggccctgaggaccagccaggctcattggaggtaaacggcaataaagtgagaaagaaactgatggctcctgacatcagcctcacacttgacccatctgacggctctgttctctccgatgacctcgacgagtcaggtgagatcgacctggacggtttagacactccctctgaaaattcaaatgaattcgaatgggaagacgatctgcctaaaccgaagacgacggaggtgattcggaaaggcagcatcactgaatatacggctgcggaagagaaggaggatgggagaaggtggcggatgttcaggataggtgagcaagaccatagagtggacatgaaggcaatcgagccttacaagaaggttatatcccatggaggatactatggcgatggacttaacgccatcgttgttttcgcagtgtgttttatgcctgagtcaagccaacccaactaccggtatcttatggacaacctgtttaaatacgtgatcggaaccctggaattgctggtggcagagaactatatgatcgtctatctaaacggtgctactactcggagaaaaatgccttcactggggtggcttcgaaaatgctatcagcaaattgaccggaggctgcggaagaacctaaaaagtttgataatcgttcatccttcatggttcattcgtactctgctggccgtgacccgcccttttatttcaagtaagttttctcagaagatacgatacgtttttaacctggccgaactggccgagctggttcctatggaatatgtgggcattcctgagtgcataaaacaagtcgatcaagagctaaacggcaagcaggacgaacccaagaatgagcagtag

SEQ ID NO: 145156 - DNA, 6325 bp, Artificial Sequence
  derived and/or modified sequence
agtcgacgcgacgggtccgcccacaggcaaggaaggccgaccccgcgagtgcaggcgcgagcgctagcccgtgacgtctgagggggttggggggatgctgtgtgggtttcaagaagacgccacgcctccgccgccgccacgcccccgccgcctccaccgccggctgccgcgcccggaggaggtcgggatgttatcacttccgccggggcttctcactgtgtccgggtcagctgctgccgccgacgccgtaccgctgcggccgggggattgggccggggtctccaccgccgaccgaggggagcgggctccgctcggccctgctttttgcgacctggccgtcagccccacgtcgccggcctggaggggcgaagaggacgagggggccaaggcttcctccggggacattggctccctggattatcaagagtttgtagttgacattgaatccaggctgaggatggaaggtgtggaacttaaagaagaatggcaagatgaagattttccgatacctttaccagaagatgatagtattgaagcagatatactagctataactggaccagaggaccagcctggctcactagaagttaatggaaataaagtgagaaagaaactaatggctccagacattagcctgacactggatcctagtgatggctctgtattgtcagatgatttggatgaaagtggggagattgacttagatggcttagacacaccgtcagagaatagtaatgagtttgagtgggaagatgatcttccaaaacccaagactactgaagtaattaggaaaggctcaattactgaatacacagcagcagaggaaaaagaagatggacgacgctggcgtatgttcaggattggagaacaggaccacagggttgatatgaaggcaattgaaccctataaaaaagttatcagccatgggggatattatggggatggattaaatgccattgttgtgtttgctgtctgtttcatgcctgaaagtagtcagcctaactatagatacctgatggacaatctttttaaatatgttattggcactttggagctattagtagcagaaaactacatgatagtttatttaaatggtgcaacaactcgaagaaaaatgcccagtctgggatggctcaggaaatgttatcagcaaattgatagaaggttacggaaaaatctaaaatccctaatcattgtacatccttcttggtttatcagaacacttctggctgttacaagaccatttattagctcgaaattcagccaaaaaattagatacgtgtttaatttggcagaactagcagaacttgtccccatggaatacgttggcataccagaatgcataaaacaagttgatcaagaacttaatggaaaacaagatgaaccgaaaaatgaacagtaagtttggcatctagtccaaacaagactgaagaatgtgctgatggagcagtgctgtttctgcattcataatgcatttattggcccatatttttatgtaacctgttacaaaatagacttgactttttcataatggacttttgtattatacaagggactgttcactgctgtactggtttgcaaatttcttgaatttagctctttaatagctaactgtattattatcgttttatattttatattgctaaatagagaaccacactttatataaagtagtttttgcatttgtttattgaatgatgcatcttcttcggtgaaatatttatatgcataaatggcaaaggaaagaaataatatatatttttatgtcattgagcaatattttttaatgtgtacctgtcttatggaagaaatatgcaggtatataagaccacgattttctaaagtgcatattagaatttttgtttttgtaaatggttaaatacatttcctgggtaacttaggaaattaagtttttcataaggcaacagatggttaaactgattgtcatgaatacccaaagatcatgtatataatcgaagtgtattagtaccatcccaaggtttttttctcatttaacatatttgtttcataattcagcaagtacagatgcaagcgcattgcacactttttcctttctaaacttaaagacaagtcaaaaagccattcttagaactagaggatttaagagggtaggaattagggtttgtatatatgtatatatgggacattttatcttctggcccaaagtcagaactttataaaaatcttgagtttgttcactaatgtgaaataagctatgtgtccagggtattgctcccctgagtgtatatgagtgctgagtagtattgcagagaatgtgatgagttattcactgtcacaactttttctatagaaaacaggggctgctttttaaactctcactatgggcactttaccaaaatacttccatatcaattatttgaactcggtagttgtttgacctagttagatgtggtgtttattcaagtttgtatgaaatcatgtttgacaatactgtaaattaggttaattttgtaagtcttagcatcatcatattgtgctgttttggataacacgtttgttacaagcatttaaactgtttcatttggtagtacctttacattgaaataaattgtgtttgtgcctccaaacaaaaagtttaattaccgacaaaattatttctaaaacaacagattgatctgatattgtgtcatatacttgaaaggctcatacacagctggtaagcataataccttccaaatttgaaggtcatggctactcttcaacccttcctgtaaggtattttacaaaacagtggcctagagtagcaaaattgaagtggatgtgagctaacctttcaagatttagtctatcctagattgaacacacatgtggctgtgaccattctcatgtacttacaaaccttctgttacaaaagggaactttcctatattttttgtcctcctcagtcctaaacttggcatgctaacttaaaaccagttataggagagagatgctggaggattcccaggatgaaacattcctcagcagcctcctgacttaactcagatccagcagctcttggcagatcctgaactaatgtcattacagtgaattgagccaaaacgattattgcttgctcacattttaggaacacttgttgttgaagaagcaaactaacaataacaagttaggcattccttctgaatttaccatataaggattatgtataaacaattatattgaatttgtcattagattctatatttgtagacgatttaacgtagtctttcatctgtacatctttatcttgctcaaaatgggctgaggtttttaataggtggttttctaccacattaagtacttggttcttcagtttaaaaaatatgaagaataacttcaactcttttttgcattattttgatttttgattttgcagtcattgctcctaactgtagatacatgttgcaaaagtgatgtttttctgaattttttttaaaagtagaagactattctgttaaacattaaaattcagagacaacagtgataacacctgggatataatgaaaatgaggtgctgtgaatcagtaaactaaagggatacctgctttaacctgcaccttaatggaatctggtatagagatgtacccacaataaatgttttataagatttaagatcataatagtaggttagaggaagagcatttattaagtctgttgtttctaatctatagctaagttaacatttcccatattattccattttaatttcccattactgaccaaggtgaaagtatatgtgattgtacttttatctttctgttgggatcatggatctaatttaactggcttaatttgatgcttctgtcactaggctctaagtgccccttttttagtcagaagtttttcatgtgaaataatttgattctgtgttctgcttgatcatactcctaagcaagcaccaagggaagacgttctattcaccccacaatttaagcttaacaatctttaactcagagggagatatgaagaaatatgattctaagtagggtctagcagaggcattggaaagtgataaaagtaggaagtaagagaaagcaaacctttataaagagataaagacatagttgttacctaagatgccactgtatgtgtgccctctctttttttttttttttttttggagacagagactcactctgtcacccattctggagtgcagtggcgcaatcctggctcactgcaacctctgcctcccgggttcaagcatttctcctgcctcagcctcctgagtagctgggattacaggcacacgccacaatgcccggctaatttttgtatttttagtagagacggggtttcgccatgctaggctggtctcgaactcctgacctcatgatctgcctgtctcagcctcccaaatgcttggattacaggcttgagccaccacgcccggccatgtgtgtccttttaagggaagtaccatatgtgactgctgatggtaacatttcttgtatgcagcaggaaaacctgcaggctatacgcaaggtatgtgaataaagactgtggattgaagggggaaaagttgataatacatacccatgataagaattcatattttctctttctttgtctcttcatacagaagcaagttcgagcagagaaggttagcagttacagcacttaaaagtttaggattgagggtttttggttggtttttttgttttttcatatttcactgttgctgaacattgatttagtcttccaaaatggacatcactagtaagtgcactgaatactgaaatatgctgattggcaagcatatatctgtagctagaatttttttaaccgtaattccagaatttaaaaaggtaagagatctgctttttgatagaggccttttaaaaagactatataacatttctatttggctgtttatgtgaatgctcagggaatttggacatgtgttttatacagaagtggctttttatatttcttcaagtgataaattagcattaggacatatcagatagaacaggccagtttcctgatgagattggtagagatgttacggtaggttcatccttcctttttccatgttatatgtggagaagtgttaaacttgctcaagcaaatgggagtaggagataggctgaaaatagagattgctacaccattctattttgttttcatgcctgttttttctccaatcctatatggacatttgagaaatggaccacaaatctgagagggatagagtaaaaagaggcattaatgtatgtactcacaagttagacctattttgctgttaaaataggtctggtcttgttataggtcataggaattgtgtagtttgagttgctgcgagaaagagtcaagaacttagacttgaatgggaaggccaactggtgagggaagtggggtattatctactcaaatgttctaagctaatacaaaagaattacctggcaagcatccccctctgcccttcttgaaattctgaatgaacttagaatcagatcaatggtgagacccagttatgtaactttcctttgaagttctaaaggataattgaaaataaagtagtctggcatgtttaacagtaaggagtgacactaaaatttgaatataacagtatgttgcaactatttataatagacctatttatgttttgagaactaagtaaaatgctatgaaaaattcacataaagcacgtaagcaccaaatgaaaatcatttcgtgctttcaaattaatgatactaggcttgtaggatgtcttagaatcatgtttaacaagaagttaaaatatttgcattttgaaatttttatgcagtttggctaaggaggaacttggaaaataacattcatcagcttctacactgcactttttgtatgtggactttgtaaagtttaatgtccgtttaacagttgcttgtttatttgtgtaaacctagctagtaaatattgatgatgttcagggccactgacttgcacagcccttggagcactattcacacagaacacaattcagagtttgttaagacattaacacactttgatatctattccaaaaatacttttgttaccacaggttcattgctgtcatttagacaaaattaatgtactgtgatattttcctactcttaagatgatgttgcccagccgagtactgtcagaaattcagttctgatgtctgtgtgtgcaagatattaatgtggtccctgtaagaaataccagagttggtcatgatttactaaggagatgtaatattttctttgacctgttaggaatataacttgtgtcttgatttgttgcacatcatattttttgcaacattaatgaatttaaataaattaattggaacgtt

SEQ ID NO: 145157 - DNA, 1509 bp, Artificial Sequence
  derived and/or modified sequence
ctgtttgtatttggcagtttggccccccaccccgtcgcttttccgtttctggtagttgtgctcgggatggaaccttgcccctcctccgctcccccacccttttaccctggtgtgggtgaagtggctgggctacgatggttcagtatttatgaccagcgtccgtcctggtacagaacaaagaaacttggacttctggacattggctccctggattatcaagagtttgtagttgacattgaatccaggctgaggatggaaggtgtggaacttaaagaagaatggcaagatgaagattttccgatacctttaccagaagatgatagtattgaagcagatatactagctataactggaccagaggaccagcctggctcactagaagttaatggaaataaagtgagaaagaaactaatggctccagacattagcctgacactggatcctagtgatggctctgtattgtcagatgatttggatgaaagtggggagattgacttagatggcttagacacaccgtcagagaatagtaatgagtttgagtgggaagatgatcttccaaaacccaagactactgaagtaattaggaaaggctcaattactgaatacacagcagcagaggaaaaagaagatggacgacgctggcgtatgttcaggattggagaacaggaccacagggttgatatgaaggcaattgaaccctataaaaaagttatcagccatgggggatattatggggatggattaaatgccattgttgtgtttgctgtctgtttcatgcctgaaagtagtcagcctaactatagatacctgatggacaatctttttaaatatgttattggcactttggagctattagtagcagaaaactacatgatagtttatttaaatggtgcaacaactcgaagaaaaatgcccagtctgggatggctcaggaaatgttatcagcaaattgatagaaggttacggaaaaatctaaaatccctaatcattgtacatccttcttggtttatcagaacacttctggctgttacaagaccatttattagctcgaaattcagccaaaaaattagatacgtgtttaatttggcagaactagcagaacttgtccccatggaatacgttggcataccagaatgcataaaacaagttgatcaagaacttaatggaaaacaagatgaaccgaaaaatgaacagtaagtttggcatctagtccaaacaagactgaagaatgtgctgatggagcagtgctgtttctgcattcataatgcatttattggcccatatttttatgtaacctgttacaaaatagacttgactttttcataatggacttttgtattatacaagggactgttcactgctgtactggtttgcaaatttcttgaatttagctctttaatagctaactgtattattatcgttttatattttatattgctaaatagagaaccacactttatataaagtagtttttgcatttgtttattgaatgatgcatcttcttcggtg

SEQ ID NO: 145158 - DNA, 1308 bp, Artificial Sequence
  derived and/or modified sequence
atgctgtgcggcttccaggaggacgccacccccccccccccccccagacccagaagactgcacagaagactgcccagacccgaggaggtgggcatgctgagcctgccccccggcctgctgaccgtgagcggcagcgccgccgccgccgacgccgtgcccctgagacccggcgactgggccggcgtgagcaccgccgacagaggcgagagagcccccctgggccccgccttctgcgacctggccgtgagccccaccagccccgcctggagaggcgaggaggacgagggcgccaaggccagcagcggcgacatcggcagcctggactaccaggagttcgtggtggacatcgagagcagactgagaatggagggcgtggagctgaaggaggagtggcaggacgaggacttccccatccccctgcccgaggacgacagcatcgaggccgacatcctggccatcaccggccccgaggaccagcccggcagcctggaggtgaacggcaacaaggtgagaaagaagctgatggcccccgacatcagcctgaccctggaccccagcgacggcagcgtgctgagcgacgacctggacgagagcggcgagatcgacctggacggcctggacacccccagcgagaacagcaacgagttcgagtgggaggacgacctgcccaagcccaagaccaccgaggtgatcagaaagggcagcatcaccgagtacaccgccgccgaggagaaggaggacggcagaagatggagaatgttcagaatcggcgagcaggaccacagagtggacatgaaggccatcgagccctacaagaaggtgatcagccacggcggctactacggcgacggcctgaacgccatcgtggtgttcgccgtgtgcttcatgcccgagagcagccagcccaactacagatacctgatggacaacctgttcaagtacgtgatcggcaccctggagctgctggtggccgagaactacatgatcgtgtacctgaacggcgccaccaccagaagaaagatgcccagcctgggctggctgagaaagtgctaccagcagatcgacagaagactgagaaagaacctgaagagcctgatcatcgtgcaccccagctggttcatcagaaccctgctggccgtgaccagacccttcatcagcagcaagttcagccagaagatcagatacgtgttcaacctggccgagctggccgagctggtgcccatggagtacgtgggcatccccgagtgcatcaagcaggtggaccaggagctgaacggcaagcaggacgagcccaagaacgagcagtag

SEQ ID NO: 145159 - DNA, 1131 bp, Artificial Sequence
  derived and/or modified sequence
atggagccctgccccagcagcgcccccccccccttctaccccggcgtgggcgaggtggccggcctgagatggttcagcatctacgaccagagacccagctggtacagaaccaagaagctgggcctgctggacatcggcagcctggactaccaggagttcgtggtggacatcgagagcagactgagaatggagggcgtggagctgaaggaggagtggcaggacgaggacttccccatccccctgcccgaggacgacagcatcgaggccgacatcctggccatcaccggccccgaggaccagcccggcagcctggaggtgaacggcaacaaggtgagaaagaagctgatggcccccgacatcagcctgaccctggaccccagcgacggcagcgtgctgagcgacgacctggacgagagcggcgagatcgacctggacggcctggacacccccagcgagaacagcaacgagttcgagtgggaggacgacctgcccaagcccaagaccaccgaggtgatcagaaagggcagcatcaccgagtacaccgccgccgaggagaaggaggacggcagaagatggagaatgttcagaatcggcgagcaggaccacagagtggacatgaaggccatcgagccctacaagaaggtgatcagccacggcggctactacggcgacggcctgaacgccatcgtggtgttcgccgtgtgcttcatgcccgagagcagccagcccaactacagatacctgatggacaacctgttcaagtacgtgatcggcaccctggagctgctggtggccgagaactacatgatcgtgtacctgaacggcgccaccaccagaagaaagatgcccagcctgggctggctgagaaagtgctaccagcagatcgacagaagactgagaaagaacctgaagagcctgatcatcgtgcaccccagctggttcatcagaaccctgctggccgtgaccagacccttcatcagcagcaagttcagccagaagatcagatacgtgttcaacctggccgagctggccgagctggtgcccatggagtacgtgggcatccccgagtgcatcaagcaggtggaccaggagctgaacggcaagcaggacgagcccaagaacgagcagtag

SEQ ID NO: 145160 - protein, 229 aa, Artificial Sequence
  derived and/or modified sequence
MSSHLVEPPPPLHNNNNNCEENEQSLPPPAGLNSSWVELPMNSSNGNDNGNGKNGGLEHVPSSSSIHNGDMEKILLDAQHESGQSSSRGSSHCDSPSPQEDGQIMFDVEMHTSRDHSSQSEEEVVEGEKEVEALKKSADWVSDWSSRPENIPPKEFHFRHPKRSVSLSMRKSGAMKKGGIFSAEFLKVFIPSLFLSHVLALGLGIYIGKRLSTPCQHLLRERKSPWKCV

SEQ ID NO: 145161 - protein, 219 aa, Artificial Sequence
  derived and/or modified sequence
MSSHLVEPPPPLHNNNNNCEENEQSLPPPAGLNSSWVELPMNSSNGNDNGNGKNGGLEHVPSSSSIHNGDMEKILLDAQHESGQSSSRGSSHCDSPSPQEDGQIMFDVEMHTSRDHSSQSEEEVVEGEKEVEALKKSADWVSDWSSRPENIPPKEFHFRHPKRSVSLSMRKSGAMKKGGIFSAEFLKVFIPSLFLSHVLALGLGIYIGKRLSTPSASTY

SEQ ID NO: 145162 - DNA, 660 bp, Artificial Sequence
  derived and/or modified sequence
atgtcttcgcacctggtagagccacctcccccactgcataacaacaataacaattgcgaggagaatgaacaaagtttacccccaccagccggactcaactcctcctgggttgaactgcccatgaattcatctaacggcaatgataatggtaatggcaagaatggcggcctagaacatgttccgtctagttcaagcatccacaacggtgacatggagaagatcctgctggacgctcagcatgaatctggacagtcgtcaagccgcggctcctcgcactgcgactcacccagccctcaggaggacggacaaatcatgtttgacgttgagatgcatacaagccgggatcatagttctcagtcagaggaagaagtggtcgaaggagaaaaagaagtggaggcacttaagaaaagcgctgactgggtcagcgactggtcatctaggcccgagaatatcccgcccaaggagtttcattttcgccaccccaaacgcagtgttagcctcagcatgcgtaaatctggggcaatgaaaaagggggggattttctctgctgagttcctgaaggtatttatcccctccctctttctcagccatgttttggccctgggcctgggaatatacatcgggaaaaggctgtctactccatcagctagtacctactag

SEQ ID NO: 145163 - DNA, 660 bp, Artificial Sequence
  derived and/or modified sequence
atgagcagccacctggtggagcccccaccacccctgcacaacaacaacaacaactgtgaagaaaatgagcagagcctgcccccacctgctggcctgaacagctcctgggtggagctgcccatgaacagcagcaatggaaatgacaatggaaatggcaagaatggaggcctggagcacgtgcccagcagcagcagcatccacaacggggacatggagaagatcctgctggatgcccagcacgagagcggccagagcagcagccggggcagcagccactgtgacagccccagcccccaggaggatggccagatcatgtttgatgtggagatgcacaccagccgggaccacagcagccagagcgaggaggaggtggtggagggggagaaggaggtggaggccctgaagaagtctgctgactgggtgtctgactggagcagcaggcctgagaacatcccccccaaggagttccacttccgccaccccaagaggtctgtgtccctgtccatgaggaagagcggggccatgaagaagggcggcatcttctctgctgagttcctgaaggtgttcatccccagcctcttcctgagccacgtgctggccctgggcctgggcatctacatcggcaagaggctgagcaccccatctgccagcacctactag

SEQ ID NO: 145164 - DNA, 660 bp, Artificial Sequence
  derived and/or modified sequence
atgagcagccacctggtggagccccccccccccctgcacaacaacaacaataattgcgaggaaaacgaacagtccctgccccctccagccggactgaattcgtcctgggttgagctgccaatgaacagctctaacggcaacgataatgggaacggtaaaaatggcggactagaacatgtgccctccagcagctctattcacaacggtgacatggaaaaaatcctgttggacgcccaacatgagagtggtcagtcctcaagccgcgggtcatcccattgtgacagtccttctccccaggaagacgggcagatcatgttcgacgtcgaaatgcatacgagccgcgatcacagttctcagtccgaagaggaggtagtggaaggagagaaggaggtggaagccctgaaaaagtccgcagattgggtgagcgactggtcgtccaggcctgagaatattcctcctaaagaatttcacttcagacacccaaagagatctgtttcgctgagcatgaggaagtccggagctatgaagaaaggtggtattttttcggccgaattcttgaaggtgtttattccatccctttttcttagccacgttctggctctggggttgggaatctatattggaaaacggctcagtacaccctctgcctcgacatactag

SEQ ID NO: 145165 - DNA, 660 bp, Artificial Sequence
  derived and/or modified sequence
atgagctctcaccttgtggagccacctccacctcttcataacaataataataattgtgaagagaatgagcagtcactgccccctccagccggactcaatagcagctgggttgagctccccatgaattcgtccaacggaaacgataatggcaacggtaagaacggcggtctggaacacgtccctagcagctcgagcatacacaatggggacatggagaaaatcctccttgatgcacagcacgaaagtgggcaatcgtcctcacggggatcatctcattgcgactcaccatccccacaggaggacggtcagattatgttcgacgttgaaatgcacacatcaagggaccactctagccagtctgaggaggaggttgttgaaggggaaaaggaggtagaggccctgaagaagtctgctgattgggtctccgactggtcaagtcggccagagaacattcccccaaaggagttccactttcgccatcccaagcgcagcgtgtccctgtccatgcgaaagtcaggggcaatgaagaaagggggtatcttttccgcagagtttttgaaagtgttcattccatctctttttctcagccatgtgttggcgctagggctaggcatctacattggcaagcgactgtccaccccaagtgccagcacatactag

SEQ ID NO: 145166 - DNA, 1234 bp, Artificial Sequence
  derived and/or modified sequence
ggactcggcttgttgtgttgctgcctgagtgccggagacggtcctgctgctgccgcagtcctgccagctgtccgacaatgtcgtcccacctagtcgagccgccgccgcccctgcacaacaacaacaacaactgcgaggaaaatgagcagtctctgcccccgccggccggcctcaacagttcctgggtggagctacccatgaacagcagcaatggcaatgataatggcaatgggaaaaatggggggctggaacacgtaccatcctcatcctccatccacaatggagacatggagaagattcttttggatgcacaacatgaatcaggacagagtagttccagaggcagttctcactgtgacagcccttcgccacaagaagatgggcagatcatgtttgatgtggaaatgcacaccagcagggaccatagctctcagtcagaagaagaagttgtagaaggagagaaggaagtcgaggctttgaagaaaagtgcggactgggtatcagactggtccagtagacccgaaaacattccacccaaggagttccacttcagacaccctaaacgttctgtgtctttaagcatgaggaaaagtggagccatgaagaaagggggtattttctccgcagaatttctgaaggtgttcattccatctctcttcctttctcatgttttggctttggggctaggcatctatattggaaagcgactgagcacaccctgccagcacctactgagggaaaggaaaagcccctggaaatgcgtgtgacctgtgaagtggtgtattgtcacagtagcttatttgaacttgagaccattgtaagcatgacccaacctaccaccctgtttttacatatccaattccagtaactctcaaattcaatattttattcaaactctgttgaggcattttactaaccttataccctttttggcctgaagacattttagaatttcctaacagagtttactgttgtttagaaatttgcaagggcttcttttccgcaaatgccaccagcagattataattttgtcagcaatgctattatctctaattagtgccaccagactagacctgtatcattcatggtataaattttactcttgcaacataactaccatctctctcttaaaacgagatcaggttagcaaatgatgtaaaagaagctttattgtctagttgttttttttcccccaagacaaaggcaagtttccctaagtttgagttgatagtta

SEQ ID NO: 145167 - DNA, 3610 bp, Artificial Sequence
  derived and/or modified sequence
gcgcgtcagcctgactcgagcgtctccacgtccggggcccgcaggggagcgcccctgccccgtccggtcgcttgttgtgttgtcatcacgtggcctgggcgggccctgacgtcaggggcaggggagggacggcgcaggcgcagaaaagggggcggcggactcggcttgttgtgttgctgcctgagtgccggagacggtcctgctgctgccgcagtcctgccagctgtccgacaatgtcgtcccacctagtcgagccgccgccgcccctgcacaacaacaacaacaactgcgaggaaaatgagcagtctctgcccccgccggccggcctcaacagttcctgggtggagctacccatgaacagcagcaatggcaatgataatggcaatgggaaaaatggggggctggaacacgtaccatcctcatcctccatccacaatggagacatggagaagattcttttggatgcacaacatgaatcaggacagagtagttccagaggcagttctcactgtgacagcccttcgccacaagaagatgggcagatcatgtttgatgtggaaatgcacaccagcagggaccatagctctcagtcagaagaagaagttgtagaaggagagaaggaagtcgaggctttgaagaaaagtgcggactgggtatcagactggtccagtagacccgaaaacattccacccaaggagttccacttcagacaccctaaacgttctgtgtctttaagcatgaggaaaagtggagccatgaagaaagggggtattttctccgcagaatttctgaaggtgttcattccatctctcttcctttctcatgttttggctttggggctaggcatctatattggaaagcgactgagcacaccctctgccagcacctactgagggaaaggaaaagcccctggaaatgcgtgtgacctgtgaagtggtgtattgtcacagtagcttatttgaacttgagaccattgtaagcatgacccaacctaccaccctgtttttacatatccaattccagtaactctcaaattcaatattttattcaaactctgttgaggcattttactaaccttataccctttttggcctgaagacattttagaatttcctaacagagtttactgttgtttagaaatttgcaagggcttcttttccgcaaatgccaccagcagattataattttgtcagcaatgctattatctctaattagtgccaccagactagacctgtatcattcatggtataaattttactcttgcaacataactaccatctctctcttaaaacgagatcaggttagcaaatgatgtaaaagaagctttattgtctagttgttttttttcccccaagacaaaggcaagtttccctaagtttgagttgatagttattaaaaagaaaacaaaacaaaaaaaaaaggcaaggcacaacaaaaaaatatcctgggcaataaaaaaaatattttaaaccagctttggagccacttttttgtctaagcctcctaatagcgtcttttaatttataggaggcaaactgtataaatgataggtatgaaatagaataagaagtaaaatacatcagcagattttcatactagtatgttgtaatgctgtcttttctatggtgtagaatctttctttctgataaggaacgtctcaggcttagaaatatatgaaattgctttttgagatttttgcgtgtgtgtttgatattttttacgataattagctgcatgtgaatttttcatgaccttctttacattttttattttttatttctttatttttttttctctaagaagaggctttggaatgagttccaatttgtgatgttaatacaggcttcttgttttaggaagcatcacctatactctgaagcctttaaactctgaagagaattgtttcagagttattccaagcacttgtgcaacttggaaaaacagacttgggttgtgggaacagttgacagcgttctgaaaagatgccatttgtttccttctgatctctcactgaataatgtttactgtacagtcttcccaaggtgattcctgcgactgcaggcactggtcattttctcatgtagctgtcttttcagttatggtaaactcttaaagttcagaacactcaacagattccttcagtgatatacttgttcgttcatttctaaaatgtgaagctttaggaccaaattgttagaaagcatcaggatgaccagttatctcgagtagattttcttggatttcagaacatctagcatgactctgaaggataccacatgttttatatataaataattactgtttatgatatagacattgatattgactatttagagaaccgttgttaattttaaaactagcaatctataaagtgcaccaggtcaacttgaataaaaacactatgacagacaggtttgccagtttgcagaaactaactcttttctcacatcaacatttgtaaaattgatgtgttatagtggaaaataacatatagattaaacaaaatttttatcttttttcaagaatatagctggctatctttaagaaagatgatatatcctagttttgaaagtaattttcttttttctttctagcatttgatgtctaaataattttggacatctttttcctagaccatgtttctgtcttactcttaaacctggtaacacttgatttgccttctataacctatttatttcaagtgttcatatttgaatttctttgggaagaaagtaaatctgatggctcactgatttttgaaaagcctgaataaaattggaaagactggaaagttaggagaactgactagctaaactgctacagtatgcaatttctattacaattggtattacaggggggaaaagtaaaattacactttacctgaaagtgacttcttacagctagtgcattgtgctctttccaagttcagcagcagttctatcagtggtgccactgaaactgggtatatttatgatttctttcagcgttaaaaagaaacatagtgttgccctttttcttaaagcatcagtgaaattatggaaaattacttaaaacgtgaatacatcatcacagtagaatttattatgagagcatgtagtatgtatctgtagccctaacacatgggatgaacgttttactgctacacccagatttgtgttgaacgaaaacattgtggtttggaaaggagaattcaacaattaatagttgaaattgtgaggttaatgtttaaaaagctttacacctgtttacaatttggggacaaaaaggcaggcttcatttttcatatgtttgatgaaaactggctcaagatgtttgtaaatagaatcaagagcaaaactgcacaaacttgcacattggaaagtgcaacaagttcccgtgattgcagtaaaaatatttactattctaaaaaaatgagaattgaagacttagccagtcagataagttttttcatgaacccgttgtggaaattattggaattaactgagccaaagtgattatgcattcttcatctattttagttagcactttgtatcgttatatacagtttacaatacatgtataacttgtagctataaacattttgtgccattaaagctctcacaaaactttt

SEQ ID NO: 145168 - DNA, 1352 bp, Artificial Sequence
  derived and/or modified sequence
gtggctccaccccttcaactttttgtccaagaaaacttttcgtgtttgcctgtagctgatgtgcagttgtttctgctcccaaatcaacagggtttaatgaaaaccctagaaagtagaaacccgtgggagagaaaagaaaaaagacaagttcacaaggttcctgggtggagctacccatgaacagcagcaatggcaatgataatggcaatgggaaaaatggggggctggaacacgtaccatcctcatcctccatccacaatggagacatggagaagattcttttggatgcacaacatgaatcaggacagagtagttccagaggcagttctcactgtgacagcccttcgccacaagaagatgggcagatcatgtttgatgtggaaatgcacaccagcagggaccatagctctcagtcagaagaagaagttgtagaaggagagaaggaagtcgaggctttgaagaaaagtgcggactgggtatcagactggtccagtagacccgaaaacattccacccaaggagttccacttcagacaccctaaacgttctgtgtctttaagcatgaggaaaagtggagccatgaagaaagggggtattttctccgcagaatttctgaaggtgttcattccatctctcttcctttctcatgttttggctttggggctaggcatctatattggaaagcgactgagcacaccctctgccagcacctactgagggaaaggaaaagcccctggaaatgcgtgtgacctgtgaagtggtgtattgtcacagtagcttatttgaacttgagaccattgtaagcatgacccaacctaccaccctgtttttacatatccaattccagtaactctcaaattcaatattttattcaaactctgttgaggcattttactaaccttataccctttttggcctgaagacattttagaatttcctaacagagtttactgttgtttagaaatttgcaagggcttcttttccgcaaatgccaccagcagattataattttgtcagcaatgctattatctctaattagtgccaccagactagacctgtatcattcatggtataaattttactcttgcaacataactaccatctctctcttaaaacgagatcaggttagcaaatgatgtaaaagaagctttattgtctagttgttttttttcccccaagacaaaggcaagtttccctaagtttgagttgatagttattaaaaagaaaacaaaacaaaaaaaaaaggcaaggcacaacaaaaaaatatcctgggcaataaaaaaaatattttaaaccagctttggagccacttttttgtctaagcctcctaatagcgtcttttaatttatagga

SEQ ID NO: 145169 - DNA, 739 bp, Artificial Sequence
  derived and/or modified sequence
ctctgttgcctcctggggtcttgggcccggggccgtttgggctcgcggtccgggagcggcgcgggtagcgcggatccccctggttcctgggtggagctacccatgaacagcagcaatggcaatgataatggcaatgggaaaaatggggggctggaacacgtaccatcctcatcctccatccacaatggagacatggagaagattcttttggatgcacaacatgaatcaggacagagtagttccagaggcagttctcactgtgacagcccttcgccacaagaagatgggcagatcatgtttgatgtggaaatgcacaccagcagggaccatagctctcagtcagaagaagaagttgtagaaggagagaaggaagtcgaggctttgaagaaaagtgcggactgggtatcagactggtccagtagacccgaaaacattccacccaaggagttccacttcagacaccctaaacgttctgtgtctttaagcatgaggaaaagtggagccatgaagaaagggggtattttctccgcagaatttctgaaggtgttcattccatctctcttcctttctcatgttttggctttggggctaggcatctatattggaaagcgactgagcacaccctctgccagcacctactgagggaaaggaaaagcccctggaaatgcgtgtgacctgtgaagtggtgtattgtcacagtagcttatttgaacttgagaccattgtaagcatgacccaa

SEQ ID NO: 145170 - DNA, 915 bp, Artificial Sequence
  derived and/or modified sequence
ctgtcaagaggaggggcgcctgccttgctccgggcctctctgttgcctcctggggtcttgggcccggggccgtttgggctcgcggtccgggagcggcgcgggttcctgggtggagctacccatgaacagcagcaatggcaatgataatggcaatgggaaaaatggggggctggaacacgtaccatcctcatcctccatccacaatggagacatggagaagattcttttggatgcacaacatgaatcaggacagagtagttccagaggcagttctcactgtgacagcccttcgccacaagaagatgggcagatcatgtttgatgtggaaatgcacaccagcagggaccatagctctcagtcagaagaagaagttgtagaaggagagaaggaagtcgaggctttgaagaaaagtgcggactgggtatcagactggtccagtagacccgaaaacattccacccaaggagttccacttcagacaccctaaacgttctgtgtctttaagcatgaggaaaagtggagccatgaagaaagggggtattttctccgcagaatttctgaaggtgttcattccatctctcttcctttctcatgttttggctttggggctaggcatctatattggaaagcgactgagcacaccctctgccagcacctactgagggaaaggaaaagcccctggaaatgcgtgtgacctgtgaagtggtgtattgtcacagtagcttatttgaacttgagaccattgtaagcatgacccaacctaccaccctgtttttacatatccaattccagtaactctcaaattcaatattttattcaaactctgttgaggcattttactaaccttataccctttttggcctgaagacattttagaatttcctaacagagtttactgttgtttagaaatttgcaa

SEQ ID NO: 145171 - DNA, 660 bp, Artificial Sequence
  derived and/or modified sequence
atgagcagccacctggtggagccccccccccccctgcacaacaacaacaacaactgcgaggagaacgagcagagcctgcccccccccgccggcctgaacagcagctgggtggagctgcccatgaacagcagcaacggcaacgacaacggcaacggcaagaacggcggcctggagcacgtgcccagcagcagcagcatccacaacggcgacatggagaagatcctgctggacgcccagcacgagagcggccagagcagcagcagaggcagcagccactgcgacagccccagcccccaggaggacggccagatcatgttcgacgtggagatgcacaccagcagagaccacagcagccagagcgaggaggaggtggtggagggcgagaaggaggtggaggccctgaagaagagcgccgactgggtgagcgactggagcagcagacccgagaacatcccccccaaggagttccacttcagacaccccaagagaagcgtgagcctgagcatgagaaagagcggcgccatgaagaagggcggcatcttcagcgccgagttcctgaaggtgttcatccccagcctgttcctgagccacgtgctggccctgggcctgggcatctacatcggcaagagactgagcacccccagcgccagcacctactag

SEQ ID NO: 145172 - DNA, 690 bp, Artificial Sequence
  derived and/or modified sequence
atgagcagccacctggtggagccccccccccccctgcacaacaacaacaacaactgcgaggagaacgagcagagcctgcccccccccgccggcctgaacagcagctgggtggagctgcccatgaacagcagcaacggcaacgacaacggcaacggcaagaacggcggcctggagcacgtgcccagcagcagcagcatccacaacggcgacatggagaagatcctgctggacgcccagcacgagagcggccagagcagcagcagaggcagcagccactgcgacagccccagcccccaggaggacggccagatcatgttcgacgtggagatgcacaccagcagagaccacagcagccagagcgaggaggaggtggtggagggcgagaaggaggtggaggccctgaagaagagcgccgactgggtgagcgactggagcagcagacccgagaacatcccccccaaggagttccacttcagacaccccaagagaagcgtgagcctgagcatgagaaagagcggcgccatgaagaagggcggcatcttcagcgccgagttcctgaaggtgttcatccccagcctgttcctgagccacgtgctggccctgggcctgggcatctacatcggcaagagactgagcaccccctgccagcacctgctgagagagagaaagagcccctggaagtgcgtgtag

SEQ ID NO: 145173 - DNA, 690 bp, Artificial Sequence
  derived and/or modified sequence
atgagctcacatctagttgaaccaccgccccctctgcataataacaacaacaattgtgaggagaacgaacagtctttgcctcctcctgcggggcttaacagctcctgggtggagttaccgatgaatagctctaacggtaatgataacggcaacgggaaaaacggcggtttggagcatgttccatcctcaagttcaatccataacggtgatatggaaaaaatcctgttggacgctcagcatgagtcaggtcagtcgagctcccgcggcagcagccactgcgactctccctctccccaagaagatggacagattatgttcgatgtagagatgcacacttccagagaccacagttcccaatccgaggaagaggtggtggaaggagaaaaagaggtggaggccctgaagaaaagtgcagactgggtaagcgactggtctagcagacctgaaaatattccaccgaaggagttccactttaggcaccccaaaagatcagtctccctgagtatgcgtaagtctggcgctatgaagaagggtgggatcttctccgcagagtttctaaaagtctttatccccagcttgttcctaagccatgttctggccctggggctgggcatttatattggaaagcgactctctaccccttgccagcacctgctgcgggaacggaagagcccctggaagtgcgtttag

SEQ ID NO: 145174 - DNA, 690 bp, Artificial Sequence
  derived and/or modified sequence
atgagcagccacctggtggagcccccaccacccctgcacaacaacaacaacaactgtgaagaaaatgagcagagcctgcccccacctgctggcctgaacagctcctgggtggagctgcccatgaacagcagcaatggaaatgacaatggaaatggcaagaatggaggcctggagcacgtgcccagcagcagcagcatccacaacggggacatggagaagatcctgctggatgcccagcacgagagcggccagagcagcagccggggcagcagccactgtgacagccccagcccccaggaggatggccagatcatgtttgatgtggagatgcacaccagccgggaccacagcagccagagcgaggaggaggtggtggagggggagaaggaggtggaggccctgaagaagtctgctgactgggtgtctgactggagcagcaggcctgagaacatcccccccaaggagttccacttccgccaccccaagaggtctgtgtccctgtccatgaggaagagcggggccatgaagaagggcggcatcttctctgctgagttcctgaaggtgttcatccccagcctcttcctgagccacgtgctggccctgggcctgggcatctacatcggcaagaggctgagcaccccctgccagcacctgctgcgggagaggaagagcccctggaagtgtgtgtag

SEQ ID NO: 145175 - DNA, 690 bp, Artificial Sequence
  derived and/or modified sequence
atgagcagccacctggtggagccccccccccccctgcacaacaacaacaataattgtgaagaaaatgaacagagtctgcctcccccagcgggattgaactcgtcgtgggtcgaactgcccatgaattcatcaaatggaaatgataatgggaatggtaagaatggggggctggaacacgtgccttccagctcttctatacataatggagatatggagaagattctcctcgacgctcagcacgagtcagggcagagcagcagtagaggctcgagccactgcgattcgcctagtcctcaggaggatggccagatcatgtttgacgtagagatgcacacaagccgggatcactcttcccagtccgaagaggaagttgtggaaggggagaaggaggtcgaagcactgaagaagagtgcagactgggtgtcggactggtctagcagacccgagaatattccaccgaaagagtttcacttcagacatccgaaacgtagtgtctcactctcaatgcgtaaaagcggcgcaatgaaaaaggggggaattttctccgcagaatttcttaaagtgttcatccctagtttgtttctgtcccatgtgctggctctgggccttggtatttacatcggcaaacggctatctaccccctgtcaacatttgctgcgggagaggaagtccccttggaagtgtgtgtag

SEQ ID NO: 145176 - DNA, 690 bp, Artificial Sequence
  derived and/or modified sequence
atgtctagccacctagtcgagccaccccctcccctacacaataacaataacaattgtgaagagaatgagcagagcctgccaccgccagccggtctaaactcctcatgggtggagctacccatgaatagctctaatgggaatgacaacgggaatggaaaaaacggcggattggaacatgtccctagttcttcatcaatccacaacggcgacatggagaagattctgctggacgctcagcacgagagcggacagtcaagttcaagaggttcatctcattgcgactcccctagtccccaggaggacgggcagataatgtttgacgtggagatgcatacgtctcgggatcactcctcccagtccgaggaagaggtagtggagggcgaaaaagaagtcgaggcacttaaaaagagcgctgactgggtcagtgactggtcctctcggcctgagaatatccccccaaaggagtttcactttcgccatcctaagcgtagtgtctcactaagcatgagaaaaagtggtgccatgaagaaaggaggcattttttctgcagagttcttgaaagtatttatacccagcttatttctgtctcatgtgctggccctgggcctgggtatttacatcggaaaacgccttagtactccatgtcaacacctcctcagggaaaggaagtccccctggaaatgtgtgtag

SEQ ID NO: 145177 - protein, 766 aa, Artificial Sequence [sequence omitted]

SEQ ID NO: 145178 - DNA, 2301 bp, Artificial Sequence
  derived and/or modified sequence
atggccgccctgagcggcggcggcggcggcggcgccgagcccggccaggccctgttcaacggcgacatggagcccgaggccggcgccggcgccggcgccgccgccagcagcgccgccgaccccgccatccccgaggaggtgtggaacatcaagcagatgatcaagctgacccaggagcacatcgaggccctgctggacaagttcggcggcgagcacaacccccccagcatctacctggaggcctacgaggagtacaccagcaagctggacgccctgcagcagagagagcagcagctgctggagagcctgggcaacggcaccgacttcagcgtgagcagcagcgccagcatggacaccgtgaccagcagcagcagcagcagcctgagcgtgctgcccagcagcctgagcgtgttccagaaccccaccgacgtggccagaagcaaccccaagagcccccagaagcccatcgtgagagtgttcctgcccaacaagcagagaaccgtggtgcccgccagatgcggcgtgaccgtgagagacagcctgaagaaggccctgatgatgagaggcctgatccccgagtgctgcgccgtgtacagaatccaggacggcgagaagaagcccatcggctgggacaccgacatcagctggctgaccggcgaggagctgcacgtggaggtgctggagaacgtgcccctgaccacccacaacttcgtgagaaagaccttcttcaccctggccttctgcgacttctgcagaaagctgctgttccagggcttcagatgccagacctgcggctacaagttccaccagagatgcagcaccgaggtgcccctgatgtgcgtgaactacgaccagctggacctgctgttcgtgagcaagttcttcgagcaccaccccatcccccaggaggaggccagcctggccgagaccgccctgaccagcggcagcagccccagcgcccccgccagcgacagcatcggcccccagatcctgaccagccccagccccagcaagagcatccccatcccccagcccttcagacccgccgacgaggaccacagaaaccagttcggccagagagacagaagcagcagcgcccccaacgtgcacatcaacaccatcgagcccgtgaacatcgacgacctgatcagagaccagggcttcagaggcgacggcggcagcaccaccggcctgagcgccaccccccccgccagcctgcccggcagcctgaccaacgtgaaggccctgcagaagagccccggcccccagagagagagaaagagcagcagcagcagcgaggacagaaacagaatgaagaccctgggcagaagagacagcagcgacgactgggagatccccgacggccagatcaccgtgggccagagaatcggcagcggcagcttcggcaccgtgtacaagggcaagtggcacggcgacgtggccgtgaagatgctgaacgtgaccgcccccaccccccagcagctgcaggccttcaagaacgaggtgggcgtgctgagaaagaccagacacgtgaacatcctgctgttcatgggctacagcaccaagccccagctggccatcgtgacccagtggtgcgagggcagcagcctgtaccaccacctgcacatcatcgagaccaagttcgagatgatcaagctgatcgacatcgccagacagaccgcccagggcatggactacctgcacgccaagagcatcatccacagagacctgaagagcaacaacatcttcctgcacgaggacctgaccgtgaagatcggcgacttcggcctggccaccgtgaagagcagatggagcggcagccaccagttcgagcagctgagcggcagcatcctgtggatggcccccgaggtgatcagaatgcaggacaagaacccctacagcttccagagcgacgtgtacgccttcggcatcgtgctgtacgagctgatgaccggccagctgccctacagcaacatcaacaacagagaccagatcatcttcatggtgggcagaggctacctgagccccgacctgagcaaggtgagaagcaactgccccaaggccatgaagagactgatggccgagtgcctgaagaagaagagagacgagagacccctgttcccccagatcctggccagcatcgagctgctggccagaagcctgcccaagatccacagaagcgccagcgagcccagcctgaacagagccggcttccagaccgaggacttcagcctgtacgcctgcgccagccccaagacccccatccaggccggcggctacggcgccttccccgtgcactag

SEQ ID NO: 145179 - DNA, 2301 bp, Artificial Sequence
  derived and/or modified sequence
atggccgctctgagcgggggaggaggcggaggcgcagagcccggccaggctctcttcaacggcgacatggaacccgaagccggcgcaggagccggggcagcggcttcctctgcagctgacccggcgatacctgaagaggtgtggaacattaaacagatgatcaagttgacccaggagcacatagaggcgctcttggataaattcggaggagagcataatcccccaagtatctacctcgaggcctatgaagagtacacttccaaattagacgccctccagcaaagggagcagcaacttctggaaagtctcggtaacggcaccgacttctccgtttcaagttcggctagtatggatacagtcacgtcttcaagcagctcctcactaagtgtgctcccttccagcttaagtgttttccagaaccctaccgatgtcgcaaggtcgaaccctaaaagcccacagaagcctattgtgagagtgtttctgcccaacaagcaaagaaccgtggttccagctaggtgcggagttaccgtgcgggactctctcaagaaagcgctgatgatgcgggggctcattcccgagtgttgcgccgtgtatagaattcaggacggggagaagaagcctattggttgggatacagatatttcatggctgacaggagaggagctgcacgtggaggttctggagaacgtaccactcactacacacaatttcgtgaggaagacgttttttactctggcattctgcgacttttgccgaaaactgctgttccaggggtttagatgccagacatgcggttacaaattccaccagcgttgttctacggaagtcccgctcatgtgtgtgaattatgaccagctggatttgctgttcgtgtccaagtttttcgagcaccatccgatacctcaagaagaagcttctctagcggagacagccctaacaagcggctcctctcctagcgctccagcctcagacagcatagggccccaaatcttaacttccccatctccaagcaagtctatacctattccacagccctttagaccagctgacgaggatcacagaaatcagttcggacagagagataggtctagctcagccccaaacgtgcatataaacactatcgaacctgtgaacattgacgaccttatccgagatcagggattcagaggggacgggggcagcacaacaggactttccgccacgcctccagcttccttacccggctcgctgacaaatgtaaaagccctgcagaaatcccctggacctcagagggagcgcaaatcctcgtctagctccgaggacagaaataggatgaaaacactgggccggagggactcctctgacgactgggagatccctgacggccagattaccgtaggacagcgaatagggtctggatccttcggaactgtgtacaaggggaagtggcatggggatgtcgctgtaaaaatgctcaatgtgacagccccaacaccccagcagcttcaggccttcaaaaatgaagttggggtcctcaggaagactcgacacgtcaatattttgctatttatggggtactccacaaaaccacagcttgccattgtgactcagtggtgcgaaggcagtagcctttatcaccatcttcatatcatcgagaccaaatttgagatgattaagctcattgacatagctagacagaccgcccagggaatggactatcttcacgcaaagtcaattattcacagggatctgaaatcaaacaatatcttcctccatgaggatcttacagtcaaaatcggcgattttgggctcgcaacggtgaagtccaggtggagcggctcacaccagtttgagcaattgagtggttccatcctgtggatggctcccgaggttattaggatgcaggacaaaaatccttactctttccagtccgacgtgtacgcgtttggaattgtgctgtatgagttgatgaccggccagctgccttatagcaacataaacaaccgcgaccagatcatttttatggtagggagaggatacctctccccagatttgtccaaggtaaggtccaattgccctaaggccatgaaacgcctgatggcagagtgtctgaaaaaaaagcgcgatgaaaggcccctgttcccccagattctcgcgtccatcgaattgctcgcccgttccttgcccaagatccaccgttctgcaagcgaaccaagccttaatagggccggcttccagaccgaggacttcagcctgtatgcatgtgcctcaccaaaaacaccaattcaggcgggcggttacggtgctttcccagttcattag

SEQ ID NO: 145180 - DNA, 2301 bp, Artificial Sequence
  derived and/or modified sequence
atggccgccctgagcggcggcggcggcggcggcgctgagcccggccaggccctcttcaacggggacatggagcctgaggccggggccggggccggggccgccgccagcagcgctgctgaccctgccatccctgaggaggtgtggaacatcaagcagatgatcaagctgacccaggagcacatcgaggccctgctggacaagtttggaggagagcacaacccccccagcatctacctggaggcctatgaggagtacaccagcaagctggatgccctgcagcagcgggagcagcagctgctggagagcctgggcaatggaacagacttctctgtgagcagcagcgcctccatggacacagtgaccagcagcagcagcagcagcctgtctgtgctgcccagcagcctgagcgtcttccagaaccccacagatgtggcccggagcaaccccaagagcccccagaagcccatcgtgcgggtcttcctgcccaacaagcagaggacagtggtgcctgcccgctgtggggtgacagtgcgggacagcctgaagaaggccctgatgatgaggggcctcatccctgagtgctgtgctgtgtaccgcatccaggatggagagaagaagcccatcggctgggacacagacatctcctggctgaccggggaggagctgcacgtggaggtgctggagaatgtgcccctgaccacccacaactttgtgaggaagaccttcttcaccctggccttctgtgacttctgcaggaagctgctcttccagggcttccgctgccagacctgtggctacaagttccaccagcgctgcagcacagaggtgcccctgatgtgtgtgaactatgaccagctggacctgctgtttgtgtccaagttctttgagcaccaccccatcccccaggaggaggccagcctggccgagacagccctgaccagcggcagcagccccagcgccccagccagtgacagcatcggcccccagatcctgaccagccccagccccagcaagagcatccccatcccccagcccttccggccagcagatgaggaccacaggaaccagtttggccagagggacaggagcagcagcgcccccaacgtgcacatcaacaccatcgagcctgtgaacattgatgacctgatccgggaccagggcttcagaggagatggcggcagcaccaccggcctgagcgccaccccaccagccagcctgcccggcagcctgaccaacgtgaaggccctgcagaagagccctggcccccagcgggagaggaagagcagcagcagcagtgaagatagaaacaggatgaagaccctgggcagaagagacagcagtgatgactgggagatcccagatggccagatcaccgtgggccagagaattggcagcggcagctttggcaccgtgtacaagggcaagtggcatggagatgtggccgtgaagatgctgaatgtgacagcccccaccccccagcagctgcaggccttcaagaatgaggtgggcgtgctgaggaagaccaggcatgtgaacatcctgctcttcatgggctacagcaccaagccccagctggccatcgtgacccagtggtgtgagggcagcagcctgtaccaccacctgcacatcatcgagaccaagtttgagatgatcaagctgattgacatcgcccggcagacagcccagggcatggactacctgcacgccaagagcatcatccaccgggacctgaagagcaacaacatcttcctgcacgaggacctgactgtgaagatcggggactttggcctggccaccgtgaagagccgctggagcggcagccaccagtttgagcagctgagcggcagcatcctgtggatggcccctgaggtgatccgcatgcaggacaagaacccctacagcttccagagtgatgtgtatgccttcggcatcgtgctgtatgagctgatgacaggccagctgccctacagcaacatcaacaacagagaccagatcatcttcatggtgggccggggctacctgagcccagacctgagcaaggtgcgcagcaactgccccaaggccatgaagaggctgatggctgaatgtctgaagaagaagagagatgagcggcccctcttcccccagatcctggccagcattgagctgctggcccggagcctgcccaagatccacaggtctgccagcgagcccagcctgaacagagctggcttccagacagaggacttcagcctgtatgcctgtgccagccccaagacccccatccaggccggcggctacggggccttccctgtgcactag

SEQ ID NO: 145181 - DNA, 2301 bp, Artificial Sequence
  derived and/or modified sequence
atggccgccctgagcggcggcggcggcggcggcgccgagcccggccaagccttgttcaacggagatatggagccggaggctggtgctggcgcaggcgccgccgcgtccagcgccgcggaccccgcaataccagaggaagtctggaatattaaacagatgatcaagctgacacaagagcacatcgaagcgctactcgacaaattcgggggcgaacacaatcctccgagtatctacctggaagcctatgaagagtataccagcaaactcgatgccttgcagcaaagggagcagcagctgctagagagtctgggcaatggcactgacttctccgttagtagtagcgcatcgatggatactgtgacgtcatcctcctcctcaagcctgagcgtgttacctagttcgctgagcgtgttccagaaccctactgatgtcgcacgttccaaccccaaaagcccccaaaagcctatcgtccgggtgttcctgcctaataaacaaagaacagtggttcctgctcgctgcggagtcaccgttcgggactcccttaaaaaggccctgatgatgcgtggtctgattccagaatgctgcgctgtgtatcgcatccaggatggtgagaagaaacccatcggatgggacacagatatatcatggttgactggagaggagctacatgtggaggtgctggagaacgtgcccctgaccacgcacaattttgttcggaaaacattttttacgctagctttttgcgatttctgtagaaagctccttttccaggggttccgctgtcagacctgcggatacaaattccatcagcggtgctccaccgaggttcctctgatgtgcgttaattatgaccagctggatctcctctttgtgtcaaaattcttcgaacaccatccgattccccaagaggaagcctcgctggctgaaaccgcgctaacgagcggatctagccccagcgctcccgcgagcgattccatcggtccacagattcttacgtctccatcaccgagtaaaagtatcccgattccacagccattcagaccagccgatgaagatcacaggaaccagtttggtcaacgcgatagatcctccagcgctcccaacgtacacatcaatacaatcgagccggtaaacatagacgacctgataagggaccagggtttccgtggtgatgggggcagtaccaccggactaagtgcaacccctccagccagtctgcctgggtccctcacaaatgtcaaagcgctccaaaaatcccccggaccgcaacgggaacgcaagagcagttcttcctctgaggaccgcaacaggatgaagacccttgggcgtcgcgatagctctgatgattgggaaataccagacggccagattactgtaggtcaaaggataggatctgggtcctttgggaccgtatataagggaaaatggcatggtgacgttgcggtaaagatgcttaatgtgaccgcaccaaccccacagcagcttcaggcatttaaaaatgaggtaggcgttcttagaaagacaaggcatgtgaatatcctgctgttcatggggtatagtacgaaaccccagctggcaatcgttactcagtggtgcgagggttcgagcctgtaccatcacctgcacataatagaaactaaattcgaaatgattaaactgattgacatagcccggcagacagctcaggggatggattatctccacgctaagagcattatccacagagatctcaaatctaataatatctttctgcatgaggatctgacagttaaaattggagattttgggctagcaacagtgaagagccgatggtcagggagccatcagttcgagcagctgtctgggtctatactgtggatggccccagaggttattcgaatgcaggataagaacccatacagctttcaaagcgacgtttatgccttcggtatcgtcctgtacgaactcatgaccggacagctgccctattctaatattaataatcgggaccagattatcttcatggtgggcagaggatacctcagcccggatctgagcaaagttagatcgaattgccccaaggccatgaaaaggctaatggctgagtgcctgaagaaaaagcgggacgagcgtcccctgtttccccagattcttgcatcgatcgaactcctagcgagaagcctgcctaagatccatcgctctgcatctgagccaagtcttaatcgcgccggcttccagactgaagacttttcgctgtacgcctgtgcctccccaaaaactcctatacaggcgggaggttatggcgcgtttccggtccactag

SEQ ID NO: 145182 - DNA, 2301 bp, Artificial Sequence
  derived and/or modified sequence
atggccgcattgagcgggggagggggaggcggagcagaacctggccaagccttgttcaatggcgatatggaaccagaagccggtgcaggagcaggtgccgcagcatcctccgccgcagatcccgctatccctgaagaggtatggaacatcaagcagatgattaaacttacccaagaacacattgaagccctgttagacaaattcggcggagaacataaccctcccagcatctatctggaggcctacgaggaatacacctcaaagctcgacgccctgcagcagcgcgaacagcagctgctggaaagccttggcaatggaaccgacttctccgtgtcttccagcgcgtcgatggacaccgtgacaagcagttccagctcatccctgagcgttctcccatcctctttatccgtattccagaaccctacagatgtggcccgatccaatccaaagtccccccagaagccaattgtaagggtgttcctccctaacaagcagcggacagtcgtaccagctaggtgcggcgtcactgtgcgcgactccctcaagaaggccttaatgatgcgcggactgatcccagaatgttgcgctgtataccggattcaggacggcgagaaaaaacccattggctgggacactgacatcagctggctcacaggggaggagctccacgtggaggtgctagaaaatgttccgctgactacccacaactttgtacgaaaaacgtttttcaccctggccttctgcgatttctgtagaaagctgctgttccaaggcttcagatgccaaacttgtgggtacaaatttcaccaacgctgctccacagaagtgcccctgatgtgcgtcaactatgatcaactcgacctgttgtttgtgtcaaagtttttcgagcaccatcctattccccaggaagaagctagcctggctgaaaccgctctgacgtcagggtcgtccccctccgctcccgcttcggatagtattggtcctcagattctgacctccccatctcccagtaaatcaatccccatcccacagccgttcagaccggctgatgaggatcatcggaatcaatttgggcagcgagatcgctcatctagtgcccctaacgtgcacataaatacaatcgaaccagtgaatattgacgaccttatcagagaccaggggtttcgtggcgacggcggaagcaccaccggactgtctgctacccctccagcctcactgccaggttcactgacgaatgtcaaagctttgcagaagagtccaggtcctcagcgcgaaaggaagtccagcagttcctccgaggataggaatcgcatgaaaactctgggcaggcgggattcatctgatgactgggagattcccgacggacagataactgtcgggcaacgcatcggctctggaagcttcggaaccgtgtataaaggtaagtggcatggcgacgtcgcggttaaaatgctcaacgttaccgctcctacaccccaacagctgcaggcctttaagaatgaagtgggtgtgttgcggaagaccagacacgtcaatattctgttattcatgggctattcgaccaaaccacagctcgccatagtgactcaatggtgcgagggctcgtctttgtaccaccatctgcacataattgagaccaaattcgagatgattaagcttattgacatcgccaggcaaactgcgcagggaatggactacttgcatgccaagtccattatacatagggatctgaagtctaacaatattttcctgcacgaagaccttactgtcaagataggagactttggtctggcaactgttaaaagccgttggtctggttctcaccagtttgagcagctgagcgggtccattctctggatggctcccgaagttatccggatgcaggataagaacccttactcctttcaatcagacgtgtatgcgttcggtatagttctttacgaacttatgacaggacaattaccatactccaatattaacaatagggaccagatcatctttatggtggggagagggtacctgtcccccgatctatcaaaggttcggagtaactgccctaaagcaatgaaacggcttatggccgagtgtcttaaaaagaagcgcgacgaacggcctctgttccctcagatccttgccagcattgagttgctggcaaggagcttgcctaagatccatcgctcagcctctgagccatcattaaacagagccggttttcaaaccgaagacttctccctctatgcttgtgcctcacccaagacccctattcaagctggtggatatggcgctttccctgtgcactag

SEQ ID NO: 145183 - DNA, 2480 bp, Artificial Sequence
  derived and/or modified sequence
cgcctcccttccccctccccgcccgacagcggccgctcgggccccggctctcggttataagatggcggcgctgagcggtggcggtggtggcggcgcggagccgggccaggctctgttcaacggggacatggagcccgaggccggcgccggcgccggcgccgcggcctcttcggctgcggaccctgccattccggaggaggtgtggaatatcaaacaaatgattaagttgacacaggaacatatagaggccctattggacaaatttggtggggagcataatccaccatcaatatatctggaggcctatgaagaatacaccagcaagctagatgcactccaacaaagagaacaacagttattggaatctctggggaacggaactgatttttctgtttctagctctgcatcaatggataccgttacatcttcttcctcttctagcctttcagtgctaccttcatctctttcagtttttcaaaatcccacagatgtggcacggagcaaccccaagtcaccacaaaaacctatcgttagagtcttcctgcccaacaaacagaggacagtggtacctgcaaggtgtggagttacagtccgagacagtctaaagaaagcactgatgatgagaggtctaatcccagagtgctgtgctgtttacagaattcaggatggagagaagaaaccaattggttgggacactgatatttcctggcttactggagaagaattgcatgtggaagtgttggagaatgttccacttacaacacacaactttgtacgaaaaacgtttttcaccttagcattttgtgacttttgtcgaaagctgcttttccagggtttccgctgtcaaacatgtggttataaatttcaccagcgttgtagtacagaagttccactgatgtgtgttaattatgaccaacttgatttgctgtttgtctccaagttctttgaacaccacccaataccacaggaagaggcgtccttagcagagactgccctaacatctggatcatccccttccgcacccgcctcggactctattgggccccaaattctcaccagtccgtctccttcaaaatccattccaattccacagcccttccgaccagcagatgaagatcatcgaaatcaatttgggcaacgagaccgatcctcatcagctcccaatgtgcatataaacacaatagaacctgtcaatattgatgacttgattagagaccaaggatttcgtggtgatggaggatcaaccacaggtttgtctgctaccccccctgcctcattacctggctcactaactaacgtgaaagccttacagaaatctccaggacctcagcgagaaaggaagtcatcttcatcctcagaagacaggaatcgaatgaaaacacttggtagacgggactcgagtgatgattgggagattcctgatgggcagattacagtgggacaaagaattggatctggatcatttggaacagtctacaagggaaagtggcatggtgatgtggcagtgaaaatgttgaatgtgacagcacctacacctcagcagttacaagccttcaaaaatgaagtaggagtactcaggaaaacacgacatgtgaatatcctactcttcatgggctattccacaaagccacaactggctattgttacccagtggtgtgagggctccagcttgtatcaccatctccatatcattgagaccaaatttgagatgatcaaacttatagatattgcacgacagactgcacagggcatggattacttacacgccaagtcaatcatccacagagacctcaagagtaataatatatttcttcatgaagacctcacagtaaaaataggtgattttggtctagctacagtgaaatctcgatggagtgggtcccatcagtttgaacagttgtctggatccattttgtggatggcaccagaagtcatcagaatgcaagataaaaatccatacagctttcagtcagatgtatatgcatttggaattgttctgtatgaattgatgactggacagttaccttattcaaacatcaacaacagggaccagataatttttatggtgggacgaggatacctgtctccagatctcagtaaggtacggagtaactgtccaaaagccatgaagagattaatggcagagtgcctcaaaaagaaaagagatgagagaccactctttccccaaattctcgcctctattgagctgctggcccgctcattgccaaaaattcaccgcagtgcatcagaaccctccttgaatcgggctggtttccaaacagaggattttagtctatatgcttgtgcttctccaaaaacacccatccaggcagggggatatggtgcgtttcctgtccactgaaacaaatgagtgagagagttcaggagagtagcaacaaaaggaaaataaatgaacatatgtttgcttatatgttaaattgaataaaatactctctttttttttaaggtgaaccaaagaa

SEQ ID NO: 145184 - protein, 318 aa, Artificial Sequence
  derived and/or modified sequence
MAAQGCAASRLLQLLLQLLLLLLLLAAGGARARWRGEGTSAHLRDIFLGRCAEYRALLSPEQRNKNCTAIWEAFKVALDKDPCSVLPSDYDLFINLSRHSIPRDKSLFWENSHLLVNSFADNTRRFMPLSDVLYGRVADFLSWCRQKNDSGLDYQSCPTSEDCENNPVDSFWKRASIQYSKDSSGVIHVMLNGSEPTGAYPIKGFFADYEIPNLQKEKITRIEIWVMHEIGGPNVESCGEGSMKVLEKRLKDMGFQYSCINDYRPVKLLQCVDHSTHPDCALKSAAAATQRKAPSLYTEQRAGLIIPLFLVLASRTQL

SEQ ID NO: 145185 - DNA, 957 bp, Artificial Sequence
  derived and/or modified sequence
atggccgctcaaggctgcgccgcttcccgactgttgcagctgctgttacaattgctcctactgttgttgctgctagcagctggcggtgcgcgcgcacgttggaggggggaaggcacctccgctcatttgcgggatattttcttgggtagatgcgccgaatatcgggcgttgctgtcaccggaacagagaaacaaaaactgcacagcgatctgggaagccttcaaagtcgccctggacaaagatccctgttccgtcctgccctccgactacgacctgttcattaacctcagcaggcactcgattccaagagacaagtctctgttttgggagaattctcacctgctggtaaattcctttgccgataataccagaagatttatgcccctgagcgacgtactgtatggccgtgtcgctgactttttgtcttggtgcagacagaaaaacgactctgggctcgactatcagagctgcccgacatctgaggattgtgaaaataatccagtggacagcttttggaagcgggcttcaatccaatacagtaaggacagcagcggggttatacatgttatgctcaatgggagtgaacctaccggcgcctaccctatcaagggtttttttgccgactatgaaatccctaacctccagaaagagaagatcaccaggatcgaaatatgggtgatgcacgaaatcggcgggcctaacgtcgaatcttgtggcgaaggctctatgaaggtactagaaaagcggctgaaagacatgggcttccagtatagttgcattaatgattaccgtcctgtcaagttgctgcaatgtgtagaccactccacccaccctgactgtgccctgaagagcgctgccgccgccacacagaggaaggcgcctagtttgtacaccgagcagcgtgctggcttaattatccctctgtttcttgtgctggcaagtagaacccaactctag

SEQ ID NO: 145186 - DNA, 957 bp, Artificial Sequence
  derived and/or modified sequence
atggccgcccagggctgtgccgccagccggctgctgcagctgctgctgcagctgctgctgctgctgctgctgctggccgccggcggggcccgggcccgctggagaggagagggcaccagcgcccacctgcgggacatcttcctgggccgctgtgccgagtaccgggccctgctgagccctgagcagaggaacaagaactgcacagccatctgggaggccttcaaggtggccctggacaaggacccctgcagcgtgctgcccagcgactatgacctcttcatcaacctgagccgccacagcatcccccgggacaagagcctcttctgggagaacagccacctgctggtgaacagctttgctgacaacacccggcgcttcatgcccctgagtgatgtgctgtatggccgggtggccgacttcctgtcctggtgccggcagaagaatgacagcggcctggactaccagagctgccccaccagcgaggactgtgagaacaaccctgtggacagcttctggaagagggccagcatccagtacagcaaggacagcagcggggtcatccacgtgatgctgaatggcagcgagcccactggagcctaccccatcaagggcttctttgctgactatgagatccccaacctgcagaaggagaagatcacccgcatcgagatctgggtgatgcatgagatcggcggccccaacgtggagagctgtggggagggctccatgaaggtgctggagaagaggctgaaggacatgggcttccagtacagctgcatcaatgactacagacctgtgaagctgctgcagtgtgtggaccacagcacccacccagactgtgccctgaagtctgctgctgctgccacccagaggaaggcccccagcctgtacacagagcagagagctggcctcatcatccccctcttcctggtgctggccagcaggacccagctgtag

SEQ ID NO: 145187 - DNA, 957 bp, Artificial Sequence
  derived and/or modified sequence
atggccgcccagggctgcgccgccagccggctgctgcagctgctgttgcaactgcttctgctgttgctcctcttagctgccgggggtgcacgggcgcggtggcgcggagaaggcacctcagcccacctccgggatatcttcctgggaagatgtgcagagtacagggccctccttagtcccgagcagcggaataagaactgtaccgctatctgggaagcctttaaggtggccttagacaaggatccctgctccgtcctcccgtccgattacgacctgttcatcaatctatcacgccactcgatccccagagacaagtccctcttttgggagaattcccacttattggttaattcattcgccgacaacactagacgcttcatgcctttgtcagatgttctgtatggtagagtggccgacttcctgtcttggtgtcggcaaaagaatgactcaggccttgactaccagtcctgtcctactagcgaagactgcgagaataaccctgtggattcgttttggaaacgtgcctctatccaatacagcaaagattcctccggggttattcacgttatgcttaatggcagtgagccgaccggagcttaccctattaaaggattcttcgccgattatgaaattcccaatcttcaaaaggagaagattacccgcattgagatctgggtgatgcatgaaatcggcggacctaacgtcgaaagctgtggcgaggggtctatgaaggtcctggagaagagacttaaagatatgggcttccaatactcctgtataaacgactatagaccggtcaagttgctccagtgcgtggatcactctactcacccagactgcgcgctgaagtctgcagccgccgctacacagaggaaagccccatcactgtacactgagcagcgggccgggctgattatacctttgttccttgttctggcttcaaggacccagctttag

SEQ ID NO: 145188 - DNA, 957 bp, Artificial Sequence
  derived and/or modified sequence
atggcagcccaagggtgtgctgcaagtagactacttcagctgctgctccagttgctgctgctgctgttgttactggcggctggtggcgcacgggctcggtggcggggtgagggtacgtccgctcacctacgagatatcttcttgggtagatgtgccgaatatcgcgctttactaagtcccgaacaaaggaacaaaaactgtactgcaatctgggaggctttcaaggtagcactggacaaagacccatgcagcgtactcccttctgactatgacttatttattaacctgtcacggcactccatacccagagacaagagcctgttttgggaaaatagccatctgctggtaaatagctttgccgataacacccggaggttcatgcccttgtccgacgttctgtacgggagagtcgctgacttcttatcttggtgtcgccagaagaacgactctggcctggactaccagtcatgtcctaccagcgaagattgcgaaaataacccggtggatagcttttggaaaagagcttccatacagtactctaaggacagtagtggcgtgatccacgttatgctgaatggatcagaacccaccggcgcttatcccattaagggatttttcgccgattatgaaattcccaatttgcaaaaagagaagatcactcggatcgagatctgggtgatgcacgagatcggcggaccaaatgtggaaagctgcggggaaggatctatgaaggttctggaaaaaagacttaaggatatgggctttcaatacagttgtatcaacgattatcggccagtgaaactgctgcagtgtgtagaccatagtacccatcccgattgcgctctaaagtccgcggcagccgctacccaaagaaaggcaccttctttatatacggagcagcgcgcaggcctcattatccctctgttcttggtgctggcttcaagaactcagctgtag

SEQ ID NO: 145189 - DNA, 1480 bp, Artificial Sequence
  derived and/or modified sequence
aaagtgctgggattacaggcatgagccgccgcgccccgccccacgctcagtcttgaaattgtctggaacgggaaacggcaaacagcgagatatccgagcgagagtcccgccctgcatcagtttgcggaaccgccttggtagaaggagagaaggggagtggaggaagcacgggactggagggaccaaagttccccgatggcggcccaggggtgcgcggcatcgcggctgctccagctgctgctgcagcttctgcttctactgttgctgctggcggcgggcggggcgcgcgcgcggtggcgcggggagggcaccagcgcacacttgcgggacatcttcctgggccgctgcgccgagtaccgcgcactgctgagtcccgagcagcggaacaagaactgcacagccatctgggaagcctttaaagtggcgctggacaaggatccctgctccgtgctgccctcagactatgacctttttattaacttgtccaggcactctattcccagagataagtccctgttctgggaaaatagccacctccttgttaacagctttgcagacaacacccgtcgttttatgcccctgagcgatgttctgtatggcagggttgcagatttcttgagctggtgtcgacagaaaaatgactctggactcgattaccaatcctgccctacatcagaagactgtgaaaataatcctgtggattccttttggaaaagggcatccatccagtattccaaggatagttctggggtgatccacgtcatgctgaatggttcagagccaacaggagcctatcccatcaaaggtttttttgcagattatgaaattccaaacctccagaaggaaaaaattacacgaatcgagatctgggttatgcatgaaattgggggacccaatgtggaatcctgcggggaaggcagcatgaaagtcctggaaaagaggctgaaggacatggggttccagtacagctgtattaatgattaccgaccagtgaagctcttacagtgcgtggaccacagcacccatcctgactgtgccttaaagtcggcagcagccgctactcaaagaaaagccccaagtctttatacagaacaaagggcgggtcttatcattcccctctttctggtgctggcttccaggactcaactgtaactggaaactgtgttgctctaaccctcctccagccctgcagcctccccttgcagtcatcattcgtgttctgtgtataccaaatgattctgttatctaaagaagctttttgctgggaaaacgatgtcctgaaaatggtatttcaatgaggcatatgttcaggatttcagaaacaagaagttagttctatttagcaggttaaaaaatgctgcattagaattaaagcaagttattttcttatttgtataatgacacaaagcattgggagtcagactgcttgtatattatcaaacattttaagagaattctaataaagctgtattttacatca

SEQ ID NO: 145190 - DNA, 957 bp, Artificial Sequence
  derived and/or modified sequence
atggccgcccagggctgcgccgccagcagactgctgcagctgctgctgcagctgctgctgctgctgctgctgctggccgccggcggcgccagagccagatggagaggcgagggcaccagcgcccacctgagagacatcttcctgggcagatgcgccgagtacagagccctgctgagccccgagcagagaaacaagaactgcaccgccatctgggaggccttcaaggtggccctggacaaggacccctgcagcgtgctgcccagcgactacgacctgttcatcaacctgagcagacacagcatccccagagacaagagcctgttctgggagaacagccacctgctggtgaacagcttcgccgacaacaccagaagattcatgcccctgagcgacgtgctgtacggcagagtggccgacttcctgagctggtgcagacagaagaacgacagcggcctggactaccagagctgccccaccagcgaggactgcgagaacaaccccgtggacagcttctggaagagagccagcatccagtacagcaaggacagcagcggcgtgatccacgtgatgctgaacggcagcgagcccaccggcgcctaccccatcaagggcttcttcgccgactacgagatccccaacctgcagaaggagaagatcaccagaatcgagatctgggtgatgcacgagatcggcggccccaacgtggagagctgcggcgagggcagcatgaaggtgctggagaagagactgaaggacatgggcttccagtacagctgcatcaacgactacagacccgtgaagctgctgcagtgcgtggaccacagcacccaccccgactgcgccctgaagagcgccgccgccgccacccagagaaaggcccccagcctgtacaccgagcagagagccggcctgatcatccccctgttcctggtgctggccagcagaacccagctgtag

SEQ ID NO: 145191 - protein, 180 aa, Artificial Sequence
  derived and/or modified sequence
MASTSYDYCRVPMEDGDKRCKLLLGIGILVLLIIVILGVPLIIFTIKANSEACRDGLRAVMECRNVTHLLQQELTEAQKGFQDVEAQAATCNHTVMALMASLDAEKAQGQKKVEELEGEITTLNHKLQDASAEVERLRRENQVLSVRIADKKYYPSSQDSSSAAAPQLLIVLLGLSALLQ

SEQ ID NO: 145192 - protein, 216 aa, Artificial Sequence
  derived and/or modified sequence
MASTSYDYCRVPMEDGDKRCKLLLGIGILVLLIIVILGVPLIIFTIKANSEACRDGLRAVMECRNVTHLLQQELTEAQKGFQDVEAQAATCNHTVMALMASLDAEKAQGQKKVEELEGEITTLNHKLQDASAEVERLRRENQVLSVRIADKKYYPSSHFPSTPQSRLQTQLTTLKIEMDEAKAQGTQMGAENGALTGALGCKGVGRDRSGRSLGES

SEQ ID NO: 145193 - DNA, 543 bp, Artificial Sequence
  derived and/or modified sequence
atggcttccacttcttacgattactgcagggtgcccatggaggatggggacaaacgttgtaaattactgctggggatcggcatcctagtgctgctaatcatagtgatcctcggtgtgcctctgatcattttcacaattaaagccaactctgaagcatgtagagacggcctcagagcggtgatggaatgtaggaatgtaacccatctgctgcagcaggaactgaccgaggcgcaaaaaggattccaggatgtggaagcccaggcagccacatgcaaccacactgtgatggccctgatggctagcctggacgctgaaaaagcgcagggccagaagaaagttgaagagttggaaggtgagattacaacactaaatcataagctccaggacgcaagtgcagaggttgagcgactcagacgggagaaccaagtgctttctgtgcggatcgcggataagaaatattatccaagcagtcaggactctagtagcgctgccgccccccaactgctgatcgtgctcctgggcctgagtgctctcctccaatag

SEQ ID NO: 145194 - DNA, 651 bp, Artificial Sequence
  derived and/or modified sequence
atggcaagcacatcgtacgattattgtagggtccccatggaagatggagacaagagatgcaaattgcttttggggattggaattctcgtgctcctgatcattgtgatccttggagtgccacttattattttcacgataaaggcgaattccgaagcctgtcgggatgggcttagggctgtgatggaatgcaggaacgtgacgcacttgctgcagcaggagcttacagaggcccagaaggggtttcaggatgttgaagcccaggccgccacttgcaaccacaccgtcatggcactgatggcgtcgctggacgccgagaaggcacaaggacagaagaaggtggaggagttggaaggtgaaatcacaactcttaaccacaagcttcaggacgcctcagcggaggttgagcgactacgccgagaaaatcaggtcctttccgtgcgtatcgctgataagaagtattacccctcctcacacttcccaagcactccccagtcccggctgcaaactcagttgaccaccctgaaaattgaaatggacgaggcaaaggcgcaggggacacagatgggagccgagaatggcgctctgaccggggctttaggctgcaagggtgttggacgagacagaagtggccgcagcctgggcgagtcatag

SEQ ID NO: 145195 - DNA, 543 bp, Artificial Sequence
  derived and/or modified sequence
atggccagcaccagctatgactactgccgggtgcccatggaggatggagacaagcgctgcaagctgctgctgggcatcggcatcctggtgctgctgatcatcgtcatcctgggcgtgcccctcatcatcttcaccatcaaggccaacagcgaggcctgcagagatggcctgcgggctgtgatggagtgcagaaatgtgacccacctgctgcagcaggagctgacagaggcccagaagggcttccaggatgtggaggcccaggccgccacctgcaaccacacagtgatggccctgatggccagcctggatgctgagaaggcccagggccagaagaaggtggaggagctggagggggagatcaccaccctgaaccacaagctgcaggatgccagcgctgaggtggagcggctgcggcgggagaaccaggtgctgtctgtgagaattgctgacaagaagtactaccccagcagccaggacagcagcagcgctgctgccccccagctgctgattgtgctgctgggcctgagcgccctgctgcagtag

SEQ ID NO: 145196 - DNA, 651 bp, Artificial Sequence
  derived and/or modified sequence
atggccagcaccagctatgactactgccgggtgcccatggaggatggagacaagcgctgcaagctgctgctgggcatcggcatcctggtgctgctgatcatcgtcatcctgggcgtgcccctcatcatcttcaccatcaaggccaacagcgaggcctgcagagatggcctgcgggctgtgatggagtgcagaaatgtgacccacctgctgcagcaggagctgacagaggcccagaagggcttccaggatgtggaggcccaggccgccacctgcaaccacacagtgatggccctgatggccagcctggatgctgagaaggcccagggccagaagaaggtggaggagctggagggggagatcaccaccctgaaccacaagctgcaggatgccagcgctgaggtggagcggctgcggcgggagaaccaggtgctgtctgtgagaattgctgacaagaagtactaccccagcagccacttccccagcaccccccagagccggctgcagacccagctgaccaccctgaagattgagatggatgaggccaaggcccagggcacccagatgggcgcagaaaatggagccctgaccggggccctgggctgcaagggcgtgggccgggacagaagtggccgcagcctgggggagagctag

SEQ ID NO: 145197 - DNA, 543 bp, Artificial Sequence
  derived and/or modified sequence
atggccagcaccagctacgactactgccgggtgcccatggaggacggcgataagagatgtaagcttctgctcggtattggaatcctggttcttctcataatcgtcattctgggcgttcctctgatcatattcaccataaaagctaactcagaagcatgtagggatggccttagagcagttatggaatgccggaatgttacgcacttattgcagcaagagctcaccgaagcccagaaaggatttcaggatgtcgaggcacaggccgctacatgcaatcatacagttatggctctaatggcttcgcttgatgccgagaaggctcagggtcagaaaaaggtcgaggagctagaaggagagattacaacgctcaaccataagctgcaagacgcatctgctgaggtggaacgtctgcgacgcgagaatcaggtacttagcgtccgtattgcggacaaaaagtattatcctagtagccaggatagctcttccgccgctgctccccagttactaatcgtactgctagggctcagcgcactgctgcaatag

SEQ ID NO: 145198 - DNA, 651 bp, Artificial Sequence
  derived and/or modified sequence
atggccagcaccagctacgactactgccgggtgcccatggaggacggggataagaggtgtaagttgctattggggatcggaatcttagtgcttctgataattgtcatcctgggtgtgcccctgatcatattcaccatcaaggccaattccgaagcatgcagagatgggcttcgggctgtgatggagtgccgcaacgttacgcatcttttgcaacaggagcttacagaggcacagaaaggattccaggacgtcgaggcccaagcagcaacatgcaaccataccgtcatggccctcatggcctccctggatgccgagaaagctcaagggcaaaagaaggtcgaggagctagagggcgagatcacaaccttgaaccataagctacaagacgcaagtgccgaggtggagcgacttcgccgcgagaaccaggtcctgtcagtccgcatcgccgataagaagtattatccatcgtcacattttccctctacaccacagtctcgccttcagacacagctgacaaccctgaaaatagagatggacgaggctaaggctcagggcacacagatgggagccgagaatggggccctgaccggtgcactgggatgcaaaggggtgggacgtgaccgatctggccgctctctgggcgagtcttag

SEQ ID NO: 145199 - DNA, 543 bp, Artificial Sequence
  derived and/or modified sequence
atggcctcgacgtcctatgattactgtcgggtgcccatggaagatggagacaagaggtgcaagttgttgctggggatcgggattctcgtgctactaatcattgttatcctgggcgtgcccctgatcatatttacgataaaagctaactctgaggcatgtcgagacgggctgagagccgttatggaatgcaggaatgttacacacctgctgcagcaggaactgacagaggctcagaagggattccaggatgtcgaggcccaggctgctacctgcaaccacactgtgatggctttgatggcctcactggatgccgaaaaagcacaggggcaaaagaaagtggaggagctcgaaggcgaaattactactctgaatcacaaactccaggacgctagtgcagaggtggaaaggctgagacgcgagaaccaggtattgtctgtgagaatagctgacaagaagtattatccttcttctcaagattcatcttcggcagctgcaccccaacttctgattgtgctgcttggattatcggcactacttcagtag

SEQ ID NO: 145200 - DNA, 651 bp, Artificial Sequence
  derived and/or modified sequence
atggcttcaacgtcatacgattactgccgagtcccaatggaggatggcgacaagagatgcaagctgctgctgggaataggtattctggttcttttaattatcgtgatcctgggggttcccctaatcatattcacgattaaggctaatagcgaggcgtgccgggacggcctgagagcagttatggagtgtaggaatgtaacccatctcttgcaacaagagctgactgaagcccagaagggatttcaagatgtagaagctcaggcagccacctgtaaccacacagtgatggcgttgatggcctccctggatgctgagaaagcccagggccaaaaaaaagtcgaagagctggagggcgagatcactactttaaaccacaagttgcaggatgcttcggctgaagtggagaggctgcgacgagagaatcaggttctgtcagtgcgcatcgccgataaaaaatattacccttcctcacacttcccttcaacaccccagtcaagactgcaaactcagctcacgaccctgaaaatagaaatggacgaagccaaggctcagggcactcagatgggggctgagaacggagcacttactggagcgctcgggtgtaagggagtaggtagagatagaagcggtagaagtttgggggagtcatag

SEQ ID NO: 145201 - DNA, 1019 bp, Artificial Sequence
  derived and/or modified sequence
ataaaggggtggcccgtagaagattccagcaccctcccctaactccaggccagactctaaaggggagatctggatggcatctacttcgtatgactattgcagagtgcccatggaagacggggataagcgctgtaagcttctgctggggataggaattctggtgctcctgatcatcgtgattctgggggtgcccttgattatcttcaccatcaaggccaacagcgaggcctgccgggacggccttcgggcagtgatggagtgtcgcaatgtcacccatctcctgcaacaagagctgaccgaggcccagaagggctttcaggatgtggaggcccaggccgccacctgcaaccacactgtgatggccctaatggcttccctggatgcagagaaggcccaaggacaaaagaaagtggaggagcttgagggagagatcactacattaaaccataagcttcaggacgcgtctgcagaggtggagcgactgagaagagaaaaccaggtcttaagcgtgagaatcgcggacaagaagtactaccccagctcccaggactccagctccgctgcggcgccccagctgctgattgtgctgctgggcctcagcgctctgctgcagtgagatcccaggaagctggcacatcttggaaggtccgtcctgctcggcttttcgcttgaacattcccttgatctcatcagttctgagcgggtcatggggcaacacggttagcggggagagcacggggtagccggagaagggcctctggagcaggtctggaggggccatggggaagtcctgggtgtggggacacagtcgggttgacccagggctgtctccctccagagcctccctccggacaatgagtcccccctcttgtctcccaccctgagattgggcatggggtgcggtgtggggggcatgtgctgcctgttgttatgggttttttttgcggggggggttgcttttttctggggtctttgagctccaaaaaataaacacttcctttgagggagagcacacctga

SEQ ID NO: 145202 - DNA, 1109 bp, Artificial Sequence
  derived and/or modified sequence
accctcccctaactccaggccagactctaaaggggagatctggatggcatctacttcgtatgactattgcagagtgcccatggaagacggggataagcgctgtaagcttctgctggggataggaattctggtgctcctgatcatcgtgattctgggggtgcccttgattatcttcaccatcaaggccaacagcgaggcctgccgggacggccttcgggcagtgatggagtgtcgcaatgtcacccatctcctgcaacaagagctgaccgaggcccagaagggctttcaggatgtggaggcccaggccgccacctgcaaccacactgtgatggccctaatggcttccctggatgcagagaaggcccaaggacaaaagaaagtggaggagcttgagggagagatcactacattaaaccataagcttcaggacgcgtctgcagaggtggagcgactgagaagagaaaaccaggtcttaagcgtgagaatcgcggacaagaagtactaccccagctcccacttcccctccactcctcagagccggcttcagacccaactaacgacactgaagattgagatggacgaagccaaggcacaggggacccagatgggggccgagaacggggcgctgacaggtgcgttggggtgtaagggagtgggcagggatagaagtgggaggagcctaggtgaatcctagttatccaaacaagcacagttgcaaacgtaatgcaaataacacggatataaacgcaaaaacttatgaaaagaatgcaaacaacatgcagaggccatgcaaatgtcacaaaaacaaggcaaatgccacaaaacatgcaaactccttgtaaacgactcacgaaagcaatgcaaacctatgaaaagctatgcaaatggcacgtggaagccatgcaatggtacacactaatttaattcaaataaaggaaagcgtgcaaacggcatgcagactatcaacttggattccggcgtgcgtggggcgggtgggcgcgggagtctccagcctgacccggctccctgcgcccccagaggccctggcgcgctgggaggcggcggccacggagtctacgcggcggctggacgaggctctgcggcgcgca

SEQ ID NO: 145203 - DNA, 543 bp, Artificial Sequence
  derived and/or modified sequence
atggccagcaccagctacgactactgcagagtgcccatggaggacggcgacaagagatgcaagctgctgctgggcatcggcatcctggtgctgctgatcatcgtgatcctgggcgtgcccctgatcatcttcaccatcaaggccaacagcgaggcctgcagagacggcctgagagccgtgatggagtgcagaaacgtgacccacctgctgcagcaggagctgaccgaggcccagaagggcttccaggacgtggaggcccaggccgccacctgcaaccacaccgtgatggccctgatggccagcctggacgccgagaaggcccagggccagaagaaggtggaggagctggagggcgagatcaccaccctgaaccacaagctgcaggacgccagcgccgaggtggagagactgagaagagagaaccaggtgctgagcgtgagaatcgccgacaagaagtactaccccagcagccaggacagcagcagcgccgccgccccccagctgctgatcgtgctgctgggcctgagcgccctgctgcagtag

SEQ ID NO: 145204 - DNA, 651 bp, Artificial Sequence
  derived and/or modified sequence
atggccagcaccagctacgactactgcagagtgcccatggaggacggcgacaagagatgcaagctgctgctgggcatcggcatcctggtgctgctgatcatcgtgatcctgggcgtgcccctgatcatcttcaccatcaaggccaacagcgaggcctgcagagacggcctgagagccgtgatggagtgcagaaacgtgacccacctgctgcagcaggagctgaccgaggcccagaagggcttccaggacgtggaggcccaggccgccacctgcaaccacaccgtgatggccctgatggccagcctggacgccgagaaggcccagggccagaagaaggtggaggagctggagggcgagatcaccaccctgaaccacaagctgcaggacgccagcgccgaggtggagagactgagaagagagaaccaggtgctgagcgtgagaatcgccgacaagaagtactaccccagcagccacttccccagcaccccccagagcagactgcagacccagctgaccaccctgaagatcgagatggacgaggccaaggcccagggcacccagatgggcgccgagaacggcgccctgaccggcgccctgggctgcaagggcgtgggcagagacagaagcggcagaagcctgggcgagagctag

SEQ ID NO: 145205 - protein, 1085 aa, Artificial Sequence
  derived and/or modified sequence
MDTPENVLQMLEAHMQSYKGNDPLGEWERYIQWVEENFPENKEYLITLLEHLMKEFLDKKKYHNDPRFISYCLKFAEYNSDLHQFFEFLYNHGIGTLSSPLYIAWAGHLEAQGELQHASAVLQRGIQNQAEPREFLQQQYRLFQTRLTETHLPAQARTSEPLHNVQVLNQMITSKSNPGNNMACISKNQGSELSGVISSACDKESNMERRVITISKSEYSVHSSLASKVDVEQVVMYCKEKLIRGESEFSFEELRAQKYNQRRKHEQWVNEDRHYMKRKEANAFEEQLLKQKMDELHKKLHQVVETSHEDLPASQERSEVNPARMGPSVGSQQELRAPCLPVTYQQTPVNMEKNPREAPPVVPPLANAISAALVSPATSQSIAPPVPLKAQTVTDSMFAVASKDAGCVNKSTHEFKPQSGAEIKEGCETHKVANTSSFHTTPNTSLGMVQATPSKVQPSPTVHTKEALGFIMNMFQAPTLPDISDDKDEWQSLDQNEDAFEAQFQKNVRSSGAWGVNKIISSLSSAFHVFEDGNKENYGLPQPKNKPTGARTFGERSVSRLPSKPKEEVPHAEEFLDDSTVWGIRCNKTLAPSPKSPGDFTSAAQLASTPFHKLPVESVHILEDKENVVAKQCTQATLDSCEENMVVPSRDGKFSPIQEKSPKQALSSHMYSASLLRLSQPAAGGVLTCEAELGVEACRLTDTDAAIAEDPPDAIAGLQAEWMQMSSLGTVDAPNFIVGNPWDDKLIFKLLSGLSKPVSSYPNTFEWQCKLPAIKPKTEFQLGSKLVYVHHLLGEGAFAQVYEATQGDLNDAKNKQKFVLKVQKPANPWEFYIGTQLMERLKPSMQHMFMKFYSAHLFQNGSVLVGELYSYGTLLNAINLYKNTPEKVMPQGLVISFAMRMLYMIEQVHDCEIIHGDIKPDNFILGNGFLEQDDEDDLSAGLALIDLGQSIDMKLFPKGTIFTAKCETSGFQCVEMLSNKPWNYQIDYFGVAATVYCMLFGTYMKVKNEGGECKPEGLFRRLPHLDMWNEFFHVMLNIPDCHHLPSLDLLRQKLKKVFQQHYTNKIRALRNRLIVLLLECKRSRK

SEQ ID NO: 145206 - protein, 824 aa, Artificial Sequence
  derived and/or modified sequence
MDTPENVLQMLEAHMQSYKGNDPLGEWERYIQWVEENFPENKEYLITLLEHLMKEFLDKKKYHNDPRFISYCLKFAEYNSDLHQFFEFLYNHGIGTLSSPLYIAWAGHLEAQGELQHASAVLQRGIQNQAEPREFLQQQYRLFQTRLTETHLPAQARTSEPLHNVQVLNQMITSKSNPGNNMACISKNQGSELSGVISSACDKESNMERRVITISKSEYSVHSSLASKVDVEQVVMYCKEKLIRGESEFSFEELRAQKYNQRRKHEQWVNEDRHYMKRKEANAFEEQLLKQKMDELHKKLHQVVETSHEDLPASQERSEVNPARMGPSVGSQQELRAPCLPVTYQQTPVNMEKNPREAPPVVPPLANAISAALVSPATSQSIAPPVPLKAQTVTDSMFAVASKDAGCVNKSTHEFKPQSGAEIKEGCETHKVANTSSFHTTPNTSLGMVQATPSKVQPSPTVHTKEALGFIMNMFQAPTLPDISDDKDEWQSLDQNEDAFEAQFQKNVRSSGAWGVNKIISSLSSAFHVFEDGNKENYGLPQPKNKPTGARTFGERSVSRLPSKPKEEVPHAEEFLDDSTVWGIRCNKTLAPSPKSPGDFTSAAQLASTPFHKLPVESVHILEDKENVVAKQCTQATLDSCEENMVVPSRDGKFSPIQEKSPKQALSSHMYSASLLRLSQPAAGGVLTCEAELGVEACRLTDTDAAIAEDPPDAIAGLQAEWMQMSSLGTVDAPNFIVGNPWDDKLIFKLLSGLSKPVSSYPNTFEWQCKLPAIKPKTEFQLGSKLVYVHHLLGEGAFAQVYEATQGDLNDAKNKQKFVLKVKS

SEQ ID NO: 145207 - DNA, 3258 bp, Artificial Sequence
  derived and/or modified sequence
atggatacccccgagaacgtacttcagatgctagaggctcatatgcagagctataagggcaacgacccactgggtgagtgggagcggtatatccagtgggttgaggagaacttccccgaaaacaaagaatatctcatcaccctactggagcacctaatgaaagagtttctcgacaagaagaaataccacaatgatcctaggtttatttcctattgtctcaagtttgcagagtacaatagtgatctgcatcagttttttgagtttctctacaaccatgggattggcaccctgagctcccccttgtacattgcctgggccggtcacctagaagcccagggtgagcttcagcacgccagcgccgtgttacagagagggatccagaaccaggcagagccgcgagagttcctgcaacagcaataccgcctctttcagacccggcttaccgagacacatctgcctgcacaagcaagaacaagtgagcctctccacaacgtacaggttctgaaccaaatgattacttccaaaagcaatcctggtaacaacatggcctgcattagcaaaaaccaagggtcagagttatcaggggtcatcagctccgcatgtgataaggaatcaaacatggagagaagggtgattacaattagtaagagtgaatatagcgtccattcatccctagcttcgaaagtggacgtggagcaggtggttatgtactgcaaagaaaaactcattcgcggagaatctgagttttccttcgaagagctgagggctcagaaatataatcagaggcggaagcacgaacagtgggtgaacgaagatcgtcactacatgaaaaggaaggaagccaacgcgttcgaagaacagctgctgaagcagaagatggatgagctacataagaagctgcatcaagtagttgaaacctcacatgaggatctaccagcctcacaagaaaggtcagaggtgaaccccgctaggatgggcccaagtgtggggtcccagcaggagctgcgcgcaccatgtctgcctgtgacatatcagcagactccagtcaatatggaaaaaaacccacgcgaggctccacccgtcgtaccccccctcgctaacgccatttctgccgcactggtgtcaccagctacatcacagagtattgcccctcccgttcccctgaaggcccagactgtcacagacagcatgtttgcggtggctagcaaggatgccggctgtgttaacaagagtacacacgaatttaagccacagtctggcgccgaaatcaaggagggatgcgagacccataaggtggcgaacactagctcttttcataccaccccaaacaccagtctggggatggtgcaggcaactcctagcaaggtacagccttcccccacagtgcatactaaggaggcactcgggttcatcatgaatatgttccaggcccccactctccctgatatatcagatgacaaggacgagtggcaaagtctggatcagaatgaggacgcctttgaggcacagtttcaaaaaaatgtgaggtctagcggggcttggggcgtcaacaaaatcatcagttcattaagttccgctttccacgtgttcgaggatggcaataaggagaattacgggcttcctcagcccaaaaacaagcccaccggcgcccgaaccttcggagaacggtctgtctcgagactgccctctaaaccgaaagaggaagtgccacatgccgaggaatttctcgacgacagcacagtgtggggcatccgctgtaacaagacactggccccctcccctaagtccccaggagacttcacatcagctgcccaactggccagtacaccctttcacaagctaccggttgaaagcgtgcatatattagaagataaagaaaacgtcgtggctaaacagtgtacacaggcaaccttggactcctgcgaggaaaatatggtggtcccctctcgggatggtaaattttcgccaatacaggagaaatctcccaagcaggccctttctagccatatgtactccgcctcgctcctccggctctcccagcccgctgccggtggtgtcctgacttgtgaagcggagctaggtgtggaagcgtgccgcctcaccgataccgacgctgccatagctgaagatcccccagatgcaattgcgggccttcaggccgagtggatgcagatgagcagtcttggcacagtggatgctcctaactttatcgtggggaacccttgggacgacaagctcatattcaaactattatccggactctcaaaaccggtatcttcttaccctaacacctttgaatggcagtgcaagctgccagccatcaaacctaaaactgaattccagctcggtagcaaactggtatatgtccatcacttgcttggtgaaggagcctttgcccaagtttatgaggctacacagggtgacctgaatgacgccaagaacaaacagaagtttgtcctgaaagtacaaaagccagccaatccttgggagttctacattggcacgcagctgatggagagacttaagccctctatgcaacacatgttcatgaagttttacagcgcccatctcttccagaacggaagcgtgctggtaggagaactgtactcctacgggacgctcctcaatgccattaacctgtacaaaaacaccccagagaaagtgatgccacaaggattggttatcagctttgcaatgcggatgctgtacatgatcgaacaggttcatgactgtgaaattatccacggggacatcaagcctgataattttatactgggcaatggctttctcgagcaggatgatgaagacgatctgtccgcaggactagctctcattgatctgggacagagtattgatatgaaactgttccctaaaggcaccattttcacagctaaatgcgagacatctgggttccagtgtgtcgaaatgctgtccaacaaaccatggaactaccagattgactactttggagttgctgcgactgtgtactgcatgttatttgggacctacatgaaggttaaaaatgaggggggtgagtgcaaacctgagggcttattccgcagactgccacatctcgatatgtggaacgagttcttccatgtgatgttgaacattcccgactgtcaccacctgccttctctcgacctactgagacagaagctaaagaaggtgttccagcagcactacactaacaaaattcgggccttgagaaacagactgatagttctgctgctggaatgcaaaaggtcacgcaagtag

SEQ ID NO: 145208 - DNA, 3258 bp, Artificial Sequence
  derived and/or modified sequence
atggacaccccagaaaatgtgctgcagatgctggaggcccacatgcagagctacaagggaaatgaccccctgggggagtgggagcgctacatccagtgggtggaggagaacttccctgagaacaaggagtacctgatcaccctgctggagcacctgatgaaggagttcctggacaagaagaagtaccacaatgacccccgcttcatctcctactgcctgaagtttgctgagtacaacagcgacctgcaccagttctttgagttcctgtacaaccacggcatcggcaccctgagcagccccctgtacatcgcctgggccggccacctggaggcccagggcgagctgcagcacgccagcgctgtgctgcagaggggcatccagaaccaggccgagccccgggagttcctgcagcagcagtaccgcctcttccagacccggctgacagagacccacctgcctgcccaggcccggaccagcgagcccctgcacaacgtgcaggtgctgaaccagatgatcaccagcaagagcaaccctggcaacaacatggcctgcatcagcaagaaccagggcagcgagctgagcggggtcatcagcagcgcctgtgacaaggagagcaacatggagaggagggtcatcaccatcagcaagtctgagtacagcgtgcacagcagcctggccagcaaggtggatgtggagcaggtggtgatgtactgcaaggagaagctgatccggggggagagcgagttctcctttgaggagctgcgggcccagaagtacaaccagaggaggaagcatgagcagtgggtgaatgaagatagacactacatgaagaggaaggaggccaatgcctttgaggagcagctgctgaagcagaagatggatgagctgcacaagaagctgcaccaggtggtggagaccagccatgaggacctgcctgccagccaggagaggtctgaggtgaacccagccaggatgggccccagcgtgggcagccagcaggagctgcgggccccctgcctgcctgtgacctaccagcagacccctgtgaacatggagaagaacccccgggaggcccctcctgtggtgccccccctggccaatgccatctctgctgccctggtgtccccagccaccagccagagcatcgcccctcctgtgcccctgaaggcccagacagtgacagacagcatgtttgctgtggccagcaaggatgctggctgtgtgaacaagagcacccatgagttcaagccccagagcggggctgagatcaaggagggctgtgagacccacaaggtggccaacaccagcagcttccacaccacccccaacaccagcctgggcatggtgcaggccacccccagcaaggtgcagcccagccccaccgtgcacaccaaggaggccctgggcttcatcatgaacatgttccaggcccccaccctgcctgacatcagtgatgacaaggatgagtggcagagcctggaccagaatgaagatgcctttgaggcccagttccagaagaatgtgcgcagcagcggggcctggggcgtgaacaagatcatcagcagcctgagcagcgccttccacgtgtttgaagatggcaacaaggagaactacggcctgccccagcccaagaacaagcccaccggggcccggacctttggagagaggtctgtgtcccggctgcccagcaagcccaaggaggaggtgccccacgccgaggagttcctggatgacagcacagtgtggggcatccgctgcaacaagaccctggcccccagccccaagagccctggggacttcaccagcgctgcccagctggccagcacccccttccacaagctgcctgtggagagcgtgcacatcctggaggacaaggaaaatgtggtggccaagcagtgcacccaggccaccctggacagctgtgaggagaacatggtggtgcccagcagagatggcaagttcagccccatccaggagaagagccccaagcaggccctgagcagccacatgtacagcgccagcctgctgcggctgagccagcctgctgctggaggagtgctgacctgtgaggccgagctgggcgtggaggcctgccgcctgacagacacagatgctgccatcgcagaagatcctccagatgccatcgccggcctgcaggccgagtggatgcagatgagcagcctgggcaccgtggatgcccccaacttcatcgtgggcaacccctgggatgacaagctgatcttcaagctgctgagcggcctgagcaagcctgtgagcagctaccccaacacctttgagtggcagtgcaagctgcctgccatcaagcccaagacagagttccagctgggcagcaagctggtgtatgtgcaccacctgctgggggagggcgcctttgcccaggtgtatgaggccacccagggcgacctgaatgatgccaagaacaagcagaagtttgtgctgaaggtgcagaagccagccaacccctgggagttctacatcggcacccagctgatggagcggctgaagcccagcatgcagcacatgttcatgaagttctacagcgcccacctgttccagaatggatctgtgctggtgggggagctgtacagctatggcaccctgctgaatgccatcaacctgtacaagaacaccccagagaaggtgatgccccagggcctggtgatcagctttgccatgaggatgctgtacatgattgagcaggtgcatgactgtgagatcatccatggagacatcaagccagacaacttcatcctgggcaatggcttcctggagcaggatgatgaagatgacctgtctgctggcctggccctgattgacctgggccagagcattgacatgaagctgttccccaagggcaccatcttcaccgccaagtgtgagaccagcggcttccagtgtgtggagatgctgagcaacaagccctggaactaccagattgactactttggagtggccgccaccgtgtactgcatgctgtttggcacctacatgaaggtgaagaatgaaggaggagagtgcaagccagagggcctcttccggcggctgccccacctggacatgtggaatgagttcttccacgtgatgctgaacatcccagactgccaccacctgcccagcctggacctgctgcggcagaagctgaagaaggtgttccagcagcactacaccaacaagatccgggccctgaggaacagactcatcgtgctgctgctggagtgcaagaggagcaggaagtag

SEQ ID NO: 145209 - DNA, 3258 bp, Artificial Sequence
  derived and/or modified sequence
atggacacccccgagaacgtgctgcagatgctggaggcccacatgcaaagttataagggcaatgatcccctgggagagtgggagcgctacatccagtgggtcgaagaaaactttccagagaacaaggagtacctcatcaccttgttagaacaccttatgaaagaattcctggacaagaagaaataccacaacgatccacgatttatttcttattgtctgaaattcgctgagtataatagtgacctccatcagttcttcgaatttctatataatcacgggatcggtactctcagctcgcccctctacatcgcctgggccgggcaccttgaggcacaaggggaactgcagcacgccagtgcagtgctacagagaggaattcaaaatcaggccgagcctagagagtttttgcagcagcagtacaggttgtttcagacaaggctcaccgagacccacctgccagcgcaggccagaacatcagagcctctgcacaatgtgcaggttcttaatcagatgatcacttctaagagtaaccctggcaacaacatggcctgcataagtaaaaatcagggttccgaactgtctggggtcatcagcagtgcgtgtgataaggagagcaatatggaacgaagagtgataacaatctctaaatcagagtacagcgttcactcatccctcgcttccaaggtggacgtggagcaggttgtaatgtactgcaaggaaaaactcatcagaggcgaatcggagttttcttttgaggagctgcgtgctcaaaaatataatcagaggcgtaaacacgaacagtgggtcaatgaggataggcactacatgaaacggaaagaggctaatgctttcgaagaacaattgctgaagcaaaagatggacgaacttcacaagaaattacatcaggtggttgagaccagccacgaggatttgcctgcaagtcaggaacgatctgaagttaaccctgcccgcatgggaccgtccgtgggatcgcaacaggagcttagggccccctgtttgccagtcacctaccaacagactccggttaacatggagaaaaatccgcgtgaagccccacccgtcgtgcccccactcgcaaatgccatttcagctgccttagtatctcccgcgacgtcccagagcatagcaccacctgttcccctgaaagcgcagactgtgacagatagtatgttcgctgttgcctcaaaggacgccggatgcgttaacaagtctacacacgagttcaagcctcagtcaggtgccgagattaaggagggctgcgaaacacataaggtggctaacaccagcagcttccacacaacgcctaataccagtctgggaatggtccaggctacaccctctaaagttcaaccatctcctacagtccacacaaaggaggccctgggtttcattatgaatatgttccaggcccccaccctgcctgatatcagtgacgataaggatgaatggcagtcactcgatcaaaatgaggatgccttcgaggcccagttccagaagaacgtgcgcagtagcggtgcgtggggcgttaataaaatcatctccagtctgtcgtcagcgtttcacgtgtttgaagacggcaacaaggaaaattatggtctgccacagcccaagaacaagcccacaggcgctcgcactttcggtgagcggtctgtctctagactgccctccaagccaaaagaggaggtgccgcatgcggaagagttcctggatgactccaccgtgtggggcataaggtgtaacaagacccttgcccctagccccaaatcgccaggagactttacttcagccgctcagttggcttctacaccatttcataagctgccggttgaatccgtccatattctggaggacaaagagaatgtcgtggccaaacaatgcactcaagccactcttgactcatgtgaagaaaacatggttgtgcccagccgcgacggtaagttttcccccatccaggagaaaagccctaaacaggccctgagctcacacatgtatagtgccagcctgctgcgactgagtcagcctgccgccggtggagtcctgacctgtgaggcggagctcggggttgaagcgtgcagactaaccgataccgatgcagctatagctgaggatcctcccgatgccattgcgggcctgcaagcggaatggatgcaaatgagcagtttgggcactgtggatgcccccaattttatagtggggaacccatgggacgataagctgatttttaagctcctctctggattgagcaaacccgtgtccagctaccctaacacattcgagtggcaatgcaaactgcccgcaataaaaccgaagactgagtttcagttggggagtaagcttgtctacgtgcatcacctcttgggggagggcgcctttgctcaagtatacgaggcaacccagggggatctgaacgatgctaaaaacaagcaaaaattcgtactgaaagtccaaaagccagccaatccgtgggagttttatatcggaacccaattaatggaaagactaaaaccaagtatgcaacatatgttcatgaagttctatagtgcccatctattccaaaacggcagcgtgctggtcggcgagctttacagttacgggacattactcaatgcaatcaacctgtataaaaacacacctgaaaaggtcatgccccaggggcttgtgatctcattcgctatgcgaatgctgtatatgatcgaacaggtacacgattgtgaaatcattcatggggacatcaagccagataatttcatcctggggaatgggttcctggagcaggacgacgaagatgacctgtcagccggcctggcgctcatcgatctgggacagtctattgatatgaagctgttccctaaagggaccatatttacagccaagtgtgagacttccgggtttcagtgcgtagagatgttgagcaacaaaccatggaactatcagatcgactacttcggcgtggccgccactgtgtattgcatgctgttcggtacatatatgaaggtgaagaacgaggggggtgaatgcaagcccgagggattgtttcgacggctaccacacctggacatgtggaatgaatttttccatgtcatgctgaatatccccgactgccatcatctgccatctctggacctccttcgtcagaagctcaaaaaggtgtttcagcagcactacactaataagattagagccctcagaaaccgattgatcgtgctgctcctcgaatgcaagcgaagccgtaaatag

SEQ ID NO: 145210 - DNA, 3258 bp, Artificial Sequence
  derived and/or modified sequence
atggatacacccgagaacgtactgcagatgttggaggctcacatgcagtcctataagggaaacgatccgttaggcgagtgggagagatatatccaatgggtggaggaaaactttccggaaaacaaagagtatctgattactctgctggaacacctgatgaaagagtttctggacaagaaaaaataccacaatgaccccagatttatctcttactgcttgaagtttgccgaatataacagtgacctgcaccaattctttgagtttctctacaaccatggtatcggtaccctttcaagtcctttgtacatagcctgggcaggacatctggaggcccaaggcgagttgcagcacgcgtcagctgtgttgcagagggggatacaaaaccaggcggagcctcgagagttcctccaacagcagtaccgcttatttcaaacacgcctgacggaaacgcatctgcccgctcaggctagaacttctgaacccttgcacaatgtgcaggtacttaatcagatgataacatcaaagtccaatccagggaataacatggcctgcatatccaagaaccagggcagtgaactgagtggggttatctcctctgcttgcgacaaagaaagtaatatggagcggagagttataacaatcagtaaatctgagtattctgttcatagtagccttgcaagcaaagttgacgtggaacaagtcgttatgtactgcaaggagaagctgattcgaggtgaatctgagttttcatttgaggagcttagagcccagaagtacaaccagaggcgaaagcatgagcagtgggtgaatgaggaccgccactacatgaaaaggaaggaagctaatgccttcgaagagcaacttttaaagcagaagatggacgaactccataagaaactgcaccaagtggtagaaacaagccatgaggacctgccagcttctcaggagcgcagcgaggtgaaccctgccagaatggggccttccgtgggatcccagcaggagcttagagcaccatgtttacccgtgacttaccaacagactccggtaaatatggaaaagaatcccagagaggcccctcccgtcgttcccccacttgcaaacgccatttccgccgctctcgtcagtcctgcaacctctcagtccatcgctccccctgtgcccctcaaagcccaaacagttaccgattcgatgtttgccgtcgcttcaaaagatgccggttgtgtgaacaaaagcacccacgaatttaaacctcaatcgggcgcagagatcaaagaaggatgtgaaactcataaggtggctaacacaagttcatttcatacaaccccgaacaccagcctcggtatggtgcaggccactccatccaaggtccagccatcgcccactgtccataccaaagaggcattaggttttattatgaacatgtttcaagcaccaacgctcccagacatttcagacgataaggatgagtggcagagcttggatcaaaacgaagacgcattcgaggctcagttccagaagaatgtgcggagctctggagcctggggagtgaataaaattatctcttccctcagtagtgcttttcacgtgtttgaggacgggaataaagagaattacggcctcccgcaaccaaagaataagccaacaggggcaaggaccttcggagagcggagcgtctctagactcccttcaaaacctaaggaagaggtgcctcacgcagaagaatttctggatgattctaccgtttggggaatccggtgcaataagactcttgctcctagccctaaatctcccggtgactttacctcggccgcacaactcgcctctacccccttccacaaactgcccgtggagtctgttcacatcttagaagataaagaaaacgtggttgctaaacagtgcacacaggctaccctcgattcgtgtgaagaaaacatggttgtgccaagtcgtgatggcaagttttctccaatccaagagaagagtcccaagcaggccctgtctagtcacatgtattccgctagccttctgagattgtcacagcccgcagccggaggagtgctaacatgtgaggccgaactgggagtggaagcttgccgactcacagacactgatgcagccatcgccgaagatcctccagacgccatcgctggtctacaggctgaatggatgcagatgtcctccctcggcacagtcgatgcgcctaatttcatcgtcgggaatccctgggacgataaactaatatttaagcttttgtcagggttgtctaagcctgtttctagttacccaaacaccttcgagtggcaatgtaaactccccgctatcaaacccaagacagagttccagttggggtcaaaacttgtgtatgttcatcaccttctcggagagggtgctttcgcccaggtttatgaagccacccagggtgacctcaacgatgccaagaacaagcagaaattcgttcttaaagtgcaaaaaccagctaatccctgggaattttacatcggcacccagctcatggaaagacttaaacctagtatgcagcacatgttcatgaaattctacagtgcccacctgttccagaacggtagcgttcttgtgggagagctgtactcttacggcaccctgttaaatgccatcaatttgtataagaacacccccgagaaagttatgccgcagggtctggttatctcttttgccatgcggatgttatacatgatcgagcaggtccacgactgcgaaataatccatggcgacattaaacccgataattttatactgggcaatggctttttagagcaggatgacgaggatgatttaagcgccggtctggccttaattgatcttggacagtcaatcgatatgaaactcttcccaaaggggacaatctttaccgctaaatgtgagacaagtggtttccaatgtgtggagatgttgagcaacaaaccttggaactatcagattgattactttggagtagccgcaacagtgtattgtatgctgttcgggacctatatgaaggtcaaaaatgaggggggagaatgtaaacccgagggccttttccgacgactgcctcatctggacatgtggaacgagttctttcacgtcatgctcaatattcccgattgccatcacttgccaagcctcgatctactgaggcagaagctcaaaaaggtgttccagcagcattacacaaacaaaataagagccctgaggaatcgcttgatcgtgcttttgttagaatgtaagcggagcagaaagtag

SEQ ID NO: 145211 - DNA, 3507 bp, Artificial Sequence
  derived and/or modified sequence
atgggcaggcgccctgaaacgttcggcgagccgactgcggctgcgcggggtattcgaatcggcggcggcttctagtttgcggttcaggtttggccgctgccggccagcgtcctctggccatggacaccccggaaaatgtccttcagatgcttgaagcccacatgcagagctacaagggcaatgaccctcttggtgaatgggaaagatacatacagtgggtagaagagaattttcctgagaataaagaatacttgataactttactagaacatttaatgaaggaatttttagataagaagaaataccacaatgacccaagattcatcagttattgtttaaaatttgctgagtacaacagtgacctccatcaattttttgagtttctgtacaaccatgggattggaaccctgtcatcccctctgtacattgcctgggcggggcatctggaagcccaaggagagctgcagcatgccagtgctgtccttcagagaggaattcaaaaccaggctgaacccagagagttcctgcaacaacaatacaggttatttcagacacgcctcactgaaacccatttgccagctcaagctagaacctcagaacctctgcataatgttcaggttttaaatcaaatgataacatcaaaatcaaatccaggaaataacatggcctgcatttctaagaatcagggttcagagctttctggagtgatatcttcagcttgtgataaagagtcaaatatggaacgaagagtgatcacgatttctaaatcagaatattctgtgcactcatctttggcatccaaagttgatgttgagcaggttgttatgtattgcaaggagaagcttattcgtggggaatcagaattttcctttgaagaattgagagcccagaaatacaatcaacggagaaagcatgagcaatgggtaaatgaagacagacattatatgaaaaggaaagaagcaaatgcttttgaagaacagctattaaaacagaaaatggatgaacttcataagaagttgcatcaggtggtggagacatcccatgaggatctgcccgcttcccaggaaaggtccgaggttaatccagcacgtatggggccaagtgtaggctcccagcaggaactgagagcgccatgtcttccagtaacctatcagcagacaccagtgaacatggaaaagaacccaagagaggcacctcctgttgttcctcctttggcaaatgctatttctgcagctttggtgtccccagccaccagccagagcattgctcctcctgttcctttgaaagcccagacagtaacagactccatgtttgcagtggccagcaaagatgctggatgtgtgaataagagtactcatgaattcaagccacagagtggagcagagatcaaagaagggtgtgaaacacataaggttgccaacacaagttcttttcacacaactccaaacacatcactgggaatggttcaggcaacgccatccaaagtgcagccatcacccaccgtgcacacaaaagaagcattaggtttcatcatgaatatgtttcaggctcctacacttcctgatatttctgatgacaaagatgaatggcaatctctagatcaaaatgaagatgcatttgaagcccagtttcaaaaaaatgtaaggtcatctggggcttggggagtcaataagatcatctcttctttgtcatctgcttttcatgtgtttgaagatggaaacaaagaaaattatggattaccacagcctaaaaataaacccacaggagccaggacctttggagaacgctctgtcagcagacttccttcaaaaccaaaggaggaagtgcctcatgctgaagagtttttggatgactcaactgtatggggtattcgctgcaacaaaaccctggcacccagtcctaagagcccaggagacttcacatctgctgcacaacttgcgtctacaccattccacaagcttccagtggagtcagtgcacattttagaagataaagaaaatgtggtagcaaaacagtgtacccaggcgactttggattcttgtgaggaaaacatggtggtgccttcaagggatggaaaattcagtccaattcaagagaaaagcccaaaacaggccttgtcgtctcacatgtattcagcatccttacttcgtctgagccagcctgctgcaggtggggtacttacctgtgaggcagagttgggcgttgaggcttgcagactcacagacactgacgctgccattgcagaagatccaccagatgctattgctgggctccaagcagaatggatgcagatgagttcacttgggactgttgatgctccaaacttcattgttgggaacccatgggatgataagctgattttcaaacttttatctgggctttctaaaccagtgagttcctatccaaatacttttgaatggcaatgtaaacttccagccatcaagcccaagactgaatttcaattgggttctaagctggtctatgtccatcaccttcttggagaaggagcctttgcccaggtgtacgaagctacccagggagatctgaatgatgctaaaaataaacagaaatttgttttaaaggtccaaaagcctgccaacccctgggaattctacattgggacccagttgatggaaagactaaagccatctatgcagcacatgtttatgaagttctattctgcccacttattccagaatggcagtgtattagtaggagagctctacagctatggaacattattaaatgccattaacctctataaaaatacccctgaaaaagtgatgcctcaaggtcttgtcatctcttttgctatgagaatgctttacatgattgagcaagtgcatgactgtgaaatcattcatggagacattaaaccagacaatttcatacttggaaacggatttttggaacaggatgatgaagatgatttatctgctggcttggcactgattgacctgggtcagagtatagatatgaaactttttccaaaaggaactatattcacagcaaagtgtgaaacatctggttttcagtgtgttgagatgctcagcaacaaaccatggaactaccagatcgattactttggggttgctgcaacagtatattgcatgctctttggcacttacatgaaagtgaaaaatgaaggaggagagtgtaagcctgaaggtctttttagaaggcttcctcatttggatatgtggaatgaattttttcatgttatgttgaatattccagattgtcatcatcttccatctttggatttgttaaggcaaaagctgaagaaagtatttcaacaacactatactaacaagattagggccctacgtaataggctaattgtactgctcttagaatgtaagcgttcacgaaaataaaatttggatatagacagtccttaaaaatcacactgtaaatatgaatctgctcactttaaacctgtttttttttcatttattgtttatgtaaatgtttgttaaaaataaatcccatggaatatttccatgt

SEQ ID NO: 145212 - DNA, 3258 bp, Artificial Sequence
  derived and/or modified sequence
atggacacccccgagaacgtgctgcagatgctggaggcccacatgcagagctacaagggcaacgaccccctgggcgagtgggagagatacatccagtgggtggaggagaacttccccgagaacaaggagtacctgatcaccctgctggagcacctgatgaaggagttcctggacaagaagaagtaccacaacgaccccagattcatcagctactgcctgaagttcgccgagtacaacagcgacctgcaccagttcttcgagttcctgtacaaccacggcatcggcaccctgagcagccccctgtacatcgcctgggccggccacctggaggcccagggcgagctgcagcacgccagcgccgtgctgcagagaggcatccagaaccaggccgagcccagagagttcctgcagcagcagtacagactgttccagaccagactgaccgagacccacctgcccgcccaggccagaaccagcgagcccctgcacaacgtgcaggtgctgaaccagatgatcaccagcaagagcaaccccggcaacaacatggcctgcatcagcaagaaccagggcagcgagctgagcggcgtgatcagcagcgcctgcgacaaggagagcaacatggagagaagagtgatcaccatcagcaagagcgagtacagcgtgcacagcagcctggccagcaaggtggacgtggagcaggtggtgatgtactgcaaggagaagctgatcagaggcgagagcgagttcagcttcgaggagctgagagcccagaagtacaaccagagaagaaagcacgagcagtgggtgaacgaggacagacactacatgaagagaaaggaggccaacgccttcgaggagcagctgctgaagcagaagatggacgagctgcacaagaagctgcaccaggtggtggagaccagccacgaggacctgcccgccagccaggagagaagcgaggtgaaccccgccagaatgggccccagcgtgggcagccagcaggagctgagagccccctgcctgcccgtgacctaccagcagacccccgtgaacatggagaagaaccccagagaggccccccccgtggtgccccccctggccaacgccatcagcgccgccctggtgagccccgccaccagccagagcatcgccccccccgtgcccctgaaggcccagaccgtgaccgacagcatgttcgccgtggccagcaaggacgccggctgcgtgaacaagagcacccacgagttcaagccccagagcggcgccgagatcaaggagggctgcgagacccacaaggtggccaacaccagcagcttccacaccacccccaacaccagcctgggcatggtgcaggccacccccagcaaggtgcagcccagccccaccgtgcacaccaaggaggccctgggcttcatcatgaacatgttccaggcccccaccctgcccgacatcagcgacgacaaggacgagtggcagagcctggaccagaacgaggacgccttcgaggcccagttccagaagaacgtgagaagcagcggcgcctggggcgtgaacaagatcatcagcagcctgagcagcgccttccacgtgttcgaggacggcaacaaggagaactacggcctgccccagcccaagaacaagcccaccggcgccagaaccttcggcgagagaagcgtgagcagactgcccagcaagcccaaggaggaggtgccccacgccgaggagttcctggacgacagcaccgtgtggggcatcagatgcaacaagaccctggcccccagccccaagagccccggcgacttcaccagcgccgcccagctggccagcacccccttccacaagctgcccgtggagagcgtgcacatcctggaggacaaggagaacgtggtggccaagcagtgcacccaggccaccctggacagctgcgaggagaacatggtggtgcccagcagagacggcaagttcagccccatccaggagaagagccccaagcaggccctgagcagccacatgtacagcgccagcctgctgagactgagccagcccgccgccggcggcgtgctgacctgcgaggccgagctgggcgtggaggcctgcagactgaccgacaccgacgccgccatcgccgaggacccccccgacgccatcgccggcctgcaggccgagtggatgcagatgagcagcctgggcaccgtggacgcccccaacttcatcgtgggcaacccctgggacgacaagctgatcttcaagctgctgagcggcctgagcaagcccgtgagcagctaccccaacaccttcgagtggcagtgcaagctgcccgccatcaagcccaagaccgagttccagctgggcagcaagctggtgtacgtgcaccacctgctgggcgagggcgccttcgcccaggtgtacgaggccacccagggcgacctgaacgacgccaagaacaagcagaagttcgtgctgaaggtgcagaagcccgccaacccctgggagttctacatcggcacccagctgatggagagactgaagcccagcatgcagcacatgttcatgaagttctacagcgcccacctgttccagaacggcagcgtgctggtgggcgagctgtacagctacggcaccctgctgaacgccatcaacctgtacaagaacacccccgagaaggtgatgccccagggcctggtgatcagcttcgccatgagaatgctgtacatgatcgagcaggtgcacgactgcgagatcatccacggcgacatcaagcccgacaacttcatcctgggcaacggcttcctggagcaggacgacgaggacgacctgagcgccggcctggccctgatcgacctgggccagagcatcgacatgaagctgttccccaagggcaccatcttcaccgccaagtgcgagaccagcggcttccagtgcgtggagatgctgagcaacaagccctggaactaccagatcgactacttcggcgtggccgccaccgtgtactgcatgctgttcggcacctacatgaaggtgaagaacgagggcggcgagtgcaagcccgagggcctgttcagaagactgccccacctggacatgtggaacgagttcttccacgtgatgctgaacatccccgactgccaccacctgcccagcctggacctgctgagacagaagctgaagaaggtgttccagcagcactacaccaacaagatcagagccctgagaaacagactgatcgtgctgctgctggagtgcaagagaagcagaaagtag

SEQ ID NO: 145213 - protein, 180 aa, Artificial Sequence
  derived and/or modified sequence
MAPGVARGPTPYWRLRLGGAALLLLLIPVAAAQEPPGAACSQNTNKTCEECLKNVSCLWCNTNKACLDYPVTSVLPPASLCKLSSARWGVCWVNFEALIITMSVVGGTLLLGIAICCCCCCRRKRSRKPDRSEEKAMREREERRIRQEERRAEMKTRHDEIRKKYGLFKEENPYARFENN

SEQ ID NO: 145214 - DNA, 2737 bp, Artificial Sequence
  derived and/or modified sequence
ctgaacctcagccgcgccgggaggcgagcccgttggcgaggggcggggcagatggcgagggagcggggcgagctgctttttgaggctgcgcactcgcatggccccacctcgcaggtccacttccggcgccgcggctgttccgggcggagaccgcttgtgctggagtcggagttgtaacgctccactgactgatagagcgaccggccgaccatggcgcccggagtggcccgcgggccgacgccgtactggaggttgcgcctcggtggcgccgcgctgctcctgctgctcatcccggtggccgccgcgcaggagcctcccggagctgcttgttctcagaacacaaacaaaacctgtgaagagtgcctgaagaacgtctcctgtctttggtgcaacactaacaaggcttgtctggactacccagttacaagcgtcttgccaccggcttccctttgtaaattgagctctgcacgctggggagtttgttgggtgaactttgaggcgctgatcatcaccatgtcggtagtcgggggaaccctcctcctgggcattgccatctgctgctgctgctgctgcaggaggaagaggagccggaagccggacaggagtgaggagaaggccatgcgtgagcgggaggagaggcggatacggcaggaggaacggagagcagagatgaagacaagacatgatgaaatcagaaaaaaatatggcctgtttaaagaagaaaacccgtatgctagatttgaaaacaactaaagcgctccagcacatcagtcccgacgcttcctgtgaggtgcacgctccgcagcccagcccagccgggagaccacgtggccattgcggtctcctgaccttggccagtgaacctgccagccttccaggacaggcggccggagagctgcccctgaaggacagtcctctcgtcttgcagactggtgaccttctattccctgttcatctctgtttctagatttagtcacttgaaataagaaatctttggggtttgggcttttttatactcttctcagtttgtgaaacgctaactgcacacgaagccgcctgacggcacccagcgctgtggctgtcattctcccagggcagaaccctgcgtttctctctgtccactaacaagcttcacacgcaacacagggaagtcggtttgacttttgtcatgaggagaactgaccagccctcatcattccccataaaaccacggacagcgtctgtgtgcgcatcttgagtcttcacacctgttgactcacacggcttttgctgatgacacggggctccagtacacagtctgataaggacttaacgtcctaacctcaattgtattaaatagcattggggaatagctaaacctttttaaaaaaatttattggattttcctccctgcttaaaagatttcaccagaaaaccttcatataaaaattcaggccctttttggacaatttttaaaatttgtatctttactagaacatgagaatctttttcccttggaagcttgaattataaatgtggtgtttggcctgcctcagcagcaccagttgactgctcgtgtgccagcggtgtggggaggacggggcaggacgctgcagctctctccagccctgttggcatcctcagtgcctgcaggcctctcgctgcctgttgggctgtctggggggtggccatttagggatcgtggggacggggtccaccccaagaagaaagaaaggcccgtccacaggcccggctctgggccacgtgccccggaagcaggtgtgtccagagtcagctgagggctctccccacaccacccagcaggcgctggtgctccttctgcctcatgggaccagtccagcttccagccgctctggctcgagggtggtctgagcacttccttctgagtgggcttctctgggagctctccagtggcactgctggacctgcccacgtttctgtaaaatcaggatacgtggctttagtaagcagaccaagcgcttcgtggcagggaaagcagcgtgcggggaagtcactgaaaagtgctgcctaaggaagtttggaaatagtccccgttccagattgccttgaattttaaaacattttgctttgggaaagtaggtcagcagcacctaagatcaaggatgcgttccattttcacacttcacagtcatgaaaactgagaagactgtcttcagcgtgaactaaagttcacaggcagatcactgatccagaacacttcaagaactcgtcaaacagctcgataagcctttttgactgtgtacatctgtaccgggaataacattcctaggctgaaatttccacaaagaatagaacctgtacccagttcttcaggctgatttccctgacctcttgggcatttgtatttgtagtaaagtattgcagagattcctaagtattttatagcagccatcaaaattggactttgtattgtttattcataaaagacacttggtaatagacttcagtgaactctgtatgaatgcagtagtgtgcgtgcaaaatccgcttcctgagcgtagggtgctgagctggcgctagggctcggttgtgaaatacagcgtagtcagcccttgcgctcagtgtagaaacccacgtctgtaaggtcggtcttcgtccatctgcttttttctgaaatacactaagagcagccacaaaactgtaacctcaaggaaaccataaagcttggagtgccttaatttttaaccagtttccaataaaacggtttactacctga

SEQ ID NO: 145215 - DNA, 543 bp, Artificial Sequence
  derived and/or modified sequence
atggcccctggcgtagcccggggacctaccccatactggaggctcagacttggaggcgccgccctcctgctgctgctgatcccagtcgcagcagctcaagagccgcctggagccgcttgtagccagaatactaataagacttgcgaagagtgcctgaaaaacgtctcctgcctttggtgcaacacaaacaaggcttgcctggattaccccgtgacctcagtgctccccccggcctctctgtgtaaacttagctctgctcgttggggcgtctgttgggtcaattttgaggccctgatcattacgatgtccgttgttggtggcacactgctgcttgggatagcgatctgttgctgctgctgctgccgaaggaaacgatccaggaagcccgacaggagtgaagaaaaggccatgagagagagagaggagagacgtattcgtcaggaggagaggcgggccgagatgaagacacggcatgacgagatacggaagaagtacggacttttcaaagaggagaacccctatgcacggttcgaaaacaactag

SEQ ID NO: 145216 - DNA, 543 bp, Artificial Sequence
  derived and/or modified sequence
atggcccctggggtggcccggggccccaccccctactggaggctgcggctgggcggggccgccctgctgctgctgctgatccctgtggccgccgcccaggagcccccaggggccgcctgcagccagaacaccaacaagacctgtgaggagtgcctgaagaatgtgtcctgcctgtggtgcaacaccaacaaggcctgcctggactaccctgtgacctctgtgctgcccccagccagcctgtgcaagctgagcagcgcccgctggggcgtgtgctgggtgaactttgaggccctgatcatcaccatgtctgtggtgggcggcaccctgctgctgggcatcgccatctgctgctgctgctgctgcaggaggaagaggagcaggaagccagacagaagtgaggagaaggccatgagggagcgggaggagcggcgcatccggcaggaggagcggcgggcagagatgaagaccaggcatgatgagatcaggaagaagtatggcctcttcaaggaggagaacccctatgccaggtttgagaacaactag

SEQ ID NO: 145217 - DNA, 543 bp, Artificial Sequence
  derived and/or modified sequence
atggcccccggcgtggcccggggccccaccccctactggcggctgcgattaggaggcgcagccctgctactgttactcatccctgtggccgccgctcaggagcctcccggagcagcatgctctcagaacaccaacaaaacttgcgaagaatgcctgaagaacgtttcatgtttatggtgcaacactaataaggcgtgcctcgattaccccgtcacctccgtcctccccccagcctcgctatgcaaattaagttctgctaggtggggcgtgtgttgggtaaatttcgaggcactgatcatcaccatgagcgttgtcggcggcacattgttgttggggattgccatctgttgttgctgctgctgcagaaggaaaagaagccgaaagccagaccgctcagaagaaaaggctatgagggagagggaagaaagaaggattcggcaggaagaaagacgggcggagatgaaaacgagacacgatgagatcagaaagaagtacgggctgttcaaggaggaaaatccttacgctcggttcgaaaacaactag

SEQ ID NO: 145218 - DNA, 2760 bp, Artificial Sequence
  derived and/or modified sequence
gcgcaggcgcactgaacctcagccgcgccgggaggcgagcccgttggcgaggggcggggcagatggcgagggagcggggcgagctgctttttgaggctgcgcactcgcatggccccacctcgcaggtccacttccggcgccgcggctgttccgggcggagaccgcttgtgctggagtcggagttgtaacgctccactgactgatagagcgaccggccgaccatggcgcccggagtggcccgcgggccgacgccgtactggaggttgcgcctcggtggcgccgcgctgctcctgctgctcatcccggtggccgccgcgcaggagcctcccggagctgcttgttctcagaacacaaacaaaacctgtgaagagtgcctgaagaacgtctcctgtctttggtgcaacactaacaaggcttgtctggactacccagttacaagcgtcttgccaccggcttccctttgtaaattgagctctgcacgctggggagtttgttgggtgaactttgaggcgctgatcatcaccatgtcggtagtcgggggaaccctcctcctgggcattgccatctgctgctgctgctgctgcaggaggaagaggagccggaagccggacaggagtgaggagaaggccatgcgtgagcgggaggagaggcggatacggcaggaggaacggagagcagagatgaagacaagacatgatgaaatcagaaaaaaatatggcctgtttaaagaagaaaacccgtatgctagatttgaaaacaactaaagcgctccagcacatcagtcccgacgcttcctgtgaggtgcacgctccgcagcccagcccagccgggagaccacgtggccattgcggtctcctgaccttggccagtgaacctgccagccttccaggacaggcggccggagagctgcccctgaaggacagtcctctcgtcttgcagactggtgaccttctattccctgttcatctctgtttctagatttagtcacttgaaataagaaatctttggggtttgggcttttttatactcttctcagtttgtgaaacgctaactgcacacgaagccgcctgacggcacccagcgctgtggctgtcattctcccagggcagaaccctgcgtttctctctgtccactaacaagcttcacacgcaacacagggaagtcggtttgacttttgtcatgaggagaactgaccagccctcatcattccccataaaaccacggacagcgtctgtgtgcgcatcttgagtcttcacacctgttgactcacacggcttttgctgatgacacggggctccagtacacagtctgataaggacttaacgtcctaacctcaattgtattaaatagcattggggaatagctaaacctttttaaaaaaatttattggattttcctccctgcttaaaagatttcaccagaaaaccttcatataaaaattcaggccctttttggacaatttttaaaatttgtatctttactagaacatgagaatctttttcccttggaagcttgaattataaatgtggtgtttggcctgcctcagcagcaccagttgactgctcgtgtgccagcggtgtggggaggacggggcaggacgctgcagctctctccagccctgttggcatcctcagtgcctgcaggcctctcgctgcctgttgggctgtctggggggtggccatttagggatcgtggggacggggtccaccccaagaagaaagaaaggcccgtccacaggcccggctctgggccacgtgccccggaagcaggtgtgtccagagtcagctgagggctctccccacaccacccagcaggcgctggtgctccttctgcctcatgggaccagtccagcttccagccgctctggctcgagggtggtctgaccacttccttctgagtgggcttctctgggagctctccagtggcactgctggacctgcccacgtttctgtaaaatcaggatacgtggctttagtaagcagaccaagcgcttcgtggcagggaaagcagcgtgcggggaagtcactgaaaagtgctgcctaaggaagtttggaaatagtccctgttccagattgccttgaattttaaaacattttgctttgggaaagtaggtcagcagcacctaagatcaaggatgcgttccattttcacacttcacagtcatgaaaactgagaagactgtcttcagcgtgaactaaagttcacaggcagatcactgatccagaacacttcaagaactcgtcaaacagctcgataagcctttttgactgtgtacatctgtaccgggaataacattcctaggctgaaatttccacaaagaatagaacctgtacccagttcttcaggctgatttccctgacctcttgggcatttgtatttgtagtaaagtattgcagagattcctaagtattttatagcagccatcaaaattggactttgtattgtttattcataaaagacacttggtaatagacttcagtgaactctgtatgaatgcagtagtgtgtgtgcaaaatccgcttcctgagcgtagggtgctgagctggcgctagggctcggttgtgaaatacagcgtagtcagcccttgcgctcagtgtagaaacccacgtctgtaaggtcggtcttcgtccatctgcttttttctgaaatacactaagagcagccacaaaactgtaacctcaaggaaaccataaagcttggagtgccttaatttttaaccagtttccaataaaacggtttactacctgcgtgtgtttagta

SEQ ID NO: 145219 - DNA, 543 bp, Artificial Sequence
  derived and/or modified sequence
atggcccctggggtggccagaggacctactccatactggcggctgcgtttgggtggtgctgctcttttgctccttctgatccctgtcgcagccgcacaagagccgcctggcgctgcctgttcgcaaaatactaacaagacttgcgaagagtgtcttaagaatgttagctgtctgtggtgcaacaccaacaaggcatgtctggattaccccgtgacctctgtcctacctccggcaagcctgtgtaagctatcttccgccaggtggggcgtgtgctgggtgaattttgaagccctcattatcacaatgtctgtggtaggcggaacactgctgctgggaattgcgatctgttgctgttgttgctgccggaggaagcgcagccgtaagccagacaggtctgaggagaaagcaatgcgcgagcgagaagagcgcagaattagacaggaagaaaggcgcgcagaaatgaagacacgacatgatgaaattcgaaagaagtacgggctgttcaaagaggaaaatccgtacgcccgatttgagaataactag

SEQ ID NO: 145220 - DNA, 543 bp, Artificial Sequence
  derived and/or modified sequence
atggcccccggcgtggccagaggccccaccccctactggagactgagactgggcggcgccgccctgctgctgctgctgatccccgtggccgccgcccaggagccccccggcgccgcctgcagccagaacaccaacaagacctgcgaggagtgcctgaagaacgtgagctgcctgtggtgcaacaccaacaaggcctgcctggactaccccgtgaccagcgtgctgccccccgccagcctgtgcaagctgagcagcgccagatggggcgtgtgctgggtgaacttcgaggccctgatcatcaccatgagcgtggtgggcggcaccctgctgctgggcatcgccatctgctgctgctgctgctgcagaagaaagagaagcagaaagcccgacagaagcgaggagaaggccatgagagagagagaggagagaagaatcagacaggaggagagaagagccgagatgaagaccagacacgacgagatcagaaagaagtacggcctgttcaaggaggagaacccctacgccagattcgagaacaactag

SEQ ID NO: 145221 - protein, 2225 aa, Artificial Sequence
  derived and/or modified sequence
MAALVLEDGSVLRGQPFGAAVSTAGEVVFQTGMVGYPEALTDPSYKAQILVLTYPLIGNYGIPPDEMDEFGLCKWFESSGIHVAALVVGECCPTPSHWSATRTLHEWLQQHGIPGLQGVDTRELTKKLREQGSLLGKLVQNGTEPSSLPFLDPNARPLVPEVSIKTPRVFNTGGAPRILALDCGLKYNQIRCLCQRGAEVTVVPWDHALDSQEYEGLFLSNGPGDPASYPSVVSTLSRVLSEPNPRPVFGICLGHQLLALAIGAKTYKMRYGNRGHNQPCLLVGSGRCFLTSQNHGFAVETDSLPADWAPLFTNANDGSNEGIVHNSLPFFSVQFHPEHQAGPSDMELLFDIFLETVKEATAGNPGGQTVRERLTERLCPPGIPTPGSGLPPPRKVLILGSGGLSIGQAGEFDYSGSQAIKALKEENIQTLLINPNIATVQTSQGLADKVYFLPITPHYVTQVIRNERPDGVLLTFGGQTALNCGVELTKAGVLARYGVRVLGTPVETIELTEDRRAFAARMAEIGEHVAPSEAANSLEQAQAAAERLGYPVLVRAAFALGGLGSGFASNREELSALVAPAFAHTSQVLVDKSLKGWKEIEYEVVRDAYGNCVTVCNMENLDPLGIHTGESIVVAPSQTLNDREYQLLRQTAIKVTQHLGIVGECNVQYALNPESEQYYIIEVNARLSRSSALASKATGYPLAYVAAKLALGIPLPELRNSVTGGTAAFEPSVDYCVVKIPRWDLSKFLRVSTKIGSCMKSVGEVMGIGRSFEEAFQKALRMVDENCVGFDHTVKPVSDMELETPTDKRIFVVAAALWAGYSVDRLYELTRIDRWFLHRMKRIIAHAQLLEQHRGQPLPPDLLQQAKCLGFSDKQIALAVLSTELAVRKLRQELGICPAVKQIDTVAAEWPAQTNYLYLTYWGTTHDLTFRTPHVLVLGSGVYRIGSSVEFDWCAVGCIQQLRKMGYKTIMVNYNPETVSTDYDMCDRLYFDEISFEVVMDIYELENPEGVILSMGGQLPNNMAMALHRQQCRVLGTSPEAIDSAENRFKFSRLLDTIGISQPQWRELSDLESARQFCQTVGYPCVVRPSYVLSGAAMNVAYTDGDLERFLSSAAAVSKEHPVVISKFIQEAKEIDVDAVASDGVVAAIAISEHVENAGVHSGDATLVTPPQDITAKTLERIKAIVHAVGQELQVTGPFNLQLIAKDDQLKVIECNVRVSRSFPFVSKTLGVDLVALATRVIMGEEVEPVGLMTGSGVVGVKVPQFSFSRLAGADVVLGVEMTSTGEVAGFGESRCEAYLKAMLSTGFKIPKKNILLTIGSYKNKSELLPTVRLLESLGYSLYASLGTADFYTEHGVKVTAVDWHFEEAVDGECPPQRSILEQLAEKNFELVINLSMRGAGGRRLSSFVTKGYRTRRLAADFSVPLIIDIKCTKLFVEALGQIGPAPPLKVHVDCMTSQKLVRLPGLIDVHVHLREPGGTHKEDFASGTAAALAGGITMVCAMPNTRPPIIDAPALALAQKLAEAGARCDFALFLGASSENAGTLGTVAGSAAGLKLYLNETFSELRLDSVVQWMEHFETWPSHLPIVAHAEQQTVAAVLMVAQLTQRSVHICHVARKEEILLIKAAKARGLPVTCEVAPHHLFLSHDDLERLGPGKGEVRPELGSRQDVEALWENMAVIDCFASDHAPHTLEEKCGSRPPPGFPGLETMLPLLLTAVSEGRLSLDDLLQRLHHNPRRIFHLPPQEDTYVEVDLEHEWTIPSHMPFSKAHWTPFEGQKVKGTVRRVVLRGEVAYIDGQVLVPPGYGQDVRKWPQGAVPQLPPSAPATSEMTTTPERPRRGIPGLPDGRFHLPPRIHRASDPGLPAEEPKEKSSRKVAEPELMGTPDGTCYPPPPVPRQASPQNLGTPGLLHPQTSPLLHSLVGQHILSVQQFTKDQMSHLFNVAHTLRMMVQKERSLDILKGKVMASMFYEVSTRTSSSFAAAMARLGGAVLSFSEATSSVQKGESLADSVQTMSCYADVVVLRHPQPGAVELAAKHCRRPVINAGDGVGEHPTQALLDIFTIREELGTVNGMTITMVGDLKHGRTVHSLACLLTQYRVSLRYVAPPSLRMPPTVRAFVASRGTKQEEFESIEEALPDTDVLYMTRIQKERFGSTQEYEACFGQFILTPHIMTRAKKKMVVMHPMPRVNEISVEVDSDPRAAYFRQAENGMYIRMALLATVLGRF

SEQ ID NO: 145222 - DNA, 6678 bp, Artificial Sequence
  derived and/or modified sequence
atggctgccctggtgctggaggacggttcggttttaaggggccagccctttggcgccgccgtctcaacagccggcgaagtggtgtttcagaccgggatggtgggctaccccgaggctctgaccgatccgtcttacaaggcccagatcctagtgttgacctacccactgataggtaactacgggatcccacctgacgagatggacgagttcggcctgtgtaagtggttcgaatcttcgggcatacacgtagccgcactcgtggttggcgaatgttgtccgaccccctctcattggagtgccactcgcaccttgcacgagtggctacagcagcacgggatccccggtttgcagggtgtggatactcgggaacttaccaagaagttgcgcgaacaaggcagcctcttgggcaagctggttcagaatggcactgagccatctagcctacccttcctagatccgaatgctcgacccctggtgccggaagtgagcatcaagacacccagagtcttcaatacaggcggagcccccaggattctggccctggattgtggactgaagtataatcagatacgctgcctgtgccaacgcggcgcggaggtgactgtggtgccgtgggaccacgccctcgattctcaagagtacgaaggccttttcttgagtaacggcccaggcgacccagcaagctatccatcagtggtgtccactctctcaagagtgttaagtgagccaaacccgaggcccgtcttcggtatttgcctcggccaccaactcctcgcactcgccatcggagccaaaacttacaagatgcgctatggtaacagggggcataaccagccatgcctgctggtcggtagtggccgttgctttcttaccagccaaaaccacgggttcgccgtggagacagactcactcccagccgattgggcaccgttatttacgaacgcaaatgacggttccaatgaagggattgtgcacaattcccttccatttttttcagtgcagtttcatcccgagcaccaagccggcccgtctgacatggagctgctcttcgacatatttctagagacagtaaaggaagctactgccgggaatccaggtggacagacggtgagggagcggctgactgagagactttgtcccccaggcattcctaccccaggctccggcctcccccctccccgcaaggtgttgatccttggcagtggaggactaagcataggccaggctggcgaatttgattactcgggtagccaggcaatcaaagctctgaaggaggaaaatatacagacgctgctcatcaacccaaatatagctactgtgcagacctcacagggtctcgccgataaggtttatttcctgcctataaccccccactacgtgactcaagttatccggaatgaaaggcccgatggggtgctcctgactttcggggggcagacggctctgaactgcggagttgagttgaccaaagctggagtgctggccaggtatggggtgcgggtgctgggaacccctgtggagaccattgagctgaccgaagatcgacgggcattcgccgccagaatggctgagataggagagcacgttgctcctagtgaggccgccaactccctggagcaggcccaggccgccgccgagaggctgggatacccagtgctggtgagggccgccttcgcccttggaggcctgggcagtggatttgcaagcaaccgggaagaactgagtgcattagtggcgccagcctttgcacatacgtcccaagtacttgtggataagagccttaaaggatggaaggagattgaatacgaagtggtgcgtgacgcatacgggaattgtgttacagtctgcaacatggagaatttggatcctctaggaatacataccggcgaaagtatcgtagtggcaccttcccagaccctgaatgacagagagtaccagctgttgcggcagactgccataaaagttacccagcacctgggaatcgtgggggagtgtaatgtccagtacgcactgaatccagagtccgaacagtactacatcattgaagtcaacgcacggcttagtagaagtagtgccttggcctccaaagccacaggctatccactggcttacgtcgctgcgaaactggcattgggcatacccctgccagagctgcgaaattctgtgactggtggcacagctgcgtttgagccttccgtggattactgcgtcgtgaaaatccctcggtgggatctcagcaaatttctgagggtctccaccaaaatcgggtcatgcatgaagtccgtgggcgaagttatgggtattgggcgtagttttgaagaagctttccagaaagctctcaggatggttgatgagaactgtgtcggctttgaccacaccgtgaagccagtctctgatatggagctcgagacacccaccgacaaaagaatcttcgtggtggctgccgcactctgggccggctacagcgtggatcggctctatgaacttacaaggatagaccggtggtttttgcaccgtatgaagcggatcattgcccatgcccagctcctcgagcagcatcgagggcaaccactgccccctgatctcctccagcaggcaaagtgtctcgggttctccgataaacagatcgcactggctgtccttagcacagaactggctgtccgaaaactgcgccaggaattagggatttgtcctgcagtcaagcagatagataccgttgccgccgagtggcctgctcagacaaattatttgtatctcacatattggggcacaactcacgacctaacctttcggacaccgcacgtcctcgtcctggggtctggagtctacagaattggctcctcggtggagttcgactggtgcgctgtgggctgcatacaacagctccgaaaaatgggctacaaaacaatcatggtgaattacaatccagaaaccgtcagtactgactacgacatgtgcgaccgtctctactttgatgaaatatcttttgaggttgtcatggatatttatgaactggagaatcctgagggggtgatcctgtccatgggtgggcagctgcctaataacatggcaatggctctgcataggcaacagtgcagggtcctcggtacgtcccctgaagccatagactccgccgagaataggtttaaattctcaaggctgctcgacactatcgggatttcccaaccacagtggcgagaactctccgatctggagtctgcccggcagttctgccagaccgtgggatacccctgcgttgttcgcccctcttacgtactgtcaggtgctgccatgaatgtggcctatactgatggagacctggagcgattcctttcttctgctgccgccgtgtccaaagagcacccggtggtcattagtaagtttatccaggaagccaaggagatagatgtagatgctgtggcatcggatggagttgtggcagcaatagctatctctgagcacgttgagaacgcaggggtacattcaggcgatgcgacgttggttaccccaccgcaagatatcactgccaaaactctggagcgcatcaaagcaattgtccatgcagtgggtcaggagctgcaggtgacagggccgtttaatctgcaacttatcgcaaaggacgatcagctgaaggtgattgagtgtaatgtaagggtttctcgaagtttcccttttgtgtctaaaacactgggggtggatctggtggccctcgcgacccgggtaattatgggtgaagaagtggagcctgttggcctgatgactggatcaggagtcgtcggggtgaaggtaccacagttctctttctcacggttagccggggccgacgtagtccttggagtggaaatgacatccactggcgaggtggcagggttcggcgagagcaggtgcgaggcctacctcaaagcgatgttatcaacaggttttaagatccctaagaagaatatcctgttaacaatcggctcttataagaacaagagtgagttgcttccgacagtcagacttcttgaatccttgggctactcactgtatgcttcactgggcactgccgacttctacacagagcatggagtgaaagtaacagctgtggactggcacttcgaggaggcagtggatggagagtgcccacctcaaaggtcaattctcgaacagctggccgagaagaatttcgagctagtaattaacctcagtatgcggggggcagggggtcgtcgcctgtccagcttcgtgacaaagggttataggacacgcaggttggccgccgacttttcggtgccactgataatcgacatcaagtgcaccaagttattcgtggaagctctggggcagattggacccgctccccctctgaaggtacacgtggactgtatgacaagccagaagttggttcgcctccccgggctcatcgacgtgcatgtgcacctgcgcgagccaggtggaacacataaggaggattttgctagcgggaccgcagctgctttggctggaggaatcaccatggtgtgcgcgatgccaaataccagaccccctatcattgatgcccctgccctcgcacttgcccagaaacttgctgaggccggcgcaaggtgtgattttgccttgtttctgggtgcgtcttccgaaaacgcaggcactctcggtactgttgccggtagtgcggcggggctgaaactgtacctaaatgaaacattttctgaactgaggctcgatagtgtggtgcaatggatggaacattttgaaacttggcccagtcacctgcccatcgtggctcacgcagagcagcagaccgtggcagctgttctcatggtggcccaattgacccagcgaagtgtacacatctgccacgtggccaggaaagaagagattctcctgattaaagccgccaaggcccgaggtctcccggtgacctgtgaagtggcgccacaccacctctttctgtcgcacgacgacctggaaaggttagggcctggcaagggcgaggtgagaccagagctggggagccgtcaggacgtcgaggccctgtgggagaatatggctgtgattgattgtttcgcttctgaccatgccccacacacgcttgaggagaagtgcggctctcgcccccctcccgggtttcctggtctggagacaatgcttcctctgttgctgaccgccgttagcgaaggccgactgtctctggacgatcttctgcagcgcctgcaccataatccaaggagaattttccacctccctccccaggaagatacttacgtggaggtggacctggagcacgaatggactattccgtctcatatgcctttttccaaagcccactggaccccttttgagggccagaaagtgaaaggcaccgtcagaagagtagttctgcgcggtgaggtcgcctacatcgacggacaggtccttgtgcccccaggatatggccaggatgtgaggaagtggccacagggcgcagttccacagcttcctccgtcagccccagccacgtctgagatgaccaccactcccgaacgaccaagacgcggaattccagggctccctgatggacgattccatctgccccccaggatccatagagcgtccgacccggggctccctgcagaagagcccaaagaaaaatcttctaggaaagtcgccgaaccagagctgatgggcaccccggacggaacctgttacccacctccccccgtgccgagacaagcaagcccacaaaacctaggtacacctgggctgctccatccccagaccagccccctgcttcatagcttagttggccagcatatcctgtcagtccaacagttcacaaaagaccagatgagccatctgtttaacgtggctcatactctgaggatgatggtccagaaagaaagaagcctagacattctgaaaggtaaagtaatggcctccatgttttacgaagtcagtactcggacatcaagcagctttgccgcagcaatggctaggttggggggcgcagtcctcagcttttcagaggctacttcctctgtgcaaaaaggcgaaagcttagcagattccgtccaaaccatgtcttgttacgccgacgtagtggtgctgcgccatccccagcccggggctgtagaactagccgcaaagcactgcaggaggccagtcattaatgccggtgacggtgtgggagaacacccaacccaagccctcctcgatattttcaccatacgcgaagagctgggcaccgtgaatggcatgacaatcactatggtcggagacttaaagcatggccggaccgtccacagcctcgcctgcctccttactcagtacagagtgagtttgcgctatgtggcacctcccagtcttaggatgcccccaaccgtccgggcctttgtggccagcagaggcactaaacaggaggaattcgaatccatagaggaggccttacctgatacagacgtcctgtatatgacccggatacagaaggaacgatttggctctactcaggaatacgaagcttgttttggacaattcatattaactccacacatcatgacccgggctaagaaaaagatggtagtgatgcaccccatgcctcgagttaatgaaataagcgtagaggttgacagtgatccccgggcagcttacttccggcaggccgaaaacggaatgtacattaggatggcgttgttggcgaccgtgctgggacgattttag

SEQ ID NO: 145223 - DNA, 6678 bp, Artificial Sequence
  derived and/or modified sequence
atggccgccctggtgctggaggatggctctgtgctgcggggccagccctttggagctgctgtgtccacagctggggaggtggtgttccagacaggcatggtgggctacccagaggccctgacagaccccagctacaaggcccagatcctggtgctgacctaccccctgattggcaactacggcatccccccagatgagatggatgaatttggcctgtgcaagtggtttgagagcagcggcatccacgtggccgccctggtggtgggggagtgctgccccacccccagccactggagcgccaccaggaccctgcacgagtggctgcagcagcacggcatccctggcctgcagggcgtggacacccgggagctgaccaagaagctgcgggagcagggcagcctgctgggcaagctggtgcagaatggaacagagcccagcagcctgcccttcctggaccccaatgcccggcccctggtgcctgaggtgtccatcaagacccccagggtcttcaacacaggaggagccccccgcatcctggccctggactgtggcctgaagtacaaccagatccgctgcctgtgccagagaggagctgaggtgacagtggtgccctgggaccacgccctggacagccaggagtatgagggcctcttcctgagcaatggacctggggaccctgccagctaccccagcgtggtgtccaccctgagccgggtgctgtctgagcccaaccccaggcctgtgtttggcatctgcctgggccaccagctgctggccctggccatcggggccaagacctacaagatgagatatggcaacagaggccacaaccagccctgcctgctggtgggcagcggccgctgcttcctgaccagccagaaccacggctttgctgtggagacagacagcctgcctgctgactgggcccccctcttcaccaatgccaatgatggcagcaatgaaggaattgtgcacaacagcctgcccttcttctctgtgcagttccaccctgagcaccaggccggccccagcgacatggagctgctgtttgacatcttcctggagaccgtgaaggaggccacagctggcaaccctgggggccagacagtgcgggagcggctgacagagcggctgtgccccccaggcatccccaccccaggcagcggcctgcccccacccaggaaggtgctgatcctgggcagcggcggcctgagcatcggccaggccggggagtttgactacagcggcagccaggccatcaaggccctgaaggaggagaacatccagaccctgctgatcaaccccaacatcgccaccgtgcagaccagccagggcctggccgacaaggtgtacttcctgcccatcaccccccactacgtgacccaggtgatcagaaatgaaagaccagatggagtgctgctgaccttcggcggccagacagccctgaactgtggggtggagctgaccaaggccggcgtgctggcccgctatggagtgcgggtgctgggcacccctgtggagaccatcgagctgacagaagatagaagagcctttgctgccaggatggccgagattggagagcacgtggcccccagcgaggccgccaacagcctggagcaggcccaggccgctgctgagcggctgggctaccctgtgctggtgcgggccgcctttgccctgggcggcctgggcagcggctttgccagcaaccgggaggagctgagcgccctggtggccccagcctttgcccacaccagccaggtgctggtggacaagagcctgaagggctggaaggagattgaatatgaggtggtgagagatgcctacggcaactgtgtgacagtgtgcaacatggagaacctggaccccctgggcatccacactggagagagcatcgtggtggcccccagccagaccctgaatgaccgggagtaccagctgctgcggcagacagccatcaaggtgacccagcacctgggcatcgtgggggagtgcaatgtgcagtatgccctgaaccctgagagcgagcagtactacatcatcgaggtgaatgcccggctgagccgcagcagcgccctggccagcaaggccaccggctaccccctggcctacgtggccgccaagctggccctgggcatccccctgcctgagctgagaaattctgtgactggaggaacagctgcctttgagcccagcgtggactactgtgtggtgaagatcccccgctgggacctgagcaagttcctgcgggtgtccaccaagattggcagctgcatgaagtctgtgggggaggtgatgggcatcggccgcagctttgaggaggccttccagaaggccctgaggatggtggatgagaactgtgtgggctttgaccacacagtgaagcctgtgtctgacatggagctggagacccccacagacaagaggatctttgtggtggccgccgccctgtgggccggctacagcgtggaccggctgtatgagctgaccagaattgaccgctggttcctgcacaggatgaagaggatcatcgcccacgcccagctgctggagcagcaccggggccagcccctgcccccagacctgctgcagcaggccaagtgcctgggcttcagtgacaagcagatcgccctggccgtgctgagcacagagctggccgtgaggaagctgcggcaggagctgggcatctgcccagctgtgaagcagattgacacagtggccgctgagtggccagcccagaccaactacctgtacctgacctactggggcaccacccatgacctgaccttccgcaccccccacgtgctggtgctgggcagcggcgtgtacagaattggcagctctgtggagtttgactggtgtgctgtgggctgcatccagcagctgaggaagatgggctacaagaccatcatggtgaactacaaccctgagaccgtgtccacagattatgacatgtgtgaccggctgtactttgatgagatcagctttgaggtggtgatggacatctatgagctggagaaccctgagggcgtcatcctgtccatgggcggccagctgcccaacaacatggccatggccctgcaccggcagcagtgccgggtgctgggcaccagccctgaggccatcgacagcgctgagaaccgcttcaagttcagccggctgctggacaccatcggcatcagccagccccagtggagggagctgagtgacctggagagcgcccggcagttctgccagacagtgggctacccctgtgtggtgcggcccagctatgtgctgagcggggccgccatgaatgtggcctacacagatggagacctggagcgcttcctgagcagcgctgctgctgtgtccaaggagcaccctgtggtgatcagcaagttcatccaggaggccaaggagattgatgtggatgctgtggccagtgatggagtggtggccgccatcgccatcagcgagcacgtggagaatgctggggtgcacagcggagatgccaccctggtgaccccaccccaggacatcacagccaagaccctggagcgcatcaaggccatcgtgcatgctgtgggccaggagctgcaggtgacaggccccttcaacctgcagctgattgccaaggatgaccagctgaaggtgattgagtgcaatgtgcgggtgagccgctccttcccctttgtgtccaagaccctgggcgtggacctggtggccctggccaccagggtcatcatgggagaggaggtggagcctgtgggcctgatgacaggcagcggcgtggtgggcgtgaaggtgccccagttctccttcagccggctggccggggctgatgtggtgctgggcgtggagatgaccagcactggagaggtggccggctttggagagagccgctgtgaggcctacctgaaggccatgctgagcacaggcttcaagatccccaagaagaacatcctgctgaccatcggcagctacaagaacaagtctgagctgctgcccaccgtgcggctgctggagagcctgggctacagcctgtatgccagcctgggcacagctgacttctacacagaacatggagtgaaggtgacagctgtggactggcactttgaggaggccgtggatggagaatgtcctccccagaggagcatcctggagcagctggccgagaagaactttgagctggtgatcaacctgtccatgagaggagctgggggccgccgcctgagcagctttgtgaccaagggctaccgcacccggcggctggccgctgacttctctgtgcccctcatcatcgacatcaagtgcaccaagctgtttgtggaggccctgggccagatcggccctgccccacccctgaaggtgcacgtggactgcatgaccagccagaagctggtgcggctgcccggcctgattgatgtgcacgtgcacctgcgggagcccggcggcacccacaaggaggactttgccagcggcacagctgctgccctggccggcggcatcaccatggtgtgtgccatgcccaacacccggccccccatcattgatgccccagccctggccctggcccagaagctggccgaggccggggcccgctgtgactttgccctcttcctgggcgccagcagtgaaaatgccggcaccctgggcaccgtggccggcagcgctgctggcctgaagctgtacctgaatgagaccttcagcgagctgcggctggacagcgtggtgcagtggatggagcactttgagacctggcccagccacctgcccatcgtggcccatgctgagcagcagacagtggccgctgtgctgatggtggcccagctgacccagaggtctgtgcacatctgccacgtggccaggaaggaggagatcctgctgatcaaggccgccaaggcccggggcctgcctgtgacctgtgaggtggccccccaccacctgttcctgagccatgatgacctggagcggctgggccctggaaaaggagaggtgcggcctgagctgggcagccggcaggatgtggaggccctgtgggagaacatggccgtcatcgactgctttgccagtgaccacgccccccacaccctggaggagaagtgtggcagccggcccccacctggcttccctggcctggagaccatgctgcccctgctgctgacagctgtgtctgagggccgcctgagcctggatgacctgctgcagaggctgcaccacaacccccggcgcatcttccacctgcccccccaggaggacacctacgtggaggtggacctggagcacgagtggaccatccccagccacatgcccttcagcaaggcccactggaccccatttgagggccagaaggtgaagggcaccgtgcggcgggtggtgctgcggggggaggtggcctacattgatggccaggtgctggtgcccccaggctacggccaggatgtgaggaagtggccccagggcgctgtgccccagctgcccccatctgccccagccaccagcgagatgaccaccaccccagagcggccccggcggggcatccctggcctgcctgatggccgcttccacctgcccccacgcatccaccgggccagtgaccccggcctgcctgctgaggagcccaaggagaagagcagcaggaaggtggccgagcctgagctgatgggcaccccagatggcacctgctacccacctcctcctgtgccccggcaggccagcccccagaacctgggcaccccaggcctgctgcacccccagaccagccccctgctgcacagcctggtgggccagcacatcctgtctgtgcagcagttcaccaaggaccagatgagccacctgttcaacgtggcccacaccctgaggatgatggtgcagaaggagaggagcctggacatcctgaagggcaaggtgatggcctccatgttttatgaggtgtccaccaggaccagcagcagctttgctgctgccatggcccggctgggcggcgctgtgctgtccttcagcgaggccaccagctctgtgcagaagggggagagcctggccgacagcgtgcagaccatgagctgctacgcagatgtggtggtgctgcggcacccccagcccggggctgtggagctggccgccaagcactgcagaagacctgtgatcaatgctggagatggagtgggggagcaccccacccaggccctgctggacatcttcaccatccgggaggagctgggcaccgtgaatggcatgaccatcaccatggtgggggacctgaagcacggccgcacagtgcacagcctggcctgcctgctgacccagtacagagtgtccctgcgctacgtggccccacccagcctgaggatgccacccaccgtgcgggcctttgtggccagccggggcaccaagcaggaggagtttgagagcattgaggaggccctgcctgacacagatgtgctgtacatgacccgcatccagaaggagcgcttcggcagcacccaggagtatgaggcctgcttcggccagttcatcctgaccccccacatcatgacccgggccaagaagaagatggtggtgatgcaccccatgccccgggtgaatgagatctctgtggaggtggacagcgaccccagggctgcctacttccggcaggccgagaatggcatgtacatccgcatggccctgctggccaccgtgctgggccgcttctag

SEQ ID NO: 145224 - DNA, 6678 bp, Artificial Sequence
  derived and/or modified sequence
atggccgccctggtgctggaggacggcagcgtgctgcggggccagcccttcggcgccgccgtctctactgcaggtgaggtcgtctttcaaacggggatggtgggctacccggaggcactgaccgatcccagctataaagctcaaatattagtgctgacatacccactgatcggaaactatgggattccccctgatgagatggacgagttcggtctctgcaagtggttcgaatcctctggcatccacgtggccgcacttgtggtgggagagtgctgtcccactccatcccactggtccgcaacaagaaccctccacgagtggcttcagcagcacggcatacccggcctgcagggggttgacactagggagctgaccaaaaaattgagagaacagggctctttgctgggtaagctcgtgcagaacggtacggagcccagtagtctccctttcctggacccaaacgcacgccccttggtgccagaagtgagcatcaaaacaccacgagtgtttaatactggcggtgcccctcgcatcttggctttggattgcggattgaagtacaaccaaatcaggtgtctatgccagcgcggcgccgaggtgacagtggtgccttgggatcatgctctggactcacaggagtatgagggacttttcctttccaacggccctggcgatcctgctagctaccccagtgttgtgtcaactctaagtagggttctgtccgagccgaaccctcgcccagtgtttggcatctgcctgggacaccagctgctggctctcgcaatcggcgcaaagacttacaaaatgcgctacggtaaccgaggccataaccagccttgtttgctcgtgggctctggaagatgttttctgaccagccagaaccatggatttgccgtggaaacagactctctgccggcggattgggcgcctctcttcaccaatgctaatgacggttccaacgagggtatcgtacataattccctgccgttcttttcggtgcaatttcacccagagcaccaggcgggtccgtccgatatggaactcctgttcgatatcttcctcgagacagttaaggaggctacagcaggcaacccgggtggtcagacggtgcgcgagaggctcacagaaagactttgtccacctgggatccctaccccaggttccggtttgcctccaccacgtaaggtcctgattctgggatctgggggccttagcatcggccaagcaggagagttcgactactctggctctcaggccatcaaggcgctgaaagaggagaatatccagactctactcattaatccgaacatcgcgacagtccagacatcccaaggtcttgccgataaagtgtatttcctccctatcactcctcactatgtgacacaagtgatccgcaatgaacgacccgatggagtcctgttgacattcggtggtcagactgccttgaattgtggggtggagttaacaaaagccggcgttttggctcgctatggagtaagagtactgggcacaccagtggagaccatcgagcttaccgaagatagacgagcctttgctgcgagaatggcagaaataggtgagcacgtcgctccgagtgaggctgcaaactcccttgagcaggctcaggccgcagctgaacggctgggttatccagtgctggtcagagcagccttcgcattgggcggtctggggagtggattcgcgagcaatcgggaggaactcagtgccctggtagctccagctttcgcacatacgagtcaagtgcttgtggacaaatcgctgaaggggtggaaggaaattgaatacgaggtggttcgcgacgcctatgggaactgtgtcacagtgtgcaacatggagaacctcgatccactcggcattcacacaggcgaaagcatcgtggttgcgccatcccaaaccctgaatgatcgagagtatcagctgctgcggcagacggctattaaggtcacacagcatcttggcattgtcggcgagtgcaacgtacagtacgcacttaacccagagagtgagcagtactacatcatcgaggtcaatgcgagactgtcccgatcatccgccctggccagcaaggccaccgggtaccccctggcatacgtcgccgccaagttggctctggggataccactaccagaactacggaactctgtgacgggcggaacagctgcctttgagccgtctgtcgactattgtgtggtgaagataccccgttgggaccttagtaagttcctgagagtgtcaacaaaaataggctcttgtatgaagtccgtcggagaagtgatggggatcggtaggagtttcgaagaagcctttcagaaggctcttagaatggtggatgagaactgtgtgggctttgatcacaccgtaaaacccgtgagtgacatggaactcgagacccccacagataaaagaatattcgttgtggccgccgcattatgggctggatacagtgtggaccggctctatgaactcacaagaatcgacagatggttcttgcaccgcatgaaaagaatcatcgcacatgcccagctgctggagcagcatcgaggtcaacctctaccacccgacttgctgcagcaagccaaatgcttagggttttccgacaaacagatcgcactcgccgtgttaagcacggagcttgccgtacggaaactgcgccaggaattgggaatttgtcccgcggtcaagcagattgacactgtcgctgctgaatggcccgcccagactaactatctttacctcacatattggggaaccacacatgatcttacatttagaacgccccacgtgctggtgttgggtagcggggtgtacagaatcggatccagcgtcgaattcgactggtgtgctgtggggtgcatccaacaactccgcaaaatgggatataaaaccatcatggtgaattataaccccgagactgtcagcacagattatgacatgtgtgaccgcctgtacttcgatgagatcagctttgaggtggtcatggacatctatgaactggaaaaccctgagggggtgatcctctctatgggcggtcagcttcctaataatatggccatggccctgcaccggcagcaatgccgagtcctcggaacttctcctgaggccattgactcagctgagaacaggttcaaattctcccgtttgctggatactatcggcatctcgcagccacagtggcgggagctgtcggacctggagtcagcacggcaattctgccaaacagtcggatatccctgcgttgtgcgccccagctatgtattgagcggagccgccatgaatgtcgcatacactgatggagatctggagagatttttatccagtgcagctgcggtatccaaggagcaccccgtggtaatctccaaattcattcaagaagctaaagagattgacgtcgatgcggttgcctctgatggggtggttgccgccatcgcaattagcgagcacgtggagaatgctggcgtgcacagcggcgacgcaacccttgtgacacctccacaggacatcaccgcaaagaccctggagagaataaaggccatagtgcacgctgtgggacaggagctgcaggtgacaggcccctttaacctgcaattgattgctaaggacgaccagctgaaggtcattgagtgtaatgttagagtttctagaagtttccctttcgtgtccaaaacattgggggtggatctcgtggcactggccacacgtgtgattatgggggaggaggttgagcctgtcggactgatgaccgggagcggggtcgtgggcgtgaaagtaccccagttcagcttttcacgcttggcaggggctgatgttgttctgggggtcgagatgacaagcactggagaggtcgccggcttcggcgaatcccggtgcgaagcctaccttaaggccatgctctccaccggcttcaagattccaaaaaaaaacattctgcttacaatcgggtcctacaaaaacaagagcgaactgctcccgactgtcagacttcttgagtctctcggctacagcctgtacgcaagtctgggaacagctgatttctacacggagcacggtgtgaaggtgacagctgtggactggcatttcgaagaagccgtggacggcgaatgccccccgcagcgatcgatactcgagcagttagccgaaaaaaacttcgagctagtgataaacttgtctatgcggggcgccggggggcgcaggctgtcctcctttgtgaccaagggctatagaacccgccggctcgctgcggacttctctgtgcctctgatcatcgacattaaatgtactaagttgttcgttgaagctctcggccagatcgggcccgcaccccctctgaaggtccatgtcgattgcatgaccagccagaagctggttcgtctgccgggcctcatagatgtccatgtccatctgcgggagcctggtggcacgcataaagaggacttcgcttccggtacagcggccgcacttgccggaggaatcactatggtctgtgctatgcccaacacacgaccacccatcattgacgcccccgctcttgctttagctcagaagctggcagaggcgggagcacgctgtgactttgccttgtttttaggcgcctcctccgagaatgccgggactctgggcacggtggctggcagtgctgcgggcctgaaattgtaccttaacgaaacattctcggagctccgcctggacagcgtagtacaatggatggagcatttcgagacttggccatctcatcttcccattgttgctcacgcagaacagcagacagtggccgcagtcctcatggtggcccagctgacccagcgcagtgtgcacatctgccacgtcgcacggaaagaggagattctgttgatcaaagccgctaaagcccggggactgccagtcacttgcgaggtggccccgcatcatctcttcctgtcccatgatgacttagaacgactcggtccggggaagggagaagtgcgtcccgaactgggaagtagacaagatgttgaggctctatgggaaaatatggctgtcatcgattgttttgcaagcgaccacgctccacacaccctcgaagagaagtgtggctcacgacccccccccggtttccccggactagaaacaatgctcccactgctgctgaccgcagtgtccgaaggccgtttgtccctagatgacctgctgcaaaggctccaccacaaccctcggagaatattccacctgcccccccaggaggacacgtatgtcgaggtggacctagagcacgagtggaccattcccagccacatgccattttccaaagcccattggacaccctttgagggccagaaagtgaaagggacagtacgtagggtggtcctgagaggggaggtggcttacatcgacgggcaggtcctggtccctcccgggtacggtcaggacgtccggaagtggcctcagggcgctgtgccacaactccccccttcagccccagctacgtccgaaatgactactacacccgagcgccccagacggggcatccctggacttccagacggaaggtttcacttgcctcccagaattcatagagcctccgaccccggcctgccagctgaggagccgaaagaaaagtcctcccgaaaggtggcagagccagagttgatgggtacacccgacggaacttgctatcctccgcccccagtcccacggcaagcaagcccccagaatctcggcacgccaggtcttctgcatccgcaaacgagtcctctgctgcactccctcgtaggacagcatattctgtctgtgcagcaatttactaaggatcagatgtctcacctcttcaacgtagcacacacgctgcgaatgatggttcagaaagagagatcattagacatcctgaaaggaaaagtgatggctagcatgttctatgaggtgagcactcggacatcctcatccttcgctgcagctatggcaagactgggtggagctgttttgtcgttctccgaggcgacatccagcgtccaaaaaggagagagccttgccgattccgtgcagaccatgtcctgttatgccgacgtcgtcgtgttgcgtcacccccagcctggagctgtggagctcgctgcaaaacactgcagacgccctgttatcaacgctggggacggcgtgggtgagcatccaactcaggccctgctggacatctttactatacgtgaagaactgggtaccgtgaacggtatgaccatcacaatggtcggcgatctgaaacacggcaggacagtgcattccttggcttgtttgctgacacagtatcgggtatctctcagatatgtcgcccctcctagcctgagaatgcctcccactgttcgcgccttcgttgcttccaggggcacaaagcaggaagagttcgaatccattgaagaagcactaccggacaccgacgtgttatacatgactcggattcagaaagagaggttcggttcaacacaggaatacgaggcgtgttttgggcagtttattttgacacctcatattatgactcgcgcaaagaagaagatggtcgtgatgcacccaatgccaagagtgaacgaaatcagtgtggaagtggatagtgatcctagggccgcttatttcaggcaggccgaaaatggcatgtatatccggatggctctgctcgccaccgtgcttggtagattttag

SEQ ID NO: 145225 - DNA, 6678 bp, Artificial Sequence
  derived and/or modified sequence
atggccgctctggtcttggaggacggctctgtccttcgtggccaaccattcggagccgctgtctccaccgccggtgaagtggtcttccagacggggatggtgggctatccagaagccctcaccgacccgtcctataaggcgcagatcctggtgctaacataccccttaataggcaattatggaatacctccagatgagatggatgaattcgggctgtgcaagtggtttgagtcctccggcattcatgtcgcagccctagtcgtaggggaatgctgtccaaccccttcgcactggagcgcaacacgcacactgcacgagtggctccagcagcacggaatcccaggtttgcaaggagtagatacaagagaattaactaaaaagctgcgtgaacaaggatcattgctcggtaaactagtgcagaacgggactgaaccatcctcactccccttccttgatcccaacgctcgccctctcgtaccagaagtgagcattaagacaccacgggtgttcaataccggcggtgcacctagaatcctcgccttggattgtggactaaagtacaaccagatccgctgtctgtgtcagcgtggtgccgaggtgactgtggtcccctgggaccacgctctggatagtcaggagtacgaagggctgtttctgagcaacgggccaggagatcctgcatcctaccccagcgtggtttcaacgttgtctcgagtgctgagcgaaccgaaccctaggcccgtgttcggcatatgtttgggccaccagctacttgctttggccattggggcaaaaacctacaagatgcgttatggaaatagaggtcacaaccaaccctgtttgctcgtagggagcggtcgctgcttcttgacttcacagaatcacggctttgctgtggaaaccgacagcctgccggcagactgggctcctttgtttaccaatgcaaatgacggatcgaatgagggcattgtgcataattccctgcctttcttttcagtccagttccacccagagcaccaggcgggaccatcagacatggagctcctctttgatatctttcttgaaactgtgaaagaagcgacggccggaaacccagggggtcagactgtgcgggagaggttgacggaaagactctgtccacctggaattcctacccctggctctggacttccaccacccaggaaggtgctgattcttggtagcggcggactctctattggacaagcgggtgaattcgattactccggctctcaggctattaaagcattaaaggaagagaacattcagactctgctcatcaatccaaacatcgcaacggtccagaccagccagggactggccgataaggtgtatttcctgcctatcacacctcattatgtaacccaggtgataagaaatgaacgccctgatggcgttttactgacattcggtgggcagaccgcactgaattgtggtgtcgagctgaccaaggcaggcgtgttagccaggtacggcgtgcgggtcctgggcacccctgtggaaaccatagaattaacagaagaccggcgagcctttgcagcgagaatggctgagatcggagagcacgttgctccaagcgaagccgcaaacagcctcgaacaggcgcaggctgctgccgagcgcctagggtaccctgtccttgtacgagcggcatttgccctgggaggactgggcagtggattcgcttcaaacagagaggagctaagcgccctcgtggcccctgcctttgcgcacacgtcacaggtcttggtcgacaaaagtcttaaaggctggaaggagatagaatacgaagtggtcagggatgcttatggcaactgtgtgactgtctgcaacatggagaatctggacccactaggcatccataccggcgagtccatagtggtagctccctcccagactttgaacgaccgcgagtaccagcttctaagacaaaccgctatcaaggtaactcaacacttgggcatcgtaggagaatgcaacgttcaatatgccctgaaccctgaaagcgagcagtactacatcatcgaggtcaacgccagactgtcgcgatcatcagccctcgctagcaaggccaccggatatccactcgcctatgtggccgcaaagctcgcgctggggatccctttacccgaattgaggaacagcgtcactggaggcacagccgcattcgaacccagtgtcgactactgtgtagtgaagattcctagatgggatctaagcaagtttcttcgtgtttccaccaaaataggctcctgcatgaagtctgtcggtgaggttatgggtatcggccgaagtttcgaggaggcgttccagaaggcccttcggatggttgacgagaactgcgtgggctttgatcacacggttaagcccgttagcgacatggaactggaaacccctaccgataagcggatttttgtggtcgccgcagccctttgggctgggtattcggtcgacagactttacgaactcaccagaatagacagatggttcctccaccgtatgaaaaggatcattgcccacgcacagttgctggaacagcacaggggccagcctctccctcctgatcttctgcagcaggccaaatgtcttgggttctccgacaagcagattgctctcgcggtgctcagcacagaactggcagtgagaaagctgaggcaggagctgggtatctgtcccgctgttaagcaaatagatactgttgcagcagagtggccagcacagactaactacctctatctgacttactggggcacaacacatgatctgacgttccggacccctcacgtcctcgtgttaggaagtggagtgtacaggatcgggtctagcgtcgagtttgactggtgtgccgtggggtgtattcaacagctaagaaaaatgggttataagacgattatggttaattataatcccgaaaccgtgagcacagactatgatatgtgcgatcgactttactttgacgagatttccttcgaagtcgttatggacatttatgaactcgaaaatcctgagggcgtcatcctttcgatgggtggccagctgccgaacaacatggccatggccctccatagacagcagtgtagagtactcggcacgtctcctgaggccatcgattccgccgagaacaggtttaagttttcccgactcttggataccatcggtataagccagccccagtggagagagctatctgatttggaatcggcacgtcagttctgccagacagtcggatatccttgtgtggtgcgcccaagttacgttttgagtggtgcagcaatgaatgtcgcttacaccgatggagatctagaacggtttctgtcttccgcagctgctgtgtctaaggagcatcccgtcgtaataagtaagtttatccaggaagctaaggagattgatgtggatgccgttgcttctgacggcgtcgttgcggcaatagctatatctgagcatgtggagaacgccggagtacattctggcgacgctacgctggtcacccccccacaagacatcaccgccaagacactcgagagaattaaggcaatcgttcacgcagttggacaggagctccaagtcactggacctttcaatctgcaactcattgccaaagatgaccaactgaaggtgatcgagtgtaacgtcagagttagtcgttctttcccattcgtgagtaagaccctgggtgtcgacttggtggccctggctacccgggtcatcatgggagaggaggttgaacctgtcggtctgatgactggatctggtgttgtgggtgtcaaggtgccgcagttttcattctctcgccttgccggtgccgacgtggttttgggggtggaaatgacctccaccggagaggtcgccggattcggcgagagtaggtgcgaagcgtatctgaaagctatgctgtctaccggttttaagattccaaaaaaaaacatcttactgactattgggagctacaaaaacaagtcagagcttctgcctacggttcgcctgctcgaatctctcggatattctctgtatgccagtctcggcacagccgatttctacactgagcacggcgtcaaagtgaccgctgtcgactggcatttcgaagaggccgtcgacggggaatgtcctccccagcggagcatactggagcagttggccgaaaagaacttcgagctggtcataaacctctctatgaggggagccggaggtaggcgcctatcttcctttgtcacaaaagggtacaggaccaggcgactggccgcagacttcagcgttcctttgataattgatatcaagtgcactaaactgttcgtggaggctctcgggcaaatcggcccagcaccacctcttaaagttcacgtcgactgtatgacctcacaaaaacttgtgagattgccaggccttattgacgttcatgtgcacctgcgcgagccaggaggtacacacaaagaagacttcgcttctggcacagccgctgctcttgcaggcggtatcacaatggtgtgcgcgatgcctaacactcgccctcccataatagatgcccctgcactggcacttgctcagaagctggctgaagctggtgcacgctgcgactttgccttattcctcggtgcctcaagcgagaacgccggaacactaggcacggtcgcaggttctgccgcagggttgaagctgtacctcaacgaaacgtttagtgagctgcgtcttgactccgtggtgcagtggatggagcatttcgagacatggccaagccacctccctatagtcgcacacgctgaacaacagacagtagcagccgtgttgatggtcgcgcaactgactcaacggagcgttcacatctgccacgtggccaggaaagaggagattctattgataaaggctgccaaagcgcgagggctgcccgttacctgcgaggtggctccccaccacctgttcctcagccatgacgaccttgagcggctcggacctgggaaaggagaagtgaggcccgagttagggagtagacaagatgtggaggccctgtgggaaaacatggccgtcattgactgttttgcttctgaccacgcgcctcataccttagaggagaaatgtggatcaagaccacccccagggtttccaggcttagagactatgctgcctctactgctgacagctgtctctgaaggacgattaagcctcgatgacctgctgcaaaggctgcaccacaaccccagaaggatttttcatctgcctccccaggaggacacttacgttgaggtggacttggaacacgagtggaccattccgagccatatgccattctcaaaggcccactggacccccttcgaggggcaaaaggtgaagggcaccgtgcgtagggtggtgcttagaggagaagtggcttacatcgatggccaggttttagtgccgcctggatatggccaggacgtgagaaaatggccacaaggagcagtccctcaactgccaccatccgccccagcaacctccgagatgactactactcccgaacgtccaaggcgcggtatcccaggccttcctgacggaagatttcacctgccacccagaatccaccgggctagtgacccgggtctccccgctgaggaaccaaaggagaaatctagtcggaaggttgctgagcctgaactcatgggcacaccagatgggacgtgttaccctccgccaccagtgcctagacaggcatctccccagaatcttggtacaccgggtctgctgcacccacagaccagcccccttctgcattccctcgtgggtcagcacatcctcagcgtgcaacagttcacaaaggatcagatgtcgcatttgtttaatgtcgcccacacattgcggatgatggtgcagaaggagcgcagtctagatatcctcaaagggaaggtgatggcctcaatgttctacgaggtgtcaactcggacatcctcatctttcgctgctgcaatggcccgactgggcggtgccgtgttatctttcagcgaagcgacctcatctgtgcagaaaggagaatccctagctgacagcgtgcagacaatgagctgttatgccgacgtagtagttttgcgtcatcctcagcccggagctgttgaacttgcagcgaaacactgtcgaaggcccgtgatcaatgcaggagacggggtcggggaacaccctacccaagctctgcttgacatattcactatccgcgaagaattgggcactgtcaacggaatgaccattaccatggttggcgacctgaaacatgggcgaactgtgcattctttggcctgtcttctcacacagtatagggtctctctgcggtacgtggctccaccctctctccgcatgccgcctacggtgcgtgccttcgtggccagtaggggcacaaagcaggaagaattcgagtccattgaggaagccctaccagacaccgatgtgctatatatgaccaggattcagaaggaacgatttggaagcactcaggaatacgaggcctgttttggtcagttcatcttaactccccatatcatgaccagagctaaaaaaaaaatggttgtaatgcaccctatgcccagagtgaacgagatctctgtcgaggtggacagcgatccaagggccgcatactttcggcaggccgaaaacggcatgtatattagaatggccctgctcgctacggtgttggggagattttac

SEQ ID NO: 145226 - DNA, 7114 bp, Artificial Sequence
  derived and/or modified sequence
gcgcgcccgaggctcctacgctgccgcgcccggcttctctccagcgccccgcgccgttagccacgtggaccgactccggcgcgccgtcctcacgtggttccagtggagtttgcagtccttcccgcttctccgtactcgcccccgcctctgagctcccttcccatggcggccctagtgttggaggacgggtcggtcctgcggggccagccctttggggccgccgtgtcgactgccggggaagtggtgtttcaaaccggcatggtcggctaccccgaggccctcaccgatccctcctacaaggcacagatcttagtgctcacctatcctctgatcggcaactatggcatccccccagatgaaatggatgagttcggtctctgcaagtggtttgaatcctcgggcatccacgtagcagcactggtagtgggagagtgctgtcctactcccagccactggagtgccacccgcaccctgcatgagtggctgcagcagcatggcatccctggcttgcaaggagtagacactcgggagctgaccaagaagttgcgggaacaggggtctctgctggggaagctggtccagaatggaacagaaccttcatccctgccattcttggaccccaatgcccgccccctggtaccagaggtctccattaagactccacgggtattcaatacagggggtgcccctcggatccttgctttggactgtggcctcaagtataatcagatccgatgcctctgccagcgtggggctgaggtcactgtggtaccctgggaccatgcactagacagccaagagtatgagggtctcttcttaagtaatgggcctggtgaccctgcctcctatcccagtgtcgtatccacactgagccgtgttttatctgagcctaatccccgacctgtctttgggatctgcctgggacaccagctattggccttagccattggggccaagacttacaagatgagatatgggaaccgaggccataaccagccctgcttgttggtgggctctgggcgctgctttctgacatcccagaaccatgggtttgctgtggagacagactcactgccagcagactgggctcctctcttcaccaacgccaatgatggttccaatgaaggcattgtgcacaacagcttgcctttcttcagtgtccagtttcacccagagcaccaagctggcccttcagatatggaactgcttttcgatatctttctggaaactgtgaaagaggccacagctgggaaccctgggggccagacagttagagagcggctgactgagcgcctctgtccccctgggattcccactcccggctctggacttccaccaccacgaaaggttctgatcctgggctcagggggcctctccattggccaagctggagaatttgactactcgggctctcaggcaattaaggccctgaaggaggaaaacatccagacgttgctgatcaaccccaatattgccacagtgcagacctcccaggggctggccgacaaggtctattttcttcccataacacctcattatgtaacccaggtgatacgtaatgaacgccccgatggtgtgttactgacttttgggggccagactgctctgaactgtggtgtggagctgaccaaggccggggtgctggctcggtatggggtccgggtcctgggcacaccagtggagaccattgagctgaccgaggatcgacgggcctttgctgccagaatggcagagatcggagagcatgtggccccgagcgaggcagcaaattctcttgaacaggcccaggcagccgctgaacggctggggtaccctgtgctagtgcgtgcagcctttgccctgggtggcctgggctctggctttgcctctaacagggaggagctctctgctctcgtggccccagcttttgcccataccagccaagtgctagtagacaagtctctgaagggatggaaggagattgagtacgaggtggtgagagacgcctatggcaactgtgtcacggtgtgtaacatggagaacttggacccactgggcatccacactggtgagtccatagtggtggcccctagccagacactgaatgacagggagtatcagctcctgaggcagacagctatcaaggtgacccagcacctgggaattgttggggagtgcaatgtgcagtatgccttgaaccctgagtctgagcagtattacatcattgaagtgaatgccaggctctctcgcagctctgccctggccagtaaggccacaggttatccactggcttatgtggcagccaagctagcattgggcatccctttgcctgagctcaggaactctgtgacagggggtacagcagcctttgaacccagcgtggattattgtgtggtgaagattcctcgatgggaccttagcaagttcctgcgagtcagcacaaagattgggagctgcatgaagagcgttggtgaagtcatgggcattgggcgttcatttgaggaggccttccagaaggccctgcgcatggtggatgagaactgtgtgggctttgatcacacagtgaaaccagtcagcgatatggagttggagactccaacagataagcggatttttgtggtggcagctgctttgtgggctggttattcagtggaccgcctgtatgagctcacacgcatcgaccgctggttcctgcaccgaatgaagcgtatcatcgcacatgcccagctgctagaacaacaccgtggacagcctttgccgccagacctgctgcaacaggccaagtgtcttggcttctcagacaaacagattgcccttgcagttctgagcacagagctggctgttcgcaagctgcgtcaggaactggggatctgtccagcagtgaaacagattgacacagttgcagctgagtggccagcccagacaaattacctatacctaacgtattggggcaccacccatgacctcacctttcgaacacctcatgtcctagtccttggctctggcgtctaccgtattggctctagcgttgaatttgactggtgtgctgtaggctgcatccagcagctccgaaagatgggatataagaccatcatggtgaactataacccagagacagtcagcaccgactatgacatgtgtgatcgactctactttgatgagatctcttttgaggtggtgatggacatctatgagctcgagaaccctgaaggtgtgatcctatccatgggtggacagctgcccaacaacatggccatggcgttgcatcggcagcagtgccgggtgctgggcacctcccctgaagccattgactcggctgagaaccgtttcaagttttcccggctccttgacaccattggtatcagccagcctcagtggagggagctcagtgacctcgagtctgctcgccaattctgccagaccgtggggtacccctgtgtggtgcgcccctcctatgtgctgagcggtgctgctatgaatgtggcctacacggatggagacctggagcgcttcctgagcagcgcagcagccgtctccaaagagcatcccgtggtcatctccaagttcatccaggaggctaaggagattgacgtggatgccgtggcctctgatggtgtggtggcagccatcgccatctctgagcatgtggagaatgcaggtgtgcattcaggtgatgcgacgctggtgacccccccacaagatatcactgccaaaaccctggagcggatcaaagccattgtgcatgctgtgggccaggagctacaggtcacaggacccttcaatctgcagctcattgccaaggatgaccagctgaaagttattgaatgcaacgtacgtgtctctcgctccttccccttcgtttccaagacactgggtgtggacctagtagccttggccacgcgggtcatcatgggggaagaagtggaacctgtggggctaatgactggttctggagtcgtgggagtaaaggtgcctcagttctccttctcccgcttggcgggtgctgacgtggtgttgggtgtggaaatgaccagtactggggaggtggccggctttggggagagccgctgtgaggcatacctcaaggccatgctaagcactggctttaagatccccaagaagaatatcctgctgaccattggcagctataagaacaaaagcgagctgctcccaactgtgcggctactggagagcctgggctacagcctctatgccagtctcggcacagctgacttctacactgagcatggcgtcaaggtaacagctgtggactggcactttgaggaggctgtggatggtgagtgcccaccacagcggagcatcctggagcagctagctgagaaaaactttgagctggtgattaacctgtcaatgcgtggagctgggggccggcgtctctcttcctttgtcaccaagggctaccgcacccgacgcttggccgctgacttctccgtgcccctaatcatcgatatcaagtgcaccaaactctttgtggaggccctaggccagatcgggccagcccctcctttgaaggtgcatgttgactgtatgacctcccaaaagcttgtgcgactgccgggattgattgatgtccatgtgcacctgcgggaaccaggtgggacacataaggaggactttgcttcaggcacagccgctgccctggctgggggtatcaccatggtgtgtgccatgcctaatacccggccccccatcattgacgcccctgctctggccctggcccagaagctggcagaggctggcgcccggtgcgactttgcgctattccttggggcctcgtctgaaaatgcaggaaccttgggcaccgtggccgggtctgcagccgggctgaagctttacctcaatgagaccttctctgagctgcggctggacagcgtggtccagtggatggagcatttcgagacatggccctcccacctccccattgtggctcacgcagagcagcaaaccgtggctgctgtcctcatggtggctcagctcactcagcgctcagtgcacatatgtcacgtggcacggaaggaggagatcctgctaattaaagctgcaaaggcacggggcttgccagtgacctgcgaggtggctccccaccacctgttcctaagccatgatgacctggagcgcctggggcctgggaagggggaggtccggcctgagcttggctcccgccaggatgtggaagccctgtgggagaacatggctgtcatcgactgctttgcctcagaccatgctccccataccttggaggagaagtgtgggtccaggcccccacctgggttcccagggttagagaccatgctgccactactcctgacggctgtaagcgagggccggctcagcctggacgacctgctgcagcgattgcaccacaatcctcggcgcatctttcacctgcccccgcaggaggacacctatgtggaggtggatctggagcatgagtggacaattcccagccacatgcccttctccaaggcccactggacaccttttgaagggcagaaagtgaagggcaccgtccgccgtgtggtcctgcgaggggaggttgcctatatcgatgggcaggttctggtacccccgggctatggacaggatgtacggaagtggccacagggggctgttcctcagctcccaccctcagcccctgccactagtgagatgaccacgacacctgaaagaccccgccgtggcatcccagggcttcctgatggccgcttccatctgccgccccgaatccatcgagcctccgacccaggtttgccagctgaggagccaaaggagaagtcctctcggaaggtagccgagccagagctgatgggaacccctgatggcacctgctaccctccaccaccagtaccgagacaggcatctccccagaacctggggacccctggcttgctgcacccccagacctcacccctgctgcactcattagtgggccaacatatcctgtccgtccagcagttcaccaaggatcagatgtctcacctgttcaatgtggcacacacactgcgtatgatggtgcagaaggagcggagcctcgacatcctgaaggggaaggtcatggcctccatgttctatgaagtgagcacacggaccagcagctcctttgcagcagccatggcccggctgggaggtgctgtgctcagcttctcggaagccacatcgtccgtccagaagggcgaatccctggctgactccgtgcagaccatgagctgctatgccgacgtcgtcgtgctccggcacccccagcctggagcagtggagctggccgccaagcactgccggaggccagtgatcaatgctggggatggggtcggagagcaccccacccaggccctgctggacatcttcaccatccgtgaggagctgggaactgtcaatggcatgacgatcacgatggtgggtgacctgaagcacggacgcacagtacattccctggcctgcctgctcacccagtatcgtgtcagcctgcgctacgtggcacctcccagcctgcgcatgccacccactgtgcgggccttcgtggcctcccgcggcaccaagcaggaggaattcgagagcattgaggaggcgctgcctgacactgatgtgctctacatgactcgaatccagaaggaacgatttggctctacccaggagtacgaagcttgctttggtcagttcatcctcactccccacatcatgacccgggccaagaagaagatggtggtgatgcacccgatgccccgtgtcaacgagataagcgtggaagtggactcggatccccgcgcagcctacttccgccaggctgagaacggcatgtacatccgcatggctctgttagccaccgtgctgggccgtttctagggcctggcttcctcagcctcttctctttaggcccagctgctgggcaaggaattccagtgcctcctacgggggcagcacacttagatattcctggacatccagatagctcacatgtgctgaccacacttcaggctctggactggagctctctggcatgggggtggggcctcagatgctggggcccagtctgccccatcttcattcctgcaccttaaacctgtacagtcatttttctactgacttaataaacagccgagctgtcccttgatgctga

SEQ ID NO: 145227 - DNA, 6678 bp, Artificial Sequence
  derived and/or modified sequence
atggccgccctggtgctggaggacggcagcgtgctgagaggccagcccttcggcgccgccgtgagcaccgccggcgaggtggtgttccagaccggcatggtgggctaccccgaggccctgaccgaccccagctacaaggcccagatcctggtgctgacctaccccctgatcggcaactacggcatcccccccgacgagatggacgagttcggcctgtgcaagtggttcgagagcagcggcatccacgtggccgccctggtggtgggcgagtgctgccccacccccagccactggagcgccaccagaaccctgcacgagtggctgcagcagcacggcatccccggcctgcagggcgtggacaccagagagctgaccaagaagctgagagagcagggcagcctgctgggcaagctggtgcagaacggcaccgagcccagcagcctgcccttcctggaccccaacgccagacccctggtgcccgaggtgagcatcaagacccccagagtgttcaacaccggcggcgcccccagaatcctggccctggactgcggcctgaagtacaaccagatcagatgcctgtgccagagaggcgccgaggtgaccgtggtgccctgggaccacgccctggacagccaggagtacgagggcctgttcctgagcaacggccccggcgaccccgccagctaccccagcgtggtgagcaccctgagcagagtgctgagcgagcccaaccccagacccgtgttcggcatctgcctgggccaccagctgctggccctggccatcggcgccaagacctacaagatgagatacggcaacagaggccacaaccagccctgcctgctggtgggcagcggcagatgcttcctgaccagccagaaccacggcttcgccgtggagaccgacagcctgcccgccgactgggcccccctgttcaccaacgccaacgacggcagcaacgagggcatcgtgcacaacagcctgcccttcttcagcgtgcagttccaccccgagcaccaggccggccccagcgacatggagctgctgttcgacatcttcctggagaccgtgaaggaggccaccgccggcaaccccggcggccagaccgtgagagagagactgaccgagagactgtgcccccccggcatccccacccccggcagcggcctgcccccccccagaaaggtgctgatcctgggcagcggcggcctgagcatcggccaggccggcgagttcgactacagcggcagccaggccatcaaggccctgaaggaggagaacatccagaccctgctgatcaaccccaacatcgccaccgtgcagaccagccagggcctggccgacaaggtgtacttcctgcccatcaccccccactacgtgacccaggtgatcagaaacgagagacccgacggcgtgctgctgaccttcggcggccagaccgccctgaactgcggcgtggagctgaccaaggccggcgtgctggccagatacggcgtgagagtgctgggcacccccgtggagaccatcgagctgaccgaggacagaagagccttcgccgccagaatggccgagatcggcgagcacgtggcccccagcgaggccgccaacagcctggagcaggcccaggccgccgccgagagactgggctaccccgtgctggtgagagccgccttcgccctgggcggcctgggcagcggcttcgccagcaacagagaggagctgagcgccctggtggcccccgccttcgcccacaccagccaggtgctggtggacaagagcctgaagggctggaaggagatcgagtacgaggtggtgagagacgcctacggcaactgcgtgaccgtgtgcaacatggagaacctggaccccctgggcatccacaccggcgagagcatcgtggtggcccccagccagaccctgaacgacagagagtaccagctgctgagacagaccgccatcaaggtgacccagcacctgggcatcgtgggcgagtgcaacgtgcagtacgccctgaaccccgagagcgagcagtactacatcatcgaggtgaacgccagactgagcagaagcagcgccctggccagcaaggccaccggctaccccctggcctacgtggccgccaagctggccctgggcatccccctgcccgagctgagaaacagcgtgaccggcggcaccgccgccttcgagcccagcgtggactactgcgtggtgaagatccccagatgggacctgagcaagttcctgagagtgagcaccaagatcggcagctgcatgaagagcgtgggcgaggtgatgggcatcggcagaagcttcgaggaggccttccagaaggccctgagaatggtggacgagaactgcgtgggcttcgaccacaccgtgaagcccgtgagcgacatggagctggagacccccaccgacaagagaatcttcgtggtggccgccgccctgtgggccggctacagcgtggacagactgtacgagctgaccagaatcgacagatggttcctgcacagaatgaagagaatcatcgcccacgcccagctgctggagcagcacagaggccagcccctgccccccgacctgctgcagcaggccaagtgcctgggcttcagcgacaagcagatcgccctggccgtgctgagcaccgagctggccgtgagaaagctgagacaggagctgggcatctgccccgccgtgaagcagatcgacaccgtggccgccgagtggcccgcccagaccaactacctgtacctgacctactggggcaccacccacgacctgaccttcagaaccccccacgtgctggtgctgggcagcggcgtgtacagaatcggcagcagcgtggagttcgactggtgcgccgtgggctgcatccagcagctgagaaagatgggctacaagaccatcatggtgaactacaaccccgagaccgtgagcaccgactacgacatgtgcgacagactgtacttcgacgagatcagcttcgaggtggtgatggacatctacgagctggagaaccccgagggcgtgatcctgagcatgggcggccagctgcccaacaacatggccatggccctgcacagacagcagtgcagagtgctgggcaccagccccgaggccatcgacagcgccgagaacagattcaagttcagcagactgctggacaccatcggcatcagccagccccagtggagagagctgagcgacctggagagcgccagacagttctgccagaccgtgggctacccctgcgtggtgagacccagctacgtgctgagcggcgccgccatgaacgtggcctacaccgacggcgacctggagagattcctgagcagcgccgccgccgtgagcaaggagcaccccgtggtgatcagcaagttcatccaggaggccaaggagatcgacgtggacgccgtggccagcgacggcgtggtggccgccatcgccatcagcgagcacgtggagaacgccggcgtgcacagcggcgacgccaccctggtgacccccccccaggacatcaccgccaagaccctggagagaatcaaggccatcgtgcacgccgtgggccaggagctgcaggtgaccggccccttcaacctgcagctgatcgccaaggacgaccagctgaaggtgatcgagtgcaacgtgagagtgagcagaagcttccccttcgtgagcaagaccctgggcgtggacctggtggccctggccaccagagtgatcatgggcgaggaggtggagcccgtgggcctgatgaccggcagcggcgtggtgggcgtgaaggtgccccagttcagcttcagcagactggccggcgccgacgtggtgctgggcgtggagatgaccagcaccggcgaggtggccggcttcggcgagagcagatgcgaggcctacctgaaggccatgctgagcaccggcttcaagatccccaagaagaacatcctgctgaccatcggcagctacaagaacaagagcgagctgctgcccaccgtgagactgctggagagcctgggctacagcctgtacgccagcctgggcaccgccgacttctacaccgagcacggcgtgaaggtgaccgccgtggactggcacttcgaggaggccgtggacggcgagtgccccccccagagaagcatcctggagcagctggccgagaagaacttcgagctggtgatcaacctgagcatgagaggcgccggcggcagaagactgagcagcttcgtgaccaagggctacagaaccagaagactggccgccgacttcagcgtgcccctgatcatcgacatcaagtgcaccaagctgttcgtggaggccctgggccagatcggccccgccccccccctgaaggtgcacgtggactgcatgaccagccagaagctggtgagactgcccggcctgatcgacgtgcacgtgcacctgagagagcccggcggcacccacaaggaggacttcgccagcggcaccgccgccgccctggccggcggcatcaccatggtgtgcgccatgcccaacaccagaccccccatcatcgacgcccccgccctggccctggcccagaagctggccgaggccggcgccagatgcgacttcgccctgttcctgggcgccagcagcgagaacgccggcaccctgggcaccgtggccggcagcgccgccggcctgaagctgtacctgaacgagaccttcagcgagctgagactggacagcgtggtgcagtggatggagcacttcgagacctggcccagccacctgcccatcgtggcccacgccgagcagcagaccgtggccgccgtgctgatggtggcccagctgacccagagaagcgtgcacatctgccacgtggccagaaaggaggagatcctgctgatcaaggccgccaaggccagaggcctgcccgtgacctgcgaggtggccccccaccacctgttcctgagccacgacgacctggagagactgggccccggcaagggcgaggtgagacccgagctgggcagcagacaggacgtggaggccctgtgggagaacatggccgtgatcgactgcttcgccagcgaccacgccccccacaccctggaggagaagtgcggcagcagacccccccccggcttccccggcctggagaccatgctgcccctgctgctgaccgccgtgagcgagggcagactgagcctggacgacctgctgcagagactgcaccacaaccccagaagaatcttccacctgcccccccaggaggacacctacgtggaggtggacctggagcacgagtggaccatccccagccacatgcccttcagcaaggcccactggacccccttcgagggccagaaggtgaagggcaccgtgagaagagtggtgctgagaggcgaggtggcctacatcgacggccaggtgctggtgccccccggctacggccaggacgtgagaaagtggccccagggcgccgtgccccagctgccccccagcgcccccgccaccagcgagatgaccaccacccccgagagacccagaagaggcatccccggcctgcccgacggcagattccacctgccccccagaatccacagagccagcgaccccggcctgcccgccgaggagcccaaggagaagagcagcagaaaggtggccgagcccgagctgatgggcacccccgacggcacctgctacccccccccccccgtgcccagacaggccagcccccagaacctgggcacccccggcctgctgcacccccagaccagccccctgctgcacagcctggtgggccagcacatcctgagcgtgcagcagttcaccaaggaccagatgagccacctgttcaacgtggcccacaccctgagaatgatggtgcagaaggagagaagcctggacatcctgaagggcaaggtgatggccagcatgttctacgaggtgagcaccagaaccagcagcagcttcgccgccgccatggccagactgggcggcgccgtgctgagcttcagcgaggccaccagcagcgtgcagaagggcgagagcctggccgacagcgtgcagaccatgagctgctacgccgacgtggtggtgctgagacacccccagcccggcgccgtggagctggccgccaagcactgcagaagacccgtgatcaacgccggcgacggcgtgggcgagcaccccacccaggccctgctggacatcttcaccatcagagaggagctgggcaccgtgaacggcatgaccatcaccatggtgggcgacctgaagcacggcagaaccgtgcacagcctggcctgcctgctgacccagtacagagtgagcctgagatacgtggccccccccagcctgagaatgccccccaccgtgagagccttcgtggccagcagaggcaccaagcaggaggagttcgagagcatcgaggaggccctgcccgacaccgacgtgctgtacatgaccagaatccagaaggagagattcggcagcacccaggagtacgaggcctgcttcggccagttcatcctgaccccccacatcatgaccagagccaagaagaagatggtggtgatgcaccccatgcccagagtgaacgagatcagcgtggaggtggacagcgaccccagagccgcctacttcagacaggccgagaacggcatgtacatcagaatggccctgctggccaccgtgctgggcagattctag

SEQ ID NO: 145228 - protein, 538 aa, Artificial Sequence
  derived and/or modified sequence
MDDFERRRELRRQKREEMRLEAERIAYQRNDDDEEEAARERRRRARQERLRQKQEEESLGQVTDQVEVNAQNSVPDEEAKTTTTNTQVEGDDEAAFLERLARREERRQKRLQEALERQKEFDPTITDASLSLPSRRMQNDTAENETTEKEEKSESRQERYEIEETETVTKSYQKNDWRDAEENKKEDKEKEEEEEEKPKRGSIGENQIKDEKIKKDKEPKEEVKSFMDRKKGFTEVKSQNGEFMTHKLKHTENTFSRPGGRASVDTKEAEGAPQVEAGKRLEELRRRRGETESEEFEKLKQKQQEAALELEELKKKREERRKVLEEEEQRRKQEEADRKLREEEEKRRLKEEIERRRAEAAEKRQKMPEDGLSDDKKPFKCFTPKGSSLKIEERAEFLNKSVQKSSGVKSTHQAAIVSKIDSRLEQYTSAIEGTKSAKPTKPAASDLPVPAEGVRNIKSMWEKGNVFSSPTAAGTPNKETAGLKVGVSSRINEWLTKTPDGNKSPAPKPSDLRPGDVSSKRNLWEKQSVDKVTSPTKV

SEQ ID NO: 145229 - protein, 459 aa, Artificial Sequence
  derived and/or modified sequence
MDDFERRRELRRQKREEMRLEAERIAYQRNDDDEEEAARERRRRARQERLRQKQEEESLGQVTDQVEVNAQNSVPDEEAKTTTTNTQVEGDDEAAFLERLARREERRQKRLQEALERQKEFDPTITDASLSLPSRRMQNDTAENETTEKEEKSESRQERYEIEETETVTKSYQKNDWRDAEENKKEDKEKEEEEEEKPKRGSIGENQIKDEKIKKDKEPKEEVKSFMDRKKGFTEVKSQNGEFMTHKLKHTENTFSRPGGRASVDTKEAEGAPQVEAGKRLEELRRRRGETESEEFEKLKQKQQEAALELEELKKKREERRKVLEEEEQRRKQEEADRKLREEEEKRRLKEEIERRRAEAAEKRQKMPEDGLSDDKKPFKCFTPKGSSLKIEERAEFLNKSVQKSSGVKSTHQAAIVSKIDSRLEQYTSAIEGTKSAKPTKPAASDLPVPAEGVRNIKS

SEQ ID NO: 145230 - protein, 417 aa, Artificial Sequence
  derived and/or modified sequence
MLLSVPLLLGLLGLAVAEPAVYFKEQFLDGDGWTSRWIESKHKSDFGKFVLSSGKFYGDEEKDKGLQTSQDARFYALSASFEPFSNKGQTLVVQFTVKHEQNIDCGGGYVKLFPNSLDQTDMHGDSEYNIMFGPDICGPGTKKVHVIFNYKGKNVLINKDIRCKDDEFTHLYTLIVRPDNTYEVKIDNSQVESGSLEDDWDFLPPKKIKDPDASKPEDWDERAKIDDPTDSKPEDWDKPEHIPDPDAKKPEDWDEEMDGEWEPPVIQNPEYKGEWKPRQIDNPDYKGTWIHPEIDNPEYSPDPSIYAYDNFGVLGLDLWQVKSGTIFDNFLITNDEAYAEEFGNETWGVTKAAEKQMKDKQDEEQRLKEEEEDKKRKEEEEAEDKEDDEDKDEDEEDEEDKEEDEEEDVPGQAKDEL

SEQ ID NO: 145231 - protein, 296 aa, Artificial Sequence
  derived and/or modified sequence
MHGDSEYNIMFGPDICGPGTKKVHVIFNYKGKNVLINKDIRCKDDEFTHLYTLIVRPDNTYEVKIDNSQVESGSLEDDWDFLPPKKIKDPDASKPEDWDERAKIDDPTDSKPEDWDKPEHIPDPDAKKPEDWDEEMDGEWEPPVIQNPEYKGEWKPRQIDNPDYKGTWIHPEIDNPEYSPDPSIYAYDNFGVLGLDLWQVKSGTIFDNFLITNDEAYAEEFGNETWGVTKAAEKQMKDKQDEEQRLKEEEEDKKRKEEEEAEDKEDDEDKDEDEEDEEDKEEDEEEDVPGQAKDEL

SEQ ID NO: 145232 - DNA, 453 bp, Artificial Sequence
  derived and/or modified sequence
atggagaacaaccccagccacaaccccgtgagccccagccccttccccaccagaatcagcgcccccctgaacatgagccagagccacttcagagagaactggctgatgctgaagaagagcctggagggcaagctgtgccccagcagctgcggcagcctgaagtgcagagccagcagaagccccagcgtgggcaccggccccagcctgcccatcgagtgcttcctgtacatgaagacctggagcagcctgcagatgaccgtggccagcgaggaggacaagagaagagagaagacccagaacgccggcctgcccctgttcttcgccagcaccgtgggcaccgtgaccctgcccagcttccaccacctgcagctgcacacccacacccacaccctggtgccccagagcctgttcggcacctgcctgaccgcccacctggagaccagatggagctag

SEQ ID NO: 145233 - DNA, 1254 bp, Artificial Sequence
  derived and/or modified sequence
atgctattgtctgttccattgctcctggggctgcttggcctggccgttgcggaacctgccgtgtatttcaaagaacagttcctggatggtgacgggtggacgtctagatggatagagtccaagcacaagagtgactttggaaaattcgtgctctcctccgggaaattctacggagatgaggaaaaagacaaggggcttcagacatcccaggatgcacgattctacgccctgtctgctagtttcgaacccttctcaaacaaaggccagaccctggtggttcagttcacggtgaagcacgaacagaacatcgattgcggtggaggatacgtaaaattattcccgaattctttagaccagacggacatgcatggggatagtgaatataacattatgttcggacctgacatttgtggccccggtacaaagaaggttcatgttatcttcaactataaaggaaagaacgttctcataaataaagacatacgctgtaaggatgatgagtttactcatctgtataccctaattgtgcggccagacaacacatacgaggtcaaaatcgataattcccaagtagagtcagggtccttggaagacgattgggacttcctgcctccaaaaaagatcaaagacccggatgctagcaagcccgaggactgggacgaaagagccaaaattgacgacccaactgacagcaaacccgaggactgggataaacccgaacatatccctgatcctgatgcaaagaaacccgaggactgggacgaggagatggacggagagtgggagccacctgtcattcaaaaccccgaatataaaggtgagtggaaacctagacagattgataaccccgattacaaaggcacatggatccatcccgagattgacaatcccgaatactctcctgacccatccatctacgcttacgacaactttggtgtgctggggctcgacctttggcaggtgaagtcgggcaccatctttgataattttctgattacaaatgacgaggcttatgccgaggaatttggtaatgagacctggggagttacaaaggcagccgaaaagcagatgaaggacaagcaggacgaagaacagcggttaaaagaggaggaagaggataagaaacgaaaggaggaagaggaggcggaagataaggaggacgacgaagacaaggatgaggatgaagaagatgaggaggacaaggaggaggatgaggaggaggatgttcccggacaggcgaaagatgagctgtag

SEQ ID NO: 145234 - DNA, 891 bp, Artificial Sequence
  derived and/or modified sequence
atgcatggtgacagtgagtacaacatcatgttcggccctgacatatgcggcccagggactaaaaaggtgcatgtgatctttaactacaagggcaagaacgttttgataaacaaggacatccgttgcaaagacgatgagttcacccacctgtacactctcattgtgcgccctgacaacacttatgaggtaaagatcgataattctcaagtggaatcaggctcactagaagatgactgggatttccttccgccaaaaaaaattaaggaccccgacgcctcaaaacccgaggattgggatgaaagggccaaaatagacgacccgaccgactcgaaacccgaggactgggacaaacccgagcatattccggatcctgatgctaaaaaaccagaggactgggacgaagagatggatggtgagtgggagccccccgtcatccaaaatcctgaatataaaggggagtggaaacccaggcaaatcgacaacccagactacaagggaacctggatccaccctgagattgataatccagagtattctcctgacccttcaatctatgcttacgataacttcggggtcctggggctggacttgtggcaggtgaaatccggaaccatctttgataactttttaataactaatgacgaagcctacgcagaggagtttggcaacgaaacatggggcgtcacaaaggccgctgagaaacaaatgaaagacaagcaggatgaggaacaacggctcaaggaggaggaagaggacaaaaagagaaaggaagaagaggaggccgaagacaaggaggacgatgaagataaggatgaggatgaggaagacgaagaagacaaagaagaagatgaggaggaagacgtaccaggccaagctaaagatgagctgtag

SEQ ID NO: 145235 - DNA, 1254 bp, Artificial Sequence
  derived and/or modified sequence
atgctgctgtctgtgcccctgctgctgggcctgctgggcctggccgtggccgagcctgctgtgtacttcaaggagcagttcctggatggagatggctggaccagccgctggattgagagcaagcacaagagtgactttgggaagtttgtgctgagcagcggcaagttctatggagatgaggagaaggacaagggcctgcagaccagccaggatgcccgcttctacgccctgagcgccagctttgagcccttcagcaacaagggccagaccctggtggtgcagttcaccgtgaagcatgagcagaacatcgactgtggcggcggctacgtgaagctgttccccaacagcctggaccagacagacatgcatggagacagcgagtacaacatcatgtttggaccagacatctgtggccctggcaccaagaaggtgcacgtgatcttcaactacaagggcaagaatgtgctgatcaacaaggacatccgctgcaaggatgatgagttcacccacctgtacaccctgattgtgcggccagacaacacctatgaggtgaagattgacaacagccaggtggagagcggcagcctggaggatgactgggacttcctgccccccaagaagatcaaggaccctgatgccagcaagccagaggactgggatgagcgggccaagattgatgaccccacagacagcaagccagaggactgggacaagccagagcacatcccagaccctgatgccaagaagccagaggactgggatgaggagatggatggagagtgggagccccctgtgatccagaaccctgagtacaagggggagtggaagccccggcagattgacaacccagactacaagggcacctggatccaccctgagattgacaaccctgagtacagcccagaccccagcatctatgcctatgacaactttggagtgctgggcctggacctgtggcaggtgaagagcggcaccatctttgacaacttcctgatcaccaatgatgaggcctatgcagaggagtttggaaatgagacctggggcgtgaccaaggctgctgagaagcagatgaaggacaagcaggatgaggagcagaggctgaaggaggaggaggaggacaagaagaggaaggaggaggaggaggccgaggacaaggaggatgatgaggacaaggatgaagatgaggaggatgaggaggacaaggaggaggatgaggaggaggatgtgcccggccaggccaaggatgagctgtag

SEQ ID NO: 145236 - DNA, 891 bp, Artificial Sequence
  derived and/or modified sequence
atgcacggggacagcgagtacaacatcatgtttggaccagacatctgtggccctggcaccaagaaggtgcacgtgatcttcaactacaagggcaagaatgtgctgatcaacaaggacatccgctgcaaggatgatgagttcacccacctgtacaccctcatcgtgcggccagacaacacctatgaggtgaagattgacaacagccaggtggagagcggcagcctggaggatgactgggacttcctgccccccaagaagatcaaggaccctgatgccagcaagccagaggactgggatgagcgggccaagattgatgaccccacagacagcaagccagaggactgggacaagccagagcacatcccagaccctgatgccaagaagccagaggactgggatgaggagatggatggagagtgggagccccctgtgatccagaaccctgagtacaagggggagtggaagccccggcagattgacaacccagactacaagggcacctggatccaccctgagattgacaaccctgagtacagcccagaccccagcatctatgcctatgacaactttggagtgctgggcctggacctgtggcaggtgaagagcggcaccatctttgacaacttcctgatcaccaatgatgaggcctatgcagaggagtttggaaatgagacctggggcgtgaccaaggctgctgagaagcagatgaaggacaagcaggatgaggagcagaggctgaaggaggaggaggaggacaagaagaggaaggaggaggaggaggccgaggacaaggaggatgatgaggacaaggatgaagatgaagaagatgaggaggacaaggaggaggatgaggaggaggatgtgcccggccaggccaaggatgagctgtag

SEQ ID NO: 145237 - DNA, 1254 bp, Artificial Sequence
  derived and/or modified sequence
atgctgctgagcgtgcccctgctgctgggcctgctgggcctggccgtcgccgaaccagccgtctattttaaggagcagttcctggacggcgatgggtggacttctcgctggatagaatctaagcataaatcagacttcggaaagttcgtcctgtcctcaggcaaattttatggcgatgaagaaaaagacaagggtctccagacatcacaagatgcacggttctatgccctgagcgcatcgtttgagccattttctaacaaaggccagaccttagtggttcaattcacagttaagcacgagcagaatatagactgtggcggaggctacgtgaaactgttccccaactcactagaccagacagatatgcacggggatagcgagtataacattatgtttggcccggatatttgcggacccggcaccaaaaaagtgcacgttatcttcaactacaaaggcaaaaacgtgctgataaataaggatatccgctgtaaggacgacgagtttacacatttatacactttgatcgttcggccagacaatacctacgaggtcaagatcgataattcacaagtggaatcgggctccctagaggacgactgggattttctgccgccaaagaagattaaggatccagacgcctcaaaaccagaagactgggacgagcgcgctaagatcgatgatccaaccgattccaaacctgaggattgggataagcccgaacacattcccgatcctgacgcaaaaaagccagaagattgggacgaggaaatggatggcgagtgggaaccccccgtcatccaaaatcccgagtacaagggagagtggaaacccagacagatcgacaaccctgactataaaggcacttggatacaccccgagatcgataaccccgagtattcccccgacccctccatttacgcctacgacaactttggtgtgctcggcttagatttgtggcaggtcaaatcaggcacaattttcgacaactttcttattaccaacgatgaggcctacgcagaagaattcggaaacgagacttggggtgtaaccaaggccgcagaaaagcagatgaaagacaagcaggacgaagagcaacggttgaaggaggaggaggaggataagaagcggaaagaggaagaggaagcggaggataaagaggatgacgaagacaaggatgaggacgaggaagatgaagaggataaggaggaagacgaagaagaggacgtgcctggccaagccaaagacgagctttag

SEQ ID NO: 145238 - DNA, 891 bp, Artificial Sequence
  derived and/or modified sequence
atgcacggcgacagcgagtacaacatcatgttcggccccgacatctgtggtccaggtactaaaaaggtacatgtgattttcaattacaagggcaaaaatgtactgattaataaggatatccgctgtaaagatgatgaattcacccatttgtatacactgatcgtccgtcccgataatacctacgaagtcaaaattgataattctcaggtggagtcaggctctctggaggacgactgggacttccttcccccgaagaagatcaaggatcctgatgcttccaagcccgaggactgggacgaaagagccaagattgacgatccaactgacagtaaaccagaggattgggataaaccagagcacatccctgaccctgacgctaaaaaacctgaggactgggatgaagagatggacggcgaatgggagccccccgtaattcagaaccctgagtacaagggagaatggaagcctagacagatcgacaacccagattataagggcacgtggatccatccggagatcgacaaccctgagtattccccagaccccagcatctacgcatatgataattttggcgtgttaggacttgacctctggcaggtcaaatccggcacaatattcgataacttcctaattactaatgacgaagcatatgccgaggagtttggaaatgaaacatggggggttactaaggccgctgagaaacaaatgaaagataaacaggatgaggagcagcgtcttaaggaggaggaagaagacaaaaaacgtaaggaagaggaggaggcggaagacaaggaggacgatgaggataaggacgaggacgaggaggacgaagaggacaaagaagaagatgaggaggaggatgtccccggacaggccaaggacgaattatag

SEQ ID NO: 145239 - DNA, 1254 bp, Artificial Sequence
  derived and/or modified sequence
atgctgttaagcgtgcccttgttattagggctgctgggtttagctgtggcggaaccagcggtctatttcaaggagcagttcctggacggggacggctggacaagcaggtggatcgagtccaagcataaatccgacttcggaaaattcgtccttagtagtgggaagttctatggtgatgaagagaaagacaaggggctccaaacttctcaagacgccagattctacgcattgagcgcgagctttgaaccattttcaaataagggacagaccctggttgtgcagttcaccgttaagcacgagcaaaacattgattgcggaggaggttacgtgaagctgttccccaatagcctggatcagaccgacatgcatggagattcagaatataacatcatgtttggtcctgatatttgtgggccaggtacgaagaaggtccacgtgatcttcaattacaagggtaaaaatgtgctcatcaataaagatattaggtgtaaagacgacgaattcactcacctgtacacccttatcgtccgaccggataatacgtatgaagtcaagattgataattcacaagtcgagtcaggatctctcgaagacgactgggacttcttaccccctaaaaagatcaaagaccccgacgcttcaaagcccgaggattgggatgagcgggcaaagatcgacgacccaactgatagcaagccagaagactgggacaaaccagagcacattcctgatcccgacgctaagaaacccgaagactgggacgaggagatggacggcgaatgggaacccccagtgatccaaaatcctgaatacaagggagaatggaagccaagacagatcgacaaccctgactataagggtacctggatacacccagaaattgataatccagagtacagccccgacccctcgatctatgcttacgataattttggagtgctgggccttgatctctggcaggttaagtccgggaccatttttgataactttctgatcaccaatgacgaagcctacgctgaagagtttggtaatgaaacctggggcgtgaccaaggcagctgagaaacaaatgaaggacaaacaagatgaagaacagaggcttaaggaggaggaagaggacaagaaaagaaaggaggaagaggaggctgaagacaaggaggatgatgaggacaaggacgaggatgaggaggacgaagaggataaagaagaagacgaggaggaagacgtacctggccaagcaaaggatgaactgtag

SEQ ID NO: 145240 - DNA, 891 bp, Artificial Sequence
  derived and/or modified sequence
atgcacggcgattccgagtacaatattatgttcggccctgatatttgcggacctgggacaaaaaaagtccacgttatctttaactacaaaggtaaaaacgtactgatcaacaaagacatccggtgtaaagacgacgagttcacacacctgtatactctaattgtacgtcccgacaatacctacgaggtaaaaatcgacaactcgcaggtggaaagcggctcactggaggacgactgggactttctaccaccaaagaagattaaagacccagacgcaagcaagcctgaagactgggatgagcgggcaaaaatcgacgacccaactgatagtaaaccagaggactgggataagcccgaacacattccggaccctgacgctaagaaacccgaagattgggatgaagaaatggatggggagtgggaacctcccgtgatccagaacccagaatacaagggcgagtggaagccaaggcagattgacaaccccgattataaggggacttggatacatcccgaaattgacaatccagagtatagtcctgacccttctatttatgcatacgataatttcggggtgctgggtctggatctctggcaggttaaaagtgggactatatttgacaactttctgattaccaatgatgaggcttacgccgaagaattcggaaatgagacttggggtgtgaccaaggctgcagaaaaacagatgaaagacaagcaggacgaagaacagcgcttgaaggaagaggaagaagacaaaaagcgcaaagaagaagaggaagctgaagataaagaggatgatgaagacaaagacgaggatgaggaagatgaggaggataaagaagaagatgaggaagaggatgtgcctggacaagcaaaggacgagctgtag

SEQ ID NO: 145241 - DNA, 1911 bp, Artificial Sequence
  derived and/or modified sequence
gcggcgtccgtccgtactgcagagccgctgccggagggtcgttttaaagggcccgcgcgttgccgccccctcggcccgccatgctgctatccgtgccgctgctgctcggcctcctcggcctggccgtcgccgagcctgccgtctacttcaaggagcagtttctggacggagacgggtggacttcccgctggatcgaatccaaacacaagtcagattttggcaaattcgttctcagttccggcaagttctacggtgacgaggagaaagataaaggtttgcagacaagccaggatgcacgcttttatgctctgtcggccagtttcgagcctttcagcaacaaaggccagacgctggtggtgcagttcacggtgaaacatgagcagaacatcgactgtgggggcggctatgtgaagctgtttcctaatagtttggaccagacagacatgcacggagactcagaatacaacatcatgtttggtcccgacatctgtggccctggcaccaagaaggttcatgtcatcttcaactacaagggcaagaacgtgctgatcaacaaggacatccgttgcaaggatgatgagtttacacacctgtacacactgattgtgcggccagacaacacctatgaggtgaagattgacaacagccaggtggagtccggctccttggaagacgattgggacttcctgccacccaagaagataaaggatcctgatgcttcaaaaccggaagactgggatgagcgggccaagatcgatgatcccacagactccaagcctgaggactgggacaagcccgagcatatccctgaccctgatgctaagaagcccgaggactgggatgaagagatggacggagagtgggaacccccagtgattcagaaccctgagtacaagggtgagtggaagccccggcagatcgacaacccagattacaagggcacttggatccacccagaaattgacaaccccgagtattctcccgatcccagtatctatgcctatgataactttggcgtgctgggcctggacctctggcaggtcaagtctggcaccatctttgacaacttcctcatcaccaacgatgaggcatacgctgaggagtttggcaacgagacgtggggcgtaacaaaggcagcagagaaacaaatgaaggacaaacaggacgaggagcagaggcttaaggaggaggaagaagacaagaaacgcaaagaggaggaggaggcagaggacaaggaggatgatgaggacaaagatgaggatgaggaggatgaggaggacaaggaggaagatgaggaggaagatgtccccggccaggccaaggacgagctgtagagaggcctgcctccagggctggactgaggcctgagcgctcctgccgcagagctggccgcgccaaataatgtctctgtgagactcgagaactttcatttttttccaggctggttcggatttggggtggattttggttttgttcccctcctccactctcccccaccccctccccgcccttttttttttttttttttaaactggtattttatctttgattctccttcagccctcacccctggttctcatctttcttgatcaacatcttttcttgcctctgtccccttctctcatctcttagctcccctccaacctggggggcagtggtgtggagaagccacaggcctgagatttcatctgctctccttcctggagcccagaggagggcagcagaagggggtggtgtctccaaccccccagcactgaggaagaacggggctcttctcatttcacccctccctttctcccctgcccccaggactgggccacttctgggtggggcagtgggtcccagattggctcacactgagaatgtaagaactacaaacaaaatttctattaaattaaattttgtgtctcc

SEQ ID NO: 145242 - DNA, 1763 bp, Artificial Sequence
  derived and/or modified sequence
gtccgtactgcagagccgctgccggagggtcgttttaaagggcccgcgcgttgccgccccctcggcctggccgtcgccgagcctgccgtctacttcaaggagcagtttctggacggagacgggtggacttcccgctggatcgaatccaaacacaagtcagattttggcaaattcgttctcagttccggcaagttctacggtgacgaggagaaagataaaggtttgcagacaagccaggatgcacgcttttatgctctgtcggccagtttcgagcctttcagcaacaaaggccagacgctggtggtgcagttcacggtgaaacatgagcagaacatcgactgtgggggcggctatgtgaagctgtttcctaatagtttggaccagacagacatgcacggagactcagaatacaacatcatgtttggtcccgacatctgtggccctggcaccaagaaggttcatgtcatcttcaactacaagggcaagaacgtgctgatcaacaaggacatccgttgcaaggatgatgagtttacacacctgtacacactgattgtgcggccagacaacacctatgaggtgaagattgacaacagccaggtggagtccggctccttggaagacgattgggacttcctgccacccaagaagataaaggatcctgatgcttcaaaaccggaagactgggatgagcgggccaagatcgatgatcccacagactccaagcctgaggactgggacaagcccgagcatatccctgaccctgatgctaagaagcccgaggactgggatgaagagatggacggagagtgggaacccccagtgattcagaaccctgagtacaagggtgagtggaagccccggcagatcgacaacccagattacaagggcacttggatccacccagaaattgacaaccccgagtattctcccgatcccagtatctatgcctatgataactttggcgtgctgggcctggacctctggcaggtcaagtctggcaccatctttgacaacttcctcatcaccaacgatgaggcatacgctgaggagtttggcaacgagacgtggggcgtaacaaaggcagcagagaaacaaatgaaggacaaacaggacgaggagcagaggcttaaggaggaggaagaagacaagaaacgcaaagaggaggaggaggcagaggacaaggaggatgatgaggacaaagatgaggatgaggaggatgaggaggacaaggaggaagatgaggaggaagatgtccccggccaggccaaggacgagctgtagagaggcctgcctccagggctggactgaggcctgagcgctcctgccgcagagctggccgcgccaaataatgtctctgtgagactcgagaactttcatttttttccaggctggttcggatttggggtggattttggttttgttcccctcctccactctcccccaccccctccccgcccttttttttttttttttttaaactggtattttatctttgattctccttcagccctcacccctggttctcatctttcttgatcaacatcttttcttgcctctgtccccttctctcatctcttagctcccctccaacctggggggcagtggtgtggagaagccacaggcctgagatttcatctgctctccttcctggagcccagaggagggcagcagaagggggtggtgtctccaaccccccagcactgaggaagaacggggctcttctcatttcacccctccctttctcccctgcccccaggactggg

SEQ ID NO: 145243 - DNA, 1254 bp, Artificial Sequence
  derived and/or modified sequence
atgctgctgagcgtgcccctgctgctgggcctgctgggcctggccgtggccgagcccgccgtgtacttcaaggagcagttcctggacggcgacggctggaccagcagatggatcgagagcaagcacaagagcgacttcggcaagttcgtgctgagcagcggcaagttctacggcgacgaggagaaggacaagggcctgcagaccagccaggacgccagattctacgccctgagcgccagcttcgagcccttcagcaacaagggccagaccctggtggtgcagttcaccgtgaagcacgagcagaacatcgactgcggcggcggctacgtgaagctgttccccaacagcctggaccagaccgacatgcacggcgacagcgagtacaacatcatgttcggccccgacatctgcggccccggcaccaagaaggtgcacgtgatcttcaactacaagggcaagaacgtgctgatcaacaaggacatcagatgcaaggacgacgagttcacccacctgtacaccctgatcgtgagacccgacaacacctacgaggtgaagatcgacaacagccaggtggagagcggcagcctggaggacgactgggacttcctgccccccaagaagatcaaggaccccgacgccagcaagcccgaggactgggacgagagagccaagatcgacgaccccaccgacagcaagcccgaggactgggacaagcccgagcacatccccgaccccgacgccaagaagcccgaggactgggacgaggagatggacggcgagtgggagccccccgtgatccagaaccccgagtacaagggcgagtggaagcccagacagatcgacaaccccgactacaagggcacctggatccaccccgagatcgacaaccccgagtacagccccgaccccagcatctacgcctacgacaacttcggcgtgctgggcctggacctgtggcaggtgaagagcggcaccatcttcgacaacttcctgatcaccaacgacgaggcctacgccgaggagttcggcaacgagacctggggcgtgaccaaggccgccgagaagcagatgaaggacaagcaggacgaggagcagagactgaaggaggaggaggaggacaagaagagaaaggaggaggaggaggccgaggacaaggaggacgacgaggacaaggacgaggacgaggaggacgaggaggacaaggaggaggacgaggaggaggacgtgcccggccaggccaaggacgagctgtag

SEQ ID NO: 145244 - DNA, 891 bp, Artificial Sequence
  derived and/or modified sequence
atgcacggcgacagcgagtacaacatcatgttcggccccgacatctgcggccccggcaccaagaaggtgcacgtgatcttcaactacaagggcaagaacgtgctgatcaacaaggacatcagatgcaaggacgacgagttcacccacctgtacaccctgatcgtgagacccgacaacacctacgaggtgaagatcgacaacagccaggtggagagcggcagcctggaggacgactgggacttcctgccccccaagaagatcaaggaccccgacgccagcaagcccgaggactgggacgagagagccaagatcgacgaccccaccgacagcaagcccgaggactgggacaagcccgagcacatccccgaccccgacgccaagaagcccgaggactgggacgaggagatggacggcgagtgggagccccccgtgatccagaaccccgagtacaagggcgagtggaagcccagacagatcgacaaccccgactacaagggcacctggatccaccccgagatcgacaaccccgagtacagccccgaccccagcatctacgcctacgacaacttcggcgtgctgggcctggacctgtggcaggtgaagagcggcaccatcttcgacaacttcctgatcaccaacgacgaggcctacgccgaggagttcggcaacgagacctggggcgtgaccaaggccgccgagaagcagatgaaggacaagcaggacgaggagcagagactgaaggaggaggaggaggacaagaagagaaaggaggaggaggaggccgaggacaaggaggacgacgaggacaaggacgaggacgaggaggacgaggaggacaaggaggaggacgaggaggaggacgtgcccggccaggccaaggacgagctgtag

SEQ ID NO: 145245 - protein, 172 aa, Artificial Sequence
  derived and/or modified sequence
MASNFKKANMASSSQRKRMSPKPELTEEQKQEIREAFDLFDADGTGTIDVKELKVAMRALGFEPKKEEIKKMISEIDKEGTGKMNFGDFLTVMTQKMSEKDTKEEILKAFKLFDDDETGKISFKNLKRVAKELGENLTDEELQEMIDEADRDGDGEVSEQEFLRIMKKTSLY

SEQ ID NO: 145246 - DNA, 519 bp, Artificial Sequence
  derived and/or modified sequence
atggcaagcaatttcaaaaaggcgaatatggcttctagcagtcagcgcaaaaggatgtcacctaagccggagcttacagaagagcagaagcaggagatacgggaggccttcgacctgtttgatgctgatggcacagggaccattgatgtaaaggagctgaaagtcgcgatgcgcgctctggggtttgaaccgaagaaagaggagattaaaaaaatgatctccgagatcgacaaggaaggcaccggcaagatgaacttcggggacttcctgaccgtgatgacacagaaaatgtccgaaaaagatactaaagaagagattctgaaggcctttaaactgtttgatgatgatgaaacagggaaaattagtttcaaaaatctgaaaagagtggcaaaggagctcggcgaaaatcttacggatgaggagttgcaggagatgattgacgaagccgacagagatggggatggtgaagtcagtgagcaggagtttctgcgcatcatgaaaaagacatcgctttactag

SEQ ID NO: 145247 - DNA, 519 bp, Artificial Sequence
  derived and/or modified sequence
atggccagcaacttcaagaaggccaacatggccagcagcagccagaggaagaggatgagccccaagccagagctgacagaggagcagaagcaggagatccgggaggcctttgacctgtttgatgctgatggcaccggcaccattgatgtgaaggagctgaaggtggccatgagggccctgggctttgagcccaagaaggaggagatcaagaagatgatcagcgagattgacaaggagggcaccgggaagatgaactttggagacttcctgactgtgatgacccagaagatgtctgagaaggacaccaaggaggagatcctgaaggccttcaagctgtttgatgatgatgagaccgggaagatctccttcaagaacctgaagagggtggccaaggagctgggggagaacctgacagatgaggagctgcaggagatgattgatgaagctgacagagatggagatggagaggtgtctgagcaggagttcctgcgcatcatgaagaagaccagcctgtactag

SEQ ID NO: 145248 - DNA, 519 bp, Artificial Sequence
  derived and/or modified sequence
atggccagcaacttcaagaaggccaacatggccagcagcagccagcgcaagagaatgtcacctaagcccgaactgactgaagagcaaaagcaggaaattcgagaggctttcgatctgtttgacgcagacgggactggtaccattgacgtcaaagagctcaaggtggctatgcgagccctgggctttgaacctaaaaaggaagagattaagaagatgataagtgagatagataaggagggcacaggcaagatgaattttggagattttctgaccgtgatgacacagaagatgtctgagaaggacactaaagaagagatccttaaggcttttaaactgttcgatgatgatgagaccggtaaaatctcctttaaaaacctgaagcgtgttgcaaaggagctgggtgagaacctaacagacgaagagctacaggaaatgatagacgaggccgaccgcgatggagatggagaagtgtcagaacaggagtttttgcgaataatgaaaaaaacttcactgtactag

SEQ ID NO: 145249 - DNA, 519 bp, Artificial Sequence
  derived and/or modified sequence
atggcctcaaatttcaaaaaagctaatatggcctctagctcacagaggaagcgtatgtctcctaaacccgagctgacagaggaacagaaacaagaaatcagggaagctttcgacctttttgatgcggatggaactggcaccatcgacgtgaaggaactgaaagttgctatgagggcattgggctttgagcctaaaaaggaggagattaagaaaatgatctctgaaatagacaaagaaggaaccggaaaaatgaactttggggactttctaacagtgatgacccagaaaatgagcgaaaaagatactaaagaagagattctgaaagcgttcaaactgtttgatgacgatgagacagggaagatttccttcaagaatctcaaacgggtcgccaaagagttgggagaaaatctgaccgacgaggaactgcaggaaatgatcgatgaggctgacagagacggtgacggggaggtaagtgaacaggagtttctccgcattatgaaaaagacttcgctgtactag

SEQ ID NO: 145250 - DNA, 1454 bp, Artificial Sequence
  derived and/or modified sequence
ggtgggaacggcgccgagtcagtgtacacgtcggttgcctaacaaccggcagcggactcctttggctatggcctccaactttaagaaggcaaacatggcatcaagttctcagcgaaaaagaatgagccctaagcctgagcttactgaagagcaaaagcaggagatccgggaagcttttgatcttttcgatgcggatggaactggcaccatagatgttaaagaactgaaggtggcaatgagggccctgggctttgaacccaagaaagaagaaattaagaaaatgataagtgaaattgataaggaagggacaggaaaaatgaactttggtgactttttaactgtgatgacccagaaaatgtctgagaaagatactaaagaagaaatcctgaaagctttcaagctctttgatgatgatgaaactgggaagatttcgttcaaaaatctgaaacgcgtggccaaggagttgggtgagaacctgactgatgaggagctgcaggaaatgattgatgaagctgatcgagatggagatggagaggtcagtgagcaagagttcctgcgcatcatgaaaaagaccagcctctattaagatcagtgtcttctttttctactgcaagcacatgtaactagatttagtgcctgccatggtgtgaaatctggcttttgagaacacaaacttttcccccacggacctccctttatcactttaatagtgaccttgagcctattttagccgtttggaagtgttctttgatattacagttctttgtaaaatgacctgcgaattaccctaattctcaaaagcaaaacaagagcacacaagcgtgaagaaaaggatcttaaagctttgagcacctgccattttgccttgcatcgtttccctcgtcatgcatttccacatatccacaaacacagaacgactttagacaagcacatgttacacctgtgttgccacaagcagtcattcttgacggctccagtttttatttgacacttgagtttagttttctcttttataaacccagtgaactcctgcactggcatttggatgtgtgttaatgctatttgttttgtcttaaaagtaaaacctttctcagtttgaacttgtattctctaaggatgagttctttagctttgcttatgagttcctcttctcaattattgtgttgaaggcagcctattagatacaaaactccttaccagcctatggacagaaaatgaataatcctttgctactttcctggcatgaattgctttttgccttggaaggctgctggtttgtaaaactagcagaatttttatatcacctaagcctaaatgatgctctaaaaatagttttggcaaagctaagactggaaaagagtcttgttagtaatttgtgcttgaataaaatggggagagccaggctaacgcaacactaggatggattcagccaacctctcgtgaatttatttgct

SEQ ID NO: 145251 - DNA, 519 bp, Artificial Sequence
  derived and/or modified sequence
atggccagcaacttcaagaaggccaacatggccagcagcagccagagaaagagaatgagccccaagcccgagctgaccgaggagcagaagcaggagatcagagaggccttcgacctgttcgacgccgacggcaccggcaccatcgacgtgaaggagctgaaggtggccatgagagccctgggcttcgagcccaagaaggaggagatcaagaagatgatcagcgagatcgacaaggagggcaccggcaagatgaacttcggcgacttcctgaccgtgatgacccagaagatgagcgagaaggacaccaaggaggagatcctgaaggccttcaagctgttcgacgacgacgagaccggcaagatcagcttcaagaacctgaagagagtggccaaggagctgggcgagaacctgaccgacgaggagctgcaggagatgatcgacgaggccgacagagacggcgacggcgaggtgagcgagcaggagttcctgagaatcatgaagaagaccagcctgtactag

SEQ ID NO: 145252 - protein, 37 aa, Artificial Sequence
  derived and/or modified sequence
RLGNFFRKAKKKIGRGLKKIGQKIKDFLGNLVPRTES

SEQ ID NO: 145253 - protein, 67 aa, Artificial Sequence
  derived and/or modified sequence
ALSYREAVLRAVDRINDGSSEANLYRLLELDPPPKDVEDRGARKPASFRVKETVCPRTSQQPLEQCD

SEQ ID NO: 145254 - protein, 67 aa, Artificial Sequence
  derived and/or modified sequence
ALSYREAVLRAVDRINERSSEANLYRLLELDPPPKDVEDRGARKPTSFTVKETVCPRTSPQPPEQCD

SEQ ID NO: 145255 - protein, 38 aa, Artificial Sequence
  derived and/or modified sequence
RLKELITTGGQKIGEKIRRIGQRIKDFFKNLQPREEKS

SEQ ID NO: 145256 - protein, 91 aa, Artificial Sequence
  derived and/or modified sequence
SLWLLLLGLVLPSASAQALSYREAVLRAVDRINDGSSEANLYRLLELDPPPKDVEDRGARKPASFRVKETVCPRTSQQPLEQCDFKENGLV

SEQ ID NO: 145257 - protein, 28 aa, Artificial Sequence
  derived and/or modified sequence
GDFFRKSKEKIGKEFKRIVQRIKDFLRN

SEQ ID NO: 145258 - protein, 175 aa, Artificial Sequence
  derived and/or modified sequence
MQPHRDVPSLWRSLSLLLLLGLGLPLAVSQTLSYREAVLRAVDDFNQQSLDTNLYRLLDLDSEPQGDEDPDTPKYVRFRVKETVCSKASQQLPEQCAFKEQGVVKQCMGTVTLNQAAESFDISCDAPGIQPFRFKKISRLAGLLRKGGEKFGEKLRKIGQKIKDFFQKLAPEIEQ

SEQ ID NO: 145259 - protein, 67 aa, Artificial Sequence
  derived and/or modified sequence
VLSYKEAVLRAIDGINQRSSDANLYRLLDLDPRPTMDGDPDTPKPVSFTVKETVCPRTTQQSPEDCD

SEQ ID NO: 145260 - protein, 37 aa, Artificial Sequence
  derived and/or modified sequence
NEDLGTRKPVSFTVKETVCPRTTHQPAEQCGFKERGR

SEQ ID NO: 145261 - protein, 96 aa, Artificial Sequence
  derived and/or modified sequence
QLRYREAVLRAVDRLNEQSSEANLYRLLELDQPPKADEDPGTPKPVSFTVKETVCPRPTRQPPELCDFKEKQCVGTVTLNPSIHSLDISCNEIQSV

SEQ ID NO: 145262 - protein, 37 aa, Artificial Sequence
  derived and/or modified sequence
RLGDILQKAREKIEGGLKKLVQKIKDFFGKFAPRTES

SEQ ID NO: 145263 - protein, 25 aa, Artificial Sequence
  derived and/or modified sequence
IGKEFKRIVQRIKDFLRNLVPRTES

SEQ ID NO: 145264 - protein, 37 aa, Artificial Sequence
  derived and/or modified sequence
LLGDFFRKSKEKIGKEFKRIVQRIKDFLRNLVPRTES

SEQ ID NO: 145265 - protein, 37 aa, Artificial Sequence
  derived and/or modified sequence
SLGNFFRKARKKIGEEFKRIVQRIKDFLQHLIPRTEA

SEQ ID NO: 145266 - protein, 66 aa, Artificial Sequence
  derived and/or modified sequence
SYREAVLRAVDQFNERSAEANLYRLLELDPPPEQDAEDQGARKPVSFRVKETVCPRTSQQPVEQCD

SEQ ID NO: 145267 - protein, 37 aa, Artificial Sequence
  derived and/or modified sequence
LLGNFFRKSKQKIGKQFKRIVQRIKNFFRNLVPRTQS

SEQ ID NO: 145268 - protein, 117 aa, Artificial Sequence
  derived and/or modified sequence
IPRRRLRYEEVVAQALQFYNEGQQGQPLFRLLEATPPPSLNSKSRIPLNFRIKETVCIFTLDRQPGNCAFREGGEERICRGAFVRRRWVRALTLRCDRDQRRQPEFPRVTRPAGPTA

SEQ ID NO: 145269 - protein, 117 aa, Artificial Sequence
  derived and/or modified sequence
IPHRRLRYEEVVAQALQFYNEGQQGQPLFRLLEATPPPSLNSKSRIPLNFRIKETVCIFTLDRQPGNCAFREGGEERICRGAFVRRRRVRALTLRCDRDQRRQPEFPRVTRPAGPTA

SEQ ID NO: 145270 - protein, 37 aa, Artificial Sequence
  derived and/or modified sequence
RLGGILRKAGEKIGGGLKKIGQKIKDFFGKLAPRTES

SEQ ID NO: 145271 - protein, 37 aa, Artificial Sequence
  derived and/or modified sequence
RLGNFFRKAKEKIGRGLKKIGQKIKDFWGNLVPRTES

SEQ ID NO: 145272 - protein, 37 aa, Artificial Sequence
  derived and/or modified sequence
LLGDFFRKAREKIGEEFKRIVQRIKDFLRNLVPRTES

SEQ ID NO: 145273 - protein, 37 aa, Artificial Sequence
  derived and/or modified sequence
RLGNFFRKVKEKIGGGLKKVGQKIKDFLGNLVPRTAS

SEQ ID NO: 145274 - protein, 37 aa, Artificial Sequence
  derived and/or modified sequence
LPGNFFRKAREKIGKEFKRIVQRIKDFLQHLVPRTEA

SEQ ID NO: 145275 - protein, 37 aa, Artificial Sequence
  derived and/or modified sequence
LLGNFFRKAREKIGKEFKRIVQRIKDFLQHLVPRTEA

SEQ ID NO: 145276 - protein, 37 aa, Artificial Sequence
  derived and/or modified sequence
LLGDFFRKAKEKIGKESKRIVQRIKDFLRNLVPRTES

SEQ ID NO: 145277 - protein, 37 aa, Artificial Sequence
  derived and/or modified sequence
RLGKFFRKVKKKIGGGLKKIGQKIKDFLGNLVPRTAS

SEQ ID NO: 145278 - protein, 37 aa, Artificial Sequence
  derived and/or modified sequence
RLGGFLQKAREKIARGFKKIGQKINDFLGKLAPRTEA

SEQ ID NO: 145279 - protein, 37 aa, Artificial Sequence
  derived and/or modified sequence
QLGDVLQKAGEKIVRGLKNIGQRIKDFFGKLTPRTES

SEQ ID NO: 145280 - protein, 66 aa, Artificial Sequence
  derived and/or modified sequence
SYREAVLRAVDQFNERSAEANLYRLLELDPPPEQDAEDRGARKPVSFKVKETVCPRTSQQPVEQCD

SEQ ID NO: 145281 - protein, 33 aa, Artificial Sequence
  derived and/or modified sequence
GLLRKGGEKIGEKLKKIGQKIKNFFQKLVPQPE

SEQ ID NO: 145282 - protein, 38 aa, Artificial Sequence
  derived and/or modified sequence
ISRLAGLLRKGGEKIGEKLKKIGQKIKNFFQKLVPQPE

SEQ ID NO: 145283 - protein, 39 aa, Artificial Sequence
  derived and/or modified sequence
FALLGDFFRKSKEKIGKEFKRIVQRIKDFLRNLVPRTES

SEQ ID NO: 145284 - protein, 170 aa, Artificial Sequence
  derived and/or modified sequence
MKTQRDGHSLGRWSLVLLLLGLVMPLAIIAQVLSYKEAVLRAIDGINQRSSDANLYRLLDLDPRPTMDGDPDTPKPVSFTVKETVCPRTTQQSPEDCDFKKDGLVKRCMGTVTLNQARGSFDISCDKDNKRFALLGDFFRKSKEKIGKEFKRIVQRIKDFLRNLVPRTES

SEQ ID NO: 145285 - DNA, 656 bp, Artificial Sequence
  derived and/or modified sequence
gggaaataagagagaaaagaagagtaagaagaaatataagagccaccatgaaaacacaacgggatggacactcgcttggacgctggtcccttgtcttgttgctgctcggcctcgtgatgcctctcgccatcattgcgcaagtgctctcatacaaagaggctgtcttgagagcgatcgatggtatcaaccagagatcgtcagatgccaatctgtatcggttgctggaccttgacccccgaccaacaatggacggggatccggatacccccaagcccgtgagctttaccgtaaaagaaacggtgtgtccgaggactactcagcagtcccccgaggactgcgatttcaagaaggacgggctcgtcaagcggtgtatggggacggtaacgctgaaccaggcgaggggatcattcgatatttcgtgcgacaaggacaacaaacggtttgcacttcttggtgactttttccgcaagtcgaaagagaagatcggaaaagaattcaagaggatcgtccagcgcattaaggactttttgagaaatctcgtgccgcgaacagaaagctaatgagctgccttctgcggggcttgccttctggccatgcccttcttctctcccttgcacctgtacctcttggtctttgaataaagcctgagtaggaag

SEQ ID NO: 145286 - DNA, 513 bp, Artificial Sequence
  derived and/or modified sequence
atgaagacccagagagacggccacagcctgggcagatggagcctggtgctgctgctgctgggcctggtgatgcccctggccatcatcgcccaggtgctgagctacaaggaggccgtgctgagagccatcgacggcatcaaccagagaagcagcgacgccaacctgtacagactgctggacctggaccccagacccaccatggacggcgaccccgacacccccaagcccgtgagcttcaccgtgaaggagaccgtgtgccccagaaccacccagcagagccccgaggactgcgacttcaagaaggacggcctggtgaagagatgcatgggcaccgtgaccctgaaccaggccagaggcagcttcgacatcagctgcgacaaggacaacaagagattcgccctgctgggcgacttcttcagaaagagcaaggagaagatcggcaaggagttcaagagaatcgtgcagagaatcaaggacttcctgagaaacctggtgcccagaaccgagagctag

SEQ ID NO: 145287 - DNA, 656 bp, Artificial Sequence
  derived and/or modified sequence
gggaaataagagagaaaagaagagtaagaagaaatataagagccaccatgaaaacgcagcgaaatggacccagcctcggtcgctggtcattggtgcttctgcttctgggtctggtgatgcctctcgctatcgtagcgcaagtcttgtcgtatcaagaggcggtccttagggccattgatggaatcaaccagagatcgtcggatgcaaatctctaccggcttctcgatttggacccgaggccaactatggacggggacccggatacgccgaaacccgtgtcctttacggtaaaagaaacagtgtgccctcgcacaacccagaagtcccccgaagattgtgacttcaaagaggatgggttggtcaagcgatgcgtcggaaccgtgattttgaatcaggccagggactcgttcgacatcagctgtgacaaagacaaccggagatcagcgagacttggaaacttctttcggaaggtgaaagagaagatcggtggcgggctgaagaaggtcggacagaagattaaggactttctcgggaacctcgtaccccgcactgcatcataatgagctgccttctgcggggcttgccttctggccatgcccttcttctctcccttgcacctgtacctcttggtctttgaataaagcctgagtaggaag

SEQ ID NO: 145288 - DNA, 513 bp, Artificial Sequence
  derived and/or modified sequence
atgaagacgcagcgggacggtcactccctggggaggtggtcacttgtgttgctcttgctaggactcgtaatgccccttgctataatcgctcaagttttgtcctataaagaggctgtacttcgggccatcgacggaataaaccaaagaagctctgacgcgaacctataccgcctgcttgacttggaccctagaccgaccatggacggggatcctgacacccctaaaccagtgagcttcaccgtgaaggagacagtatgccctcgaaccacacaacagagtcctgaagactgtgacttcaagaaggacggtctggttaagaggtgtatgggaaccgtcacactgaaccaggcccggggttccttcgatatttcttgtgataaggacaacaagcggtttgctctgctgggagatttctttcggaaaagtaaggagaagataggcaaagagtttaagaggatcgtccagcgaatcaaagactttctgcggaacctggtgccgagaactgagagttag

SEQ ID NO: 145289 - DNA, 745 bp, Artificial Sequence
  derived and/or modified sequence
gtcctgtgaagcaatagccaggggctaaagcaaaccccagcccacaccctggcaggcagccagggatgggtggatcaggaaggctcctggttgggcttttgcatcaggctcaggctgggcataaaggaggctcctgtgggctagagggaggcagacatggggaccatgaagacccaaagggatggccactccctggggcggtggtcactggtgctcctgctgctgggcctggtgatgcctctggccatcattgcccaggtcctcagctacaaggaagctgtgcttcgtgctatagatggcatcaaccagcggtcctcggatgctaacctctaccgcctcctggacctggaccccaggcccacgatggatggggacccagacacgccaaagcctgtgagcttcacagtgaaggagacagtgtgccccaggacgacacagcagtcaccagaggattgtgacttcaagaaggacgggctggtgaagcggtgtatggggacagtgaccctcaaccaggccaggggctcctttgacatcagttgtgataaggataacaagagatttgccctgctgggtgatttcttccggaaatctaaagagaagattggcaaagagtttaaaagaattgtccagagaatcaaggattttttgcggaatcttgtacccaggacagagtcctagtgtgtgccctaccctggctcaggcttctgggctctgagaaataaactatgagagcaatttcctcagg

SEQ ID NO: 145290 - DNA, 714 bp, Artificial Sequence
  derived and/or modified sequence
taaagcaaaccccagcccacaccctggcaggcagccagggatgggtggatcaggaaggctcctggttgggcttttgcatcaggctcaggctgggcataaaggaggctcctgtgggctagagggaggcagacatggggaccatgaagacccaaagggatggccactccctggggcggtggtcactggtgctcctgctgctgggcctggtgatgcctctggccatcattgcccaggtcctcagctacaaggaagctgtgcttcgtgctatagatggcatcaaccagcggtcctcggatgctaacctctaccgcctcctggacctggaccccaggcccacgatggatggggacccagacacgccaaagcctgtgagcttcacagtgaaggagacagtgtgccccaggacgacacagcagtcaccagaggattgtgacttcaagaaggacgggctggtgaagcggtgtatggggacagtgaccctcaaccaggccaggggctcctttgacatcagttgtgataaggataacaagagatttgccctgctgggtgatttcttccggaaatctaaagagaagattggcaaagagtttaaaagaattgtccagagaatcaaggattttttgcggaatcttgtacccaggacagagtcctagtgtgtgccctaccctggctcaggcttctgggctctgagaaataaactatgagagcaatttc

SEQ ID NO: 145291 - DNA, 513 bp, Artificial Sequence
  derived and/or modified sequence
atgaagacccagagagatggccacagcctgggccgctggagcctggtgctgctgctgctgggcctggtgatgcccctggccatcatcgcccaggtgctgagctacaaggaggccgtgctgcgggccattgatggcatcaaccagaggagcagtgatgccaacctgtaccgcctgctggacctggacccccggcccaccatggatggagaccctgacacccccaagcctgtgtccttcaccgtgaaggagaccgtgtgccccaggaccacccagcagagccctgaggactgtgacttcaagaaggatggcctggtgaagcgctgcatgggcaccgtgaccctgaaccaggcccggggcagctttgacatcagctgtgacaaggacaacaagagatttgccctgctgggggacttcttcaggaagagcaaggagaagattggcaaggagttcaagagaattgtgcagaggatcaaggacttcctgaggaacctggtgcccaggacagagagctag

SEQ ID NO: 145292 - DNA, 513 bp, Artificial Sequence
  derived and/or modified sequence
atgaagacccagcgggacggccacagcctgggccggtggagcctggtgcttctgctgttggggctggtaatgccactagccattattgcacaggtgctgagctacaaggaggcagtgctgcgcgccatagatggaatcaaccagagaagcagcgacgccaacctgtatcgcctacttgacctggacccccggcctactatggatggggaccccgacacccccaagcccgtcagctttactgtcaaggagaccgtgtgccccaggaccacacagcagagccccgaggattgcgatttcaaaaaggacggtctggttaagcgatgcatgggaacggtaactctgaaccaggctcgtggctccttcgacatctcttgcgataaggacaataaacggtttgcattgctaggagacttcttccgcaaaagtaaggagaagattgggaaagaatttaagcgcattgtccagcggataaaggattttctcaggaacctagtccctcgcacagaatcctag

SEQ ID NO: 145293 - DNA, 513 bp, Artificial Sequence
  derived and/or modified sequence
atgaagactcaaagggacggacattccctaggcaggtggtctttggtgctcctgttgctcgggttagtgatgcctctggccatcattgcccaggtgctaagctataaagaagcagttctccgggcaattgacggaatcaaccagcgtagctctgacgctaatctctatagactgctggatctagaccctaggcctactatggatggcgaccctgacacccccaagccagtaagttttaccgtgaaagagacagtgtgccccagaaccacacagcagagccccgaggactgtgattttaagaaggacggtcttgtaaagagatgcatgggcaccgttacgctgaatcaggccaggggctcattcgatataagctgtgacaaggataacaaaaggttcgccctgctgggcgacttttttagaaagtctaaggaaaaaattggcaaagagtttaaacgcattgtccaaagaattaaggactttctaaggaatctggttcccaggaccgagtcctag

SEQ ID NO: 145294 - DNA, 513 bp, Artificial Sequence
  derived and/or modified sequence
atgaagactcagagagatgggcatagcctcggacgctggtccctggtgctcctcctgttaggattagtcatgccactcgctattatagcacaggtactctcctacaaagaggctgtgttgagagctattgatggaattaaccagagaagttctgacgctaacttgtataggctgctggatctggaccctcgcccaacaatggatggcgatccagacacccccaaacctgttagtttcaccgtcaaggaaactgtgtgtccccgaactacacagcaatctcccgaggattgtgacttcaagaaagacgggctcgtcaaaagatgcatgggcaccgtaaccctgaatcaggccagaggaagcttcgacatctcgtgtgataaagacaacaagcgtttcgctctactgggagacttttttaggaagtctaaagagaagataggaaaagaatttaaaagaatcgtgcagcgcatcaaagacttcctcagaaacctggtgccgcgaaccgaaagttag

SEQ ID NO: 145295 - DNA, 513 bp, Artificial Sequence
  derived and/or modified sequence
atgaagacccagcgcgatggccattccctgggacgttggagtcttgtcctgctgttgttggggctggttatgccactcgccattatcgctcaagtactttcttacaaagaagctgtacttcgtgctatagacggaatcaatcagcggtcttctgacgctaatttataccgcctactggaccttgatccccgaccaactatggacggggaccctgacacccccaagcccgtcagttttactgtgaaagaaactgtttgcccgcgtacgacccagcagagtcctgaagattgcgacttcaaaaaggacgggctggtgaagcgatgtatgggaaccgttaccctgaatcaggcaagaggctctttcgacattagctgtgacaaagataacaaaaggtttgccctgttgggcgatttttttagaaagtcaaaagagaaaatcggcaaggaattcaaaagaattgtacagagaatcaaggatttcctgagaaacctggtaccaaggactgaatcgtag

SEQ ID NO: 145296 - DNA, 510 bp, Artificial Sequence
  derived and/or modified sequence
atgaagacccagcgtaacgggccaagcctgggcagatggtccctggtgttactgctgcttggactggtaatgccactggcaattgtcgcccaggtactctcttatcaggaggccgttctgcgggccatcgatggcataaaccaacgctcgagtgatgcaaatctgtatcggctgctggacctcgacccccgtccaactatggatggagacccagacacacctaagcccgtgtccttcacggtcaaagagacagtgtgcccacgaacaacgcagaaaagccctgaggactgcgattttaaggaagacggcctggtcaaaaggtgcgtcggcaccgtgatactgaaccaggcccgtgattcctttgacatcagctgcgacaaggacaatcgccgatccgctcggttaggtaacttcttcaggaaggtaaaagagaagatcgggggcggcttaaaaaaggtggggcaaaaaattaaggatttccttggcaacctcgtgccgcggacggcatct

SEQ ID NO: 145297 - DNA, 510 bp, Artificial Sequence
  derived and/or modified sequence
atgaaaactcagaggaacggtccaagtttaggccggtggtctttagtactcctgctcctgggactcgtcatgccactcgcaatagtggcacaggtgttgtcttaccaggaggctgtgctcagggcgatcgatggaatcaatcagcggagtagcgacgccaatctttacaggctccttgatcttgatccgaggccaactatggatggagatcccgacacgccaaagccagtctcctttaccgtaaaggagaccgtatgtcctcgaacaacccagaaatcccccgaggattgcgacttcaaggaagacgggctggttaagcggtgcgtgggtacagtcattctgaaccaggctcgcgattcgtttgatattagctgcgataaagataacaggaggtctgccaggctcggtaacttcttccgaaaagtaaaggaaaagattggtggtgggctgaagaaggtgggccagaagatcaaggatttcctcggcaatctcgtccctcgcaccgccagc

SEQ ID NO: 145298 - DNA, 510 bp, Artificial Sequence
  derived and/or modified sequence
atgaaaactcagcgcaatgggccttctttggggcgttggtcccttgtgttgcttctgttgggcctggtgatgccgctggcgatcgtcgcgcaagtcctcagctaccaagaagcagttcttcgcgccatcgatgggattaatcaacgttcgagtgacgccaacctgtataggctgctggatctcgacccgaggccaaccatggacggcgaccccgacaccccaaaacccgtttcctttactgtcaaggaaaccgtgtgtccgcggaccactcagaagtccccggaggattgcgatttcaaggaagatggtcttgtgaagaggtgcgtgggaactgtgatcctgaatcaggctcgcgactccttcgatatcagctgcgataaggacaacagacgaagcgcccggcttggaaacttctttcggaaggtgaaagagaaaattggaggaggcttgaagaaggtcggacagaagatcaaagacttcttgggtaacctcgtgcctcgcaccgcatca

SEQ ID NO: 145299 - DNA, 510 bp, Artificial Sequence
  derived and/or modified sequence
atgaaaacccagaggaatggaccgagcttgggcagatggtccctcgtgctgctgttactggggttggtaatgccgctggctattgtggcgcaggtcctaagttatcaggaagccgtgttacgtgcgattgacgggattaatcagcgtagcagtgatgccaacctttaccgcctgctggacttggaccctaggcctacaatggacggcgacccagacacccccaagccggtctcctttacagttaaagagacagtttgcccccgtacaactcagaagtccccagaggactgtgatttcaaggaggatgggcttgttaagcgatgcgttggaacagtgattcttaatcaggctagagactcattcgacattagctgcgataaagataacaggcgaagtgcccgactgggtaatttctttcggaaagtcaaggagaagatcggcggcggcctgaaaaaggtgggccagaagattaaggactttctggggaacctggtccccagaacagcgagc

SEQ ID NO: 145300 - DNA, 510 bp, Artificial Sequence
  derived and/or modified sequence
atgaagacgcagcggaacggaccttctctgggacggtggagtctggtattactgctgctgggactggtgatgcctctggccatagtggcccaggtgctgtcctatcaagaggcagtgctgcgggccatcgacggcattaatcagcgcagttcagatgcgaacctgtaccgcttgcttgacttggaccctcgcccaaccatggatggggatcccgacaccccgaaacctgtatcctttaccgtaaaagaaacagtgtgcccgaggactacccagaagtccccagaggactgtgatttcaaggaggacggcctcgtcaaaaggtgtgttgggactgtaatccttaatcaggctcgagattcctttgacatcagttgcgacaaggacaacagacgctctgcccgtcttggcaacttcttcagaaaggtgaaagagaaaatcggaggggggctaaaaaaggtgggccagaagattaaggacttccttggcaatttggtgccaaggaccgcatcc

SEQ ID NO: 145301 - DNA, 510 bp, Artificial Sequence
  derived and/or modified sequence
atgaagacccagcggaatggccccagtcttggccggtggtccctggtgttgcttctcctgggcctggtaatgcccctcgccatagtcgcacaagtgctgagctaccaggaggcggtgctgcgggccatcgacgggattaaccagagaagttccgatgccaacttgtaccgattgctggatctggatcccaggccgaccatggatggcgacccggacaccccaaagccggtctccttcactgtaaaagagacagtgtgccctcgtaccacacagaaatctccagaagattgtgattttaaggaggacggtctagtgaagaggtgtgtaggaacagtaattttgaaccaggcccgggatagctttgacataagttgcgataaggacaaccgtcgaagtgctaggcttggtaacttcttcagaaaggtgaaagaaaagattggaggcggccttaagaaggttggccagaaaatcaaagactttcttggcaacttggtgccccggaccgcaagt

SEQ ID NO: 145302 - DNA, 510 bp, Artificial Sequence
  derived and/or modified sequence
atgaaaactcaacggaacggcccatctctcggacgttggtctttagtgctattgcttcttggactggtgatgcctctagctattgtcgcacaggtcctctcttaccaggaagcagtgttacgggccatagatggtattaatcagaggagctcagacgccaacctgtacaggctcctcgatctcgatccgcgacctactatggacggggaccctgacaccccaaaaccagtctcgtttacagtgaaggagacagtttgtccccggacaacccagaagtcccctgaagattgcgactttaaggaggatgggctggtgaaaaggtgcgtgggaacagtgattctcaatcaagcccgcgattcctttgacatctcctgcgacaaagacaaccggagaagcgcgaggcttggcaatttcttcagaaaggtcaaagaaaagatcgggggcggcctgaaaaaagtgggacagaaaattaaagactttctcggtaacctggtgcctcgcaccgcgtct

SEQ ID NO: 145303 - DNA, 510 bp, Artificial Sequence
  derived and/or modified sequence
atgaaaacccaacgcaacggtccctcactcggaaggtggtcgctggtgctgcttctgctcggtctggtgatgccgctggctattgtggcgcaggtgctgagttaccaggaagcagtgttgcgcgctatagacggaatcaaccagcgctccagcgacgccaacctgtacagactccttgacctcgaccctcggcctaccatggatggcgacccagataccccaaagcctgtgtcattcaccgttaaagaaactgtgtgcccgaggaccacgcaaaagtcgccggaagattgtgactttaaagaggacgggctcgtgaagcgctgtgtcggaaccgtcatcctcaaccaggcgcgcgactccttcgacatcagctgcgataaggacaataggcggagcgctcgcctcggaaatttctttcgcaaggtcaaagaaaagatcggaggtggcctcaagaaggtggggcagaagattaaggacttcctcggcaaccttgtccctcgcactgcatct

SEQ ID NO: 145304 - DNA, 510 bp, Artificial Sequence
  derived and/or modified sequence
atgaaaacccagcgtaacggaccgtccctgggacggtggagccttgtcctgctgcttcttggtctggtgatgcctctggcaatcgtcgcacaagtgctgtcataccaagaggcagtgcttcgggcaatcgacggcattaaccagcgctcgtccgatgcgaacctgtaccgccttctggatcttgacccaagacctaccatggacggggatccagatactcctaagccagtgtcgtttaccgtcaaagagactgtgtgtcctagaaccactcaaaagtctcccgaagattgcgatttcaaggaagatggacttgtcaagcggtgtgtgggcactgtcattcttaatcaagccagagactcgttcgacatttcctgtgataaagataatcgaagaagcgcaagactgggtaactttttccgaaaggtcaaagaaaagatcgggggagggctcaagaaggtcgggcagaagattaaggactttcttggtaacctggtgccacgtactgcatca

SEQ ID NO: 145305 - DNA, 510 bp, Artificial Sequence
  derived and/or modified sequence
atgaaaacgcagcggaatgggccaagccttggtagatggtccctcgtcctccttttgcttggactggtgatgccactcgctatagtggcacaagtcctgtcgtaccaggaagcagtgctccgcgcgattgatgggattaaccagcggtcgtcggacgccaacctttaccgactccttgatctggatccccgcccaaccatggatggggatcccgacacccctaaacccgtctcttttactgtgaaggagacggtgtgtccaaggactacccaaaaatcaccggaagattgtgactttaaggaagatggcctggtgaagcggtgcgtgggtaccgtgatcctgaaccaagcaagagacagcttcgatatttcatgtgacaaagacaacaggagatctgcacggcttggtaacttctttcgaaaagtgaaggaaaagataggagggggccttaagaaggtgggacagaagattaaagatttcctgggaaacctcgtgcctagaaccgcaagc

SEQ ID NO: 145306 - DNA, 510 bp, Artificial Sequence
  derived and/or modified sequence
atgaaaactcagcggaatggcccatccctcggccgatggtcactcgtgctgcttttgctgggccttgtgatgcctcttgctatcgtcgctcaggttctttcgtaccaggaagccgtgcttagagctatcgacggcattaaccaacgtagttcagatgccaatttgtatcggctgctggatttggaccctcgccccacaatggatggtgatccagacacaccgaaaccagtgtcatttactgtgaaggaaaccgtctgtcctcgtaccacccaaaagagccctgaagactgcgatttcaaagaagatggccttgttaaacgatgtgtcggcacagtcatcctcaatcaggctagagacagctttgacatcagctgcgacaaggataaccgtcggagtgctagactcggcaacttcttccgcaaggtgaaagaaaagatcggcgggggcctcaaaaaggttggccagaagataaaggacttcttgggtaatctggtgcctcgcacagcctcc

SEQ ID NO: 145307 - DNA, 510 bp, Artificial Sequence
  derived and/or modified sequence
atgaaaacccagaggaacggtccatccctcggacggtggtcgctcgtcctgcttctgctgggactggtcatgcccttggcaatcgtggcccaggtcctttcctaccaggaagcggttctgagagccattgacggcatcaatcagaggagctcagacgcaaatctgtaccgtctcctggatttggatccgaggccaaccatggatggcgaccccgacacgccaaagcccgttagcttcaccgtgaaagagactgtgtgcccgcggacgactcagaagtcgccagaggactgcgactttaaggaggacggcctggtgaagcggtgcgtcggtaccgtcatccttaaccaagcccgcgactctttcgacatcagctgtgacaaggataacagacggagcgccagactgggaaactttttcagaaaggttaaggaaaagataggtggagggctgaaaaaggtgggacaaaagatcaaagatttcctgggcaacctggtgccgcgcactgcctcg

SEQ ID NO: 145308 - DNA, 510 bp, Artificial Sequence
  derived and/or modified sequence
atgaaaacacagagaaatggtccgagtctcggacggtggtcactcgttctcctgctcttgggtctagtcatgccactcgcaattgttgctcaggtgcttagttatcaagaagctgtgctgcgtgcaattgatggaatcaaccaacgttcgagcgatgctaatttgtatagacttctagatttggatcctaggccgacaatggacggagatccagataccccgaaaccagtcagttttactgttaaggagacggtgtgtccacgtacgacacaaaaatctccggaagattgcgattttaaggaagatggtttggttaaacggtgtgtgggcaccgttattttgaaccaagcgcgagattctttcgacatttcttgcgataaggacaatcgtcgctcagcgcgattaggaaatttttttaggaaggtcaaagagaaaatcggcggaggattaaagaaagtaggacaaaaaataaaagattttcttggcaatcttgtcccaaggacagcttcg

SEQ ID NO: 145309 - DNA, 510 bp, Artificial Sequence
  derived and/or modified sequence
atgaaaacccaacgcaacggcccctcgttgggaagatggtcactggtcctcctgctgctgggtctggtcatgccactcgccattgtggcacaagtgctgtcctaccaggaggccgtgctgagggctattgatggcataaaccagcggtcctcagatgctaacctgtacagactcttggatctcgatccgcggcctactatggacggtgaccctgataccccaaagccagtgtcattcactgtcaaggaaactgtgtgccctcggaccacccaaaagtcgcctgaagattgtgacttcaaggaggacggtctggtgaaacggtgtgttggcacggtgatccttaatcaggcacgggactcctttgatatttcttgtgataaagacaaccgcagatctgcacgccttggtaactttttccggaaggtgaaggaaaagatcgggggtggattgaagaaggtgggacaaaagattaaagattttcttggcaatttggtgccgagaacggcgagc

SEQ ID NO: 145310 - DNA, 510 bp, Artificial Sequence
  derived and/or modified sequence
atgaaaacccagcgaaatggcccttctttaggacgctggtccctcgtgttgttgcttctggggttggtcatgcctctagcaatagtagcccaggtgctctcctatcaagaggctgtactcagggcaattgacggtattaatcagagatcatcagacgctaatctctacaggctgctcgacctcgacccccggccaactatggatggagacccggatactccgaaacctgtcagtttcacagtgaaagagactgtttgccctcggactactcagaagtcacccgaggattgcgactttaaggaggatggcctggtgaaacggtgtgtcgggacagttattctgaaccaagccagggacagcttcgacattagttgcgataaggataatcggcggagtgccaggttgggtaattttttcaggaaagtgaaggaaaaaatcggtggaggtctcaagaaggttggccagaagatcaaggacttcctaggcaacctcgtgcccagaacagccagt

SEQ ID NO: 145311 - DNA, 510 bp, Artificial Sequence
  derived and/or modified sequence
atgaaaactcagcggaatggaccaagcctcggtcgttggtccctggtgctccttctcctcgggctggtcatgcctctggcaattgttgcccaagtcttgtcataccaggaagccgtgctgcgggctattgatggcatcaatcaaagatcttctgatgcgaatctgtaccggctgctcgatctcgaccccaggcccaccatggatggtgatcctgatacgcctaagccggtgagcttcaccgtcaaagaaaccgtatgccccagaaccactcagaagtcaccagaggactgtgacttcaaggaggatggtctggtcaagcgatgcgtgggaactgtgatcctgaaccaggcccgcgactccttcgacatcagctgtgacaaggacaaccggaggtcagcacgtctggggaacttttttcggaaagtgaaggaaaagattggaggaggactcaagaaagtgggccaaaagataaaggattttctgggaaacctggtgcctcgaactgcaagc

SEQ ID NO: 145312 - DNA, 510 bp, Artificial Sequence
  derived and/or modified sequence
atgaaaactcaaagaaatggcccatcactgggaagatggagcctggtcctgcttctgctcggcctggtgatgccccttgcaattgtggcccaagttctgagctaccaggaggctgtgctgagagcgatcgacggaatcaaccaacgcagctcagacgcaaatttgtaccgcttgctggacctggaccctcggcctaccatggacggggatccagatacgccgaagccagtgtctttcaccgtcaaagaaactgtgtgtccgagaactacccagaagagcccggaggactgcgatttcaaggaggacggtttggtcaagcgctgcgtcggaacggtgatcttgaatcaggcacgggattcgttcgatattagctgcgacaaggataaccggcgctcggcgcgcctgggcaatttctttcgcaaggttaaggagaaaataggcggaggactcaagaaggtgggccagaagatcaaggacttcctcggaaaccttgtgccgcggaccgcatcg

SEQ ID NO: 145313 - DNA, 510 bp, Artificial Sequence
  derived and/or modified sequence
atgaaaacccaaaggaacggcccgtccctgggccgctggtccctggtgctcctgctcctgggactcgtcatgccgctggcaattgttgcccaggtgctgtcctaccaagaggcggtgctccgcgccattgatggcattaaccaacggtcgtccgatgccaacctgtaccggttgctcgacctggacccacgccctactatggacggcgaccccgatactcccaagccagtctcctttacggtgaaggagactgtgtgcccccgcaccactcagaaatcgccggaggactgcgacttcaaggaagatggcctggtcaaaagatgtgtcggtaccgttatcctgaaccaagccagggattcgtttgacatctcgtgcgataaggacaaccgcaggtcagctcgccttgggaatttcttccggaaggtgaaagagaaaatcggaggaggcttgaaaaaggtgggacagaagatcaaggacttcctgggaaacctggtcccgaggactgcttca

SEQ ID NO: 145314 - DNA, 510 bp, Artificial Sequence
  derived and/or modified sequence
atgaaaactcaacgtaacgggccttcgctgggacgctggtccctcgtgttgcttcttcttggccttgtgatgccgcttgccattgtcgcacaagtgctctcctaccaggaagcagtcctgcgcgcgatcgacggtatcaaccagcgctcaagcgatgctaacctgtacagactcctcgatcttgacccccggccaacgatggatggagatccggacactccaaagcctgtctcgtttaccgtgaaggaaactgtctgccctaggaccacccaaaagtcccccgaggattgtgatttcaaggaagatggcctggtgaagcggtgtgtcggaactgtgatattgaaccaggcaagggatagcttcgatattagctgtgataaagataatcgccgttctgcgcgtctggggaatttctttagaaaagtgaaggaaaagatcggcgggggtctgaaaaaggtcggacagaagattaaagattttctgggaaacctcgtgccgagaacggcaagc

SEQ ID NO: 145315 - DNA, 510 bp, Artificial Sequence
  derived and/or modified sequence
atgaagacgcagcggaatgggccatcactggggcgttggtctctcgtactcctgctgcttggactggtaatgccgcttgcaattgttgcacaagtgcttagctaccaggaagcagtgcttcgggctattgatggcataaatcagaggtcctccgacgcaaatttatacaggcttcttgacctcgaccctcggccaaccatggacggcgatccagacactcccaaacctgtgtccttcaccgtgaaggaaaccgtgtgccctagaacgacccagaaaagtccagaagactgcgactttaaggaggacgggctggtgaagcgctgtgtcgggactgtgatccttaaccaggcccgggactccttcgacatttcttgtgacaaagacaataggaggagcgctcgattgggcaacttcttcagaaaggttaaagagaagattggtggcggcctcaaaaaggtcggccagaagatcaaggacttcctgggcaatctggtgcccaggaccgcgtct

SEQ ID NO: 145316 - DNA, 510 bp, Artificial Sequence
  derived and/or modified sequence
atgaaaactcagagaaacggaccgtccctcgggaggtggagcctcgtgttgctcctgttggggcttgtgatgcctctcgctatcgtggcccaggtgctttcctatcaggaagccgtgcttcgcgccatcgacggaatcaaccagcggagcagcgacgcgaacttataccgtttattagatctagatccgcgacctacgatggatggcgaccccgatacaccaaagccagtaagttttacggtcaaagaaactgtgtgcccaaggaccactcagaaatcccctgaggattgcgatttcaaggaagacgggctggtgaagcgatgtgtggggactgtcatactgaaccaggcccgtgactcattcgacatttcctgcgacaaggataatcgccgatcagcaaggcttggtaacttcttccggaaagtaaaagaaaagatcggcggtggtctgaaaaaggtggggcagaagatcaaagactttctgggcaacctagtacctcgcacggctagt

SEQ ID NO: 145317 - DNA, 510 bp, Artificial Sequence
  derived and/or modified sequence
atgaagacacagcgcaatggtccctccttgggtcggtggtccctcgtattgcttctcctgggactcgtgatgccgctggccattgtggcccaggtgttgagctaccaggaggcggtgctgcgggccatcgatgggataaatcaaaggtcctctgatgcaaatctttatagattgctcgatttggaccctcgcccaaccatggatggagatcctgataccccgaagccagtctcctttacagtaaaagagactgtttgccccagaactacacagaagtctcctgaagactgcgatttcaaggaggatggccttgtgaagaggtgcgtcggaaccgtaatcctgaaccaggctcgcgacagctttgatatttcctgcgataaggataacagaagatcagctagactcggtaattttttccggaaggtcaaggaaaaaatcggaggtggactcaagaaagtgggccaaaagatcaaagactttctgggcaacctggtacctaggaccgcaagc

SEQ ID NO: 145318 - DNA, 510 bp, Artificial Sequence
  derived and/or modified sequence
atgaagacccaacgaaatggcccgtcacttggtcgatggtccctcgtgttgctcctcctaggactggttatgccattggcaattgtggcccaggtcttgtcttatcaagaagccgttctaagggctattgacggcattaaccagcgctccagcgacgctaatttgtataggctcctcgatctggatccgcggccaaccatggacggcgatcctgatacaccaaagcctgttagctttacggtgaaagagaccgtgtgtccacgtaccacacagaaaagtcctgaggattgtgattttaaggaggacgggctggtaaagaggtgtgttggaacagtgattctgaatcaggctcgggattcttttgacatctcttgtgacaaagacaataggcgatccgctcggctgggtaattttttccgcaaggtgaaggagaaaataggcggcggccttaaaaaagttggacagaaaataaaggactttctcggcaacttggtgcctcgaaccgcatca

SEQ ID NO: 145319 - DNA, 510 bp, Artificial Sequence
  derived and/or modified sequence
atgaaaacacagcggaacggaccttctctggggcggtggtctctcgtactgctgctattgggactggtgatgcccctggccatcgtagcccaggtgctctcctatcaggaagctgtgctgagggctattgatgggattaatcagcgctcttcagatgctaacctgtataggttactcgacttagatccacggcccacaatggatggggatccagatactcccaaacctgtgtctttcacagtaaaagaaacagtgtgtcctcgaacaacacagaaatctcccgaagattgcgattttaaagaggatgggctagtaaaaaggtgtgtcgggactgtaatcttaaatcaggctcgagattccttcgatatatcttgtgataaagataaccgaagatcagctcgactcggaaacttttttcggaaggtaaaagaaaaaatcgggggaggacttaagaaagtgggacagaaaatcaaggattttcttgggaatctcgtcccaaggacagcctct

SEQ ID NO: 145320 - DNA, 510 bp, Artificial Sequence
  derived and/or modified sequence
atgaaaacccagcgcaatggcccctctctgggccggtggtcacttgttctcctgctgctcggcctggtgatgccgttggcgatcgtggcacaagtgctgagctaccaggaagccgtgctgcgggcaatcgacggaatcaatcagaggagcagcgacgcaaacctttaccgcctgctggacctggatcctagaccgaccatggatggcgacccggacactccgaagccagtgtcgtttaccgtgaaggaaactgtgtgccctcgcactactcaaaagtcccccgaggactgcgacttcaaagaggacgggctcgtgaagcgctgcgtcgggactgtgatcctcaaccaggcccgcgattccttcgacatctcgtgtgacaaggacaatcgccgctcagcgagactgggaaacttttttcgcaaggtcaaagaaaagattggtgggggtcttaagaaggtggggcagaagatcaaggatttcctgggaaacctcgtgccgcggaccgcttct

SEQ ID NO: 145321 - DNA, 510 bp, Artificial Sequence
  derived and/or modified sequence
atgaaaacccagcggaacggaccgtcactgggacgctggtcactggtgttgttgttgctgggcttggtgatgccgctcgccatcgtggctcaggtgctctcgtaccaagaagcagtcctcagagccattgatggaattaaccaaaggagctcagacgctaacctgtaccgactcctggacctcgacccgcgtccaactatggatggggacccggacactccaaagcccgtcagcttcactgtgaaggaaaccgtgtgcccgcgcaccactcagaaatcgccggaggattgcgacttcaaggaagatggcctggtgaagcgttgtgtcggcaccgttatcctgaaccaagcacgcgactcctttgatatctcctgcgataaggataatagacggtctgcccggcttggaaatttcttcagaaaggtcaaggaaaagatcggtggcgggctgaaaaaagtgggtcagaagatcaaggattttctgggaaacctcgtgccccggaccgcgagc

SEQ ID NO: 145322 - DNA, 510 bp, Artificial Sequence
  derived and/or modified sequence
atgaaaacccaacgtaatggaccatcattgggtcgctggagcctcgttcttttgttattgggattggttatgccattggccattgttgctcaagttctatcatatcaggaagccgtccttagagctatcgacggaattaaccaaagatcctccgatgctaatctctataggcttctcgatcttgatcctcgtccaactatggacggtgaccctgatacccccaaacctgtgtccttcactgttaaggaaaccgtatgtccccgtaccactcaaaaatctcccgaagattgcgattttaaggaggacggacttgtgaagcgatgcgttggaactgttattctcaatcaagctagggacagctttgatatttcttgtgataaagataataggaggtcagctagacttggaaacttttttcgcaaggtgaaggaaaaaattggtggtggtctgaagaaggtcgggcaaaaaattaaggactttctgggaaacttggtgccgaggacagccagc

SEQ ID NO: 145323 - DNA, 510 bp, Artificial Sequence
  derived and/or modified sequence
atgaaaacccaacgcaatggaccgagtctcggcaggtggagcctggtgcttcttctgctggggctggtgatgccactggcgatcgtagcacaggtgttgtcctaccaggaggccgtccttagagcaattgatggaataaaccagcggtcctctgatgcaaacctctacagactgctcgatctcgatccaagacctactatggatggagatcccgataccccaaagccagtttcgttcaccgtgaaagagactgtctgccctcgtacgacgcaaaagtctccggaagattgtgacttcaaagaagatggtcttgtgaaaagatgtgtggggactgttatcctgaaccaggctcgtgattcctttgacatttcatgtgacaaggataacagacggtcggcacgacttggtaacttttttcgcaaagtgaaggaaaagatcggcggtggacttaagaaggtcggacaaaagatcaaggatttcctgggaaatcttgttcccagaactgcgagc

SEQ ID NO: 145324 - DNA, 510 bp, Artificial Sequence
  derived and/or modified sequence
atgaagacacagcgcaatggtccttcactcggtcgttggtctttggttctcttgctgctgggtctagtgatgcccttggcaatcgtcgctcaggttctgtcataccaagaggccgtcttgagggccatcgacggtataaatcagcgcagctccgatgctaatttgtataggttactagacctggatccccggccgaccatggacggcgacccggatacaccaaaacctgtgtcgttcacagtgaaagaaaccgtctgtccccgaaccacccagaagagcccagaagattgcgactttaaggaggatggcctcgtcaaaagatgcgttggcaccgtgattctgaaccaggcgcgggactccttcgatatctcgtgtgataaggacaatcggaggtcggcaaggcttggaaacttctttcggaaagtgaaagaaaaaatcggcgggggtctcaagaaagtgggccaaaagataaaagacttccttggaaacctggttcctcgaacagcttcc

SEQ ID NO: 145325 - DNA, 510 bp, Artificial Sequence
  derived and/or modified sequence
atgaaaactcagagaaacggtccaagcttggggcgctggtctttggtcctgctattgctgggcctcgtgatgccattggctattgttgcacaggtgttgtcttatcaggaggccgtgttacgcgcaatcgacggaatcaatcagcgctccagtgacgcgaacctgtacaggctgctcgatctggacccacgccctacaatggacggagatcctgacacgcctaagcccgtgtctttcacagtgaaggaaactgtctgtccgaggactacccaaaaatcacccgaggactgcgacttcaaagaggacggccttgtcaagagatgtgtggggactgtcatcctgaaccaggctagggactcattcgatattagctgcgacaaagacaacagaaggagcgcacggctgggtaactttttccgaaaggtcaaggagaagattggcggaggtcttaagaaggtgggacaaaaaattaaggatttcctggggaacctagtgccgcgcacagcctcg

SEQ ID NO: 145326 - DNA, 510 bp, Artificial Sequence
  derived and/or modified sequence
atgaaaacccaaagaaacggaccctctcttggacgctggtccctcgtgctgcttctccttgggcttgtgatgcccctcgccatagtggcgcaagtgctctcctaccaggaggcagtcctccgcgctatcgatggaatcaatcagcgatcgtcggacgcaaacctctaccgcctgctggaccttgatcctagacctactatggacggagatcctgataccccgaaacccgtttcgttcaccgtgaaggaaactgtctgcccacggactacgcagaaatcgcctgaggattgtgacttcaaagaagatggtctggtgaaacgctgtgtgggaacggtgattcttaatcaagccagggactctttcgacatttcatgtgataaggacaatcggagatccgcaagactggggaacttttttcggaaggttaaagaaaagataggaggcggtctgaagaaggtgggccaaaagataaaggattttctcggtaacctcgtccctagaactgcgagc

SEQ ID NO: 145327 - DNA, 510 bp, Artificial Sequence
  derived and/or modified sequence
atgaaaacacaacgcaacggtccctcattggggcggtggtcccttgttctgctgctcctgggcttagtgatgccgctagcgatcgtggcgcaggtcctgtcataccaggaagcggtgctgagggccatcgacggcatcaaccagcggtccagtgatgccaacctgtataggcttttggatctggacccgcggccaactatggatggagaccccgataccccaaaaccagtgtccttcaccgtaaaggagactgtgtgccctcggacaactcaaaagtcgccagaagactgcgactttaaagaagacggccttgttaagcggtgtgtcgggacagtcatactcaaccaagctcgagatagcttcgacatcagctgcgacaaggacaataggcgatcggcccgcttggggaacttctttcggaaggtgaaggagaagatcggcggaggactgaagaaagtgggacagaagattaaggatttccttggtaacctggtgccacggacagcctct

SEQ ID NO: 145328 - DNA, 510 bp, Artificial Sequence
  derived and/or modified sequence
atgaaaacccagcggaatgggccgtcgctgggacgctggtcgctggtgctcctcctcctgggcctcgttatgccactcgcgatcgtggctcaggtgttgtcgtaccaagaagcggtcctcagggcgatcgacggcatcaaccaacgttcgtccgacgccaatttgtaccggctgcttgacctggatccccgaccaaccatggacggcgacccggatactccgaagccagtctcgtttactgtgaaagagactgtgtgtccacgcaccacccaaaagtccccagaggactgcgactttaaggaggacgggctggtgaagagatgcgtgggaaccgtgattctgaaccaggccagggattccttcgatatctcctgcgacaaggataaccggcggtcagcgaggctcggaaactttttcagaaaagttaaagagaaaatcggaggtggactgaagaaagtgggtcaaaagatcaaggatttcctggggaatctggtgccgagaactgcctcg

SEQ ID NO: 145329 - DNA, 510 bp, Artificial Sequence
  derived and/or modified sequence
atgaagacgcaacgaaacggacctagcctgggcaggtggagcctggtactacttctcttgggactggttatgccgctggccatcgtagcacaggttctgagttaccaggaggctgttctgagggccatcgatggcatcaatcagcgcagcagtgatgctaacctctaccgtctgctggacctagacccgcggccgacgatggacggcgatccggacaccccaaagccggtgtcattcaccgtgaaggagacagtctgcccccgcaccactcagaaatcccccgaggactgtgacttcaaagaggacggccttgtgaagcgctgcgtgggtacagtgatcttgaaccaggcccgggattcctttgatatcagctgcgacaaggacaatcgccggagcgctcgcttaggaaacttttttaggaaggttaaggagaagataggtggcggactcaagaaggttggacagaaaataaaggatttcttgggaaatctcgtaccccgcacagctagt

SEQ ID NO: 145330 - DNA, 510 bp, Artificial Sequence
  derived and/or modified sequence
atgaagactcagaggaacggtcccagtctggggagatggtcacttgtgcttctcctcctaggactggtgatgcctctggcaatcgtcgcacaggtgttgtcctatcaagaggccgttctccgagcgatcgacggcattaatcagcgctcgtcagacgctaacctctaccggctgctggatttggatcctcgcccgacaatggacggtgaccctgatacccctaagcctgtgagcttcacggtgaaagaaacggtttgcccacggacaactcagaagtcgccggaagattgcgatttcaaagaggacggcctggttaaacgctgtgtgggaactgtcattctgaaccaggccagggatagctttgacattagttgcgataaggataaccgcaggtctgcacggctgggaaatttctttcgtaaagtcaaggagaaaatcggtggaggtctcaaaaaggtcggccagaagataaaagatttcctcgggaacctggtcccccgaaccgcttcc

SEQ ID NO: 145331 - DNA, 510 bp, Artificial Sequence
  derived and/or modified sequence
atgaagacccagaggaatggaccttcattgggccggtggagtctggtgctgttgcttctgggcctagtcatgcctctagccatcgtggctcaggtgctgtcctatcaggaggctgtcctgcgggcaatagatggcattaaccagagatcaagtgacgcaaatctgtaccgtctgctggacctagaccctaggcctactatggacggcgaccccgacactccgaaaccagtatcctttacagtaaaggagacagtgtgtcccaggacaactcaaaaatcccctgaagattgcgattttaaggaggatggtttagtgaaaaggtgcgtcgggaccgtgatcctgaatcaggcacgggacagttttgacatctcctgtgataaggacaaccgtaggtccgcacggttgggcaatttcttcagaaaggtgaaggagaagattggcggggggcttaagaaggtggggcagaagatcaaggatttcctcggaaacctggtgcctaggacagcgtcc

SEQ ID NO: 145332 - DNA, 510 bp, Artificial Sequence
  derived and/or modified sequence
atgaaaacccagcgcaacggaccgagcctgggacgatggtcgcttgtgcttctcctcctgggacttgtgatgccactggctatcgtggcacaagttcttagctaccaagaagcagtcctccgcgcaattgatggaatcaaccagagatcgagtgacgcgaacctgtacagactgcttgatctggatccgcgtcctaccatggacggtgaccctgatactcccaaaccagtctcctttacggtcaaggagactgtatgccccagaaccacccaaaagtcacctgaggactgtgatttcaaggaagatggtttggtgaagagatgcgtgggtactgtgatacttaaccaggcacgcgactccttcgatatttcctgtgataaagacaatcgacggtccgcccgcctcggcaactttttccggaaagtgaaagaaaagattgggggtggcttgaagaaagtggggcaaaagatcaaggattttctgggcaacctggtgccacgtaccgcctca

SEQ ID NO: 145333 - DNA, 510 bp, Artificial Sequence
  derived and/or modified sequence
atgaaaacgcagaggaacggcccatcactggggcgttggtctctggtccttctgctgcttggactcgtcatgccccttgccatcgtggcccaagtgctgtcctaccaggaggccgtgctgagggccatcgatggcatcaatcagaggagttccgatgccaacctatatcgcctgctggacttagacccgcggcccactatggatggagaccctgacacgccaaaacccgtcagttttactgtaaaggaaaccgtgtgtccgaggactacgcagaagtccccagaggattgcgatttcaaggaagatggtctggtgaaacgttgcgttggcactgtgattctgaatcaggcaagggacagctttgatatcagttgcgacaaggataaccgtcggtccgcccgcctgggaaacttttttaggaaggtcaaggagaagattggcggtggtctgaaaaaggtgggccagaagatcaaggacttcctcggcaacctggtccctaggacagccagc

SEQ ID NO: 145334 - DNA, 510 bp, Artificial Sequence
  derived and/or modified sequence
atgaagacccaaaggaatgggccttccctcggccgatggtctctggtgctactgttactggggctggtgatgcccttggcgattgtggcccaggtgctctcttaccaggaagcagtgttaagggccattgacggtattaatcaacgttctagtgacgccaatctgtatcgattgcttgatcttgatcctcggccgaccatggatggcgacccagacacgcctaagcccgtgagtttcacagttaaggaaacagtttgtcccagaactacccagaagagccctgaagattgcgacttcaaagaagacgggttggtgaagaggtgcgtgggcacagtcatactaaatcaggccagggattcttttgatataagctgcgacaaggataaccggaggtccgcccgcctgggtaactttttccggaaagtaaaggaaaaaatcggcggcggactgaagaaggtaggtcaaaagatcaaggactttctgggaaatcttgttccaaggacggcctca

SEQ ID NO: 145335 - DNA, 510 bp, Artificial Sequence
  derived and/or modified sequence
atgaaaactcagaggaatggcccatctcttggtaggtggagtctagtgctgctccttctggggctggtgatgccactggcaatcgtggcccaggtgctgtcctaccaggaggctgtattgcgtgccattgatggcataaaccagcggtcttccgatgccaacctatataggctcctcgatcttgaccctagacccacaatggatggggaccccgatactccaaagcccgtttcatttaccgtcaaggaaactgtgtgtccaagaacaacgcagaaatccccagaagactgcgatttcaaggaagacggcttggtgaaaagatgcgttggtacagtgatattgaatcaagcccgcgactcctttgacattagctgcgataaagataatcggaggtcagcgagactgggcaacttcttccgcaaagtcaaagagaagattggaggcggcctcaagaaagtgggccagaaaattaaggacttcctggggaacttagtacctcgcacagcaagt

SEQ ID NO: 145336 - DNA, 510 bp, Artificial Sequence
  derived and/or modified sequence
atgaaaacgcagagaaatggaccatcgctcggacggtggtcgttggtcttgctcctcctcggactggtcatgcccctcgccattgtggcccaggtgctcagctaccaggaagcggtgctgcgcgctatcgacggaattaaccaaagatcttccgatgccaatctgtaccggctgctggaccttgatcctcgtccgactatggatggggacccggatactccaaagcctgtgtccttcaccgtgaaggaaactgtctgcccacgaaccacccaaaaatcaccggaggactgcgactttaaggaagatggactggtgaaacgctgcgtggggaccgttatcctgaatcaggcgcgggactccttcgacatctcatgtgataaggacaacagacgctcggcacgccttggaaactttttccggaaggtgaaggagaaaatcggtggcggtctgaagaaggtcggccaaaagatcaaggacttcctgggcaacctggtgccgaggactgcaagc

SEQ ID NO: 145337 - DNA, 510 bp, Artificial Sequence
  derived and/or modified sequence
atgaagacacagagaaacggccctagcctgggtaggtggagtctggtgctgctgctcctgggattggtcatgccattggcaatcgttgcccaggtgctcagttatcaggaggctgttctcagagctatcgacggtatcaatcagaggtcaagtgatgcaaacctttataggttgctggatcttgacccgagacctactatggacggagacccggacacccccaaacccgtgagcttcaccgtgaaggagaccgtctgcccgaggacaacccaaaaatctcctgaggattgtgattttaaagaggacggcctcgtcaagaggtgcgtaggcacggtcatcctgaatcaggcccgggatagttttgatatcagttgtgataaggacaaccgccggagcgcaaggttgggtaatttttttcgaaaggtaaaggagaagattgggggtggactgaagaaggtgggacagaagatcaaggacttcctgggcaatctggtgccccggaccgctagc

SEQ ID NO: 145338 - DNA, 510 bp, Artificial Sequence
  derived and/or modified sequence
atgaagacacagagaaatggcccctctctggggaggtggtcattggtgctgcttctcctgggactggtcatgccacttgccatcgtggcacaggtactgtcctaccaggaggcagtgctccgggctattgacggaattaatcagcggagctccgatgcaaacctttatcgcttactggatttggatccacgacctacgatggatggagaccccgatacaccaaaacctgtctcctttacagtgaaggagacagtctgcccccggaccacccagaagtctcccgaggactgtgatttcaaggaggacggcctggtgaaacggtgcgttggaactgtcatcctgaaccaggctcgcgactcttttgacatctcttgcgacaaggacaaccgtcggtccgctcgcctagggaacttttttcgaaaggtgaaagaaaagattggcggcgggcttaaaaaagtgggtcaaaaaatcaaggacttccttggaaatttagtaccccggacagccagt

SEQ ID NO: 145339 - DNA, 510 bp, Artificial Sequence
  derived and/or modified sequence
atgaaaactcaaagaaacggacctagcttgggtagatggtcgctggtgctcctgcttttgggactcgtgatgccgctggcgattgtggcacaggttctttcctaccaagaagcagtgcttcgtgctatcgacggaattaaccagcgatcatccgacgcaaatctgtaccggctcttggatctggaccccaggccaaccatggacggcgacccagacacgccgaaacctgtttcgtttacggtgaaggagacggtctgccctcgaactacccagaagtctcccgaagattgcgatttcaaggaggatgggttggttaagcgatgtgtcggaaccgtgattctgaaccaggcaagggattcgtttgatatatcctgtgataaagacaatcggaggagcgcgagactgggtaactttttccggaaggtgaaagaaaagattggaggagggcttaagaaggtcggacaaaagatcaaggattttctcggcaacctggtacctagaactgcgtcc

SEQ ID NO: 145340 - DNA, 510 bp, Artificial Sequence
  derived and/or modified sequence
atgaaaacgcaacgcaatggtccttctctgggccggtggtcgctggtgctcttgctgctgggcctcgtgatgcccctggccattgtggcacaagtgctctcgtaccaggaggcagtgctccgggcaatcgatggcatcaaccagcgatcgtcagatgcaaatctgtaccgccttctcgatcttgatcctcgtcctaccatggatggtgacccagacactcccaaaccggtgtcgtttaccgtgaaggaaaccgtgtgccctcggaccacgcagaagtcgcccgaagattgcgacttcaaagaggatggattggtcaaacggtgcgtggggacggtgattctgaaccaagcgagagattcgtttgacatttcctgtgacaaggataaccggagatcagccaggcttggcaatttctttagaaaggtgaaggaaaagatcggtggtggcctcaagaaagtgggacagaagattaaagatttccttgggaacctggttcctagaactgcaagc

SEQ ID NO: 145341 - DNA, 510 bp, Artificial Sequence
  derived and/or modified sequence
atgaaaacccagcgcaatggaccttccctgggtaggtggagcctggtgttgctcctcttggggcttgtcatgccacttgcaatcgtcgcgcaagtgctctcgtaccaagaagcagtgctgcgggccattgatggaattaaccagaggtcctcggacgcaaatctttaccgacttctcgatcttgaccctcgccctaccatggatggagatccagatacccctaaaccagtgtcgtttaccgtgaaggagactgtgtgtcctagaacgactcaaaaatcccctgaggactgcgactttaaagaggacggtttggtcaaacgctgtgtgggaactgtgattcttaaccaggcacgggattcttttgatatatcatgtgacaaggataacaggcggagcgcgcgcctgggcaacttctttaggaaggtgaaggaaaagattggtgggggactgaagaaagtgggtcagaaaatcaaggacttcctcggcaacctggtgcctagaactgcgtca

SEQ ID NO: 145342 - DNA, 510 bp, Artificial Sequence
  derived and/or modified sequence
atgaaaacgcagcgcaatggaccctcccttggtcgctggtcccttgtgctgctgctgcttggacttgtgatgccactggccatcgtggcacaggtgctctcctaccaagaggccgtgcttcgcgcgattgatggcataaaccaaagatcctcggatgcaaacctgtacagactccttgatctggaccctcggcccacgatggatggagatcctgacacccctaagcctgtctcattcaccgtcaaggagactgtgtgtccgcgcactactcaaaagagccccgaagattgtgactttaaagaagatggtctggtcaagagatgcgtcgggacggtgattctcaatcaagcaagagattcgtttgatatttcatgtgacaaggacaataggagatcggcacggctgggtaactttttccgaaaggttaaagagaaaatcggaggtggacttaagaaggtggggcagaagataaaagacttcttggggaatcttgttccgagaaccgcatcg

SEQ ID NO: 145343 - DNA, 510 bp, Artificial Sequence
  derived and/or modified sequence
atgaaaactcagagaaacgggccgagcctgggcaggtggagcctggtgcttcttcttctgggcctcgtgatgcctcttgctattgtggcccaagtcctgtcataccaggaagccgtgctcagagctatcgacggaataaaccagcggtcgtcggacgcgaacctctacagactgctggacttggacccacgcccaaccatggacggtgatcccgacaccccgaagccggtgagcttcactgtgaaggaaactgtctgtccacgcactacccagaagtcaccggaggattgcgatttcaaggaggacgggctcgtgaagcgctgtgtcggcaccgtgattctgaaccaggctcgcgacagctttgatatctcgtgcgacaaagacaaccgacgctcggccagactgggcaacttcttccgcaaagtcaaagaaaagatcggagggggcctgaagaaagtgggacagaagattaaggactttctgggaaatttggtgcctcgcactgcctcc

SEQ ID NO: 145344 - DNA, 510 bp, Artificial Sequence
  derived and/or modified sequence
atgaaaacacaacgtaacggaccaagcctgggtcgttggagcctcgttttgctgctgctgggccttgttatgcctctggccattgtggcccaggtgctgtcataccaagaggcagtattgagagcgatcgacggtatcaaccaacgcagcagcgacgccaacctgtaccgcttgctggatctggacccacgcccaacgatggatggagacccggacaccccaaagccggtgtcgttcaccgtcaaagagaccgtgtgccctaggaccacccagaagagcccagaagactgcgattttaaagaggacggtctggtgaagcggtgcgtgggcaccgtcattctgaatcaggcccgtgacagttttgatattagctgcgacaaggacaaccggcgctctgcgcgcctgggcaactttttccgcaaagtcaaggaaaagatcggcggtgggctgaagaaagtgggtcagaagattaaagactttctgggtaacttggtccctcgcacagcgtca

SEQ ID NO: 145345 - DNA, 510 bp, Artificial Sequence
  derived and/or modified sequence
atgaagactcagcgcaatgggccctctctggggcgctggagtctggtactgttgttgttgggtctggtgatgcccctggccatcgtcgctcaggtgctctcctaccaggaggccgtgttaagagcgatcgatgggatcaaccagcgaagcagtgatgcaaacctgtaccgccttcttgacctggatcccaggccaacgatggacggcgatccggacacaccaaagccagtctcattcactgtgaaagaaactgtctgccctaggacgacccagaaaagtcctgaagactgcgattttaaggaggacggtctggtcaagcggtgtgtgggaactgtgatcctgaaccaggctcgggattctttcgacatctcttgcgataaagacaacaggagaagtgcccggctgggcaacttttttcgcaaagttaaggagaagatcggcggaggcctcaagaaggtgggtcagaagatcaaagatttcttgggcaatctggtgcccagaacagccagc

SEQ ID NO: 145346 - DNA, 510 bp, Artificial Sequence
  derived and/or modified sequence
atgaagactcagaggaacggtccttcactgggacgatggagcttggtcctacttctgctgggactcgtcatgcctttggcgatagtcgcacaggtcctttcgtatcaagaagctgttttgagagcgattgatgggatcaaccagagaagctctgatgcgaatctttaccgactcttggatcttgatccacgccctactatggatggagatcccgacactcctaaacctgtgtccttcaccgtcaaggaaactgtatgccctcgaactacccaaaagtcaccggaggactgtgacttcaaagaggatggcctcgtcaaaagatgcgtcggtactgtaattctcaatcaggctagggactcgtttgatattagttgcgacaaggataatcgccgctcggcccggctgggtaattttttcaggaaagtaaaggagaaaatcggaggtggtttgaagaaggtcgggcagaaaattaaggacttcctagggaacctagtaccgcggacggctagt

SEQ ID NO: 145347 - DNA, 510 bp, Artificial Sequence
  derived and/or modified sequence
atgaagacccaacgaaatgggcctagtctgggccgttggagcctggtgctgcttctactgggtctagttatgccactggctattgtggctcaggtcctgagttatcaggaagcggtgctccgtgccattgatggcattaaccagcgcagctccgacgccaatctgtacaggttgttagacttggatcccagaccaacgatggatggcgaccccgacacgcccaagcctgtgtcctttaccgtaaaagagaccgtatgtccccgcactacccagaagagtcccgaagactgcgattttaaggaggacggcctggttaagagatgtgtagggacggtgattttgaatcaagcacgcgattctttcgacatatcttgtgataaggacaacagaaggtcggcccgactcgggaactttttcaggaaggtaaaggaaaaaatcgggggcggcttaaaaaaagtgggacagaaaattaaagattttcttggcaatctggttccacgtacagcttcc

SEQ ID NO: 145348 - DNA, 510 bp, Artificial Sequence
  derived and/or modified sequence
atgaaaactcaacgcaatgggccctcccttgggcgatggtcactcgtgcttctgcttctcggacttgtgatgcctcttgcaatcgtggcacaagtgcttagctaccaggaagctgtgctcagagctattgatggaatcaaccagcgctcctccgatgctaacctctacagacttttggatctcgatccaagaccaactatggacggggatccagatacccccaagcctgtgagctttaccgtcaaggaaaccgtgtgcccacgcacgacccaaaaatcgccagaggattgtgactttaaggaagatggtttggtcaagagatgcgtcgggactgtgatcctgaatcaggcgagggactcatttgatatttcgtgcgataaggacaaccggagatcggcccgtttgggaaacttttttcgtaaagttaaggaaaagattggcggtggcctgaagaaggtgggtcaaaagattaaagacttcctgggtaatctggtcccacgtacggcgtcc

SEQ ID NO: 145349 - DNA, 510 bp, Artificial Sequence
  derived and/or modified sequence
atgaaaacccagcgcaacggccccagcctggggcggtggtcactcgtgctgctcctcttgggtctggtcatgccactcgccatcgtggcgcaggtgctgtcctaccaggaggctgtgcttcgcgcgatagacggaatcaatcaacgatcgagcgacgcaaacctttatcgcctcctggatttggatccccgccctaccatggacggagatcctgacacgccgaagccagtgtccttcaccgttaaggaaactgtgtgtcctcgcactactcagaagagcccggaagattgcgatttcaaggaggacggactggtcaagagatgcgtgggcaccgttattctgaatcaggctagggattccttcgatatctcctgcgacaaggacaatagaagaagcgcccggctcggaaacttctttcggaaagttaaggagaagattggcggaggattgaagaaagtagggcaaaagatcaaagactttctggggaacctggtgccgcgcaccgcgtcg

SEQ ID NO: 145350 - DNA, 510 bp, Artificial Sequence
  derived and/or modified sequence
atgaaaacccagcgcaatggtcctagcctcggaagatggtcactggtccttctcctgctcggactggtgatgccgctcgctatcgtggcgcaggtcctgtcctaccaagaggccgtccttcgggcaatcgacggaatcaaccagagatcgtctgatgccaacctgtaccgcctcctcgacctggacccaagaccaaccatggatggagatcctgacacccctaaaccggtttccttcactgtcaaggagacggtgtgtcctagaaccacccaaaagtcgccggaggactgcgatttcaaggaggacgggttggttaagcgctgtgtgggaactgtgatcctcaaccaggcacgcgattcgttcgacattagctgcgacaaggataaccgcagatccgcgcgccttggaaactttttccgaaaggtcaaggagaagattggaggcggcttgaagaaggtgggacagaaaatcaaggacttcctgggtaatttggtcccacggactgcctcc

SEQ ID NO: 145351 - DNA, 510 bp, Artificial Sequence
  derived and/or modified sequence
atgaaaacacagagaaacggaccttcactcgggagatggtcccttgtcctcctgcttctagggctagtgatgcccctcgctatagtcgcacaggtcctgagttatcaggaagccgttcttcgagccatcgatgggattaaccagcgatcaagtgatgccaatctctaccgcctactggatctggatcctcggccaacaatggatggagatcctgatactcccaaacccgtgtccttcactgtcaaagaaactgtttgtcctagaacaactcagaaatcgccagaagattgtgattttaaagaagatgggctggtgaaaaggtgcgtagggacagtgatcctcaatcaagctagggattcctttgatatctcctgtgataaagataataggcggagtgcaagactcggaaacttcttcaggaaagtgaaagaaaaaataggaggaggacttaaaaaggtcggacaaaagatcaaagatttcctagggaatctggtgcctcgcactgctagt

SEQ ID NO: 145352 - DNA, 510 bp, Artificial Sequence
  derived and/or modified sequence
atgaaaacccagaggaatggaccatctctgggtcgctggtctctggtgctcttgctgctcggactcgtgatgcccctggcaattgtcgcgcaggtgctgtcctatcaggaagctgttctgagagctatcgatggtatcaaccagaggtcttcagatgctaacttgtatcgcctgctggacctcgatcctaggcccacaatggatggtgacccagacacccctaagcccgtgtcctttactgttaaggagactgtgtgccccaggaccacacagaaatcccctgaagactgtgatttcaaagaagacggtctcgtgaagagatgcgtcggcacagttatcctcaatcaagcacgcgattctttcgatatcagttgtgataaagacaacaggaggtcagcccgcctgggaaatttctttcgcaaagtcaaggaaaagatcggcggaggtttgaagaaggtcggccaaaagattaaagacttcctgggtaacttggtgccccgcacagctagt

SEQ ID NO: 145353 - DNA, 510 bp, Artificial Sequence
  derived and/or modified sequence
atgaaaacccagaggaacggtccttcactcggcagatggtccctggtgctcctgctgctcgggctggtcatgccactcgcaattgtggcccaagtcctgtcgtaccaagaggcggtgttgcgagccattgacggaatcaaccagcggtcctccgatgccaatctctacagactcctggacttggacccacgcccaactatggatggcgatccggatacgccgaagccggtgtcgttcactgtcaaagaaacggtctgcccccgcaccactcagaagtcgccggaggactgcgacttcaaggaggacggactcgtgaagaggtgtgttggtaccgtgatcttgaaccaagcgcgtgactcgttcgatatctcgtgcgataaggacaaccgtcggtcagctagactcggaaacttcttccgcaaggtgaaggagaaaatcggcgggggactcaagaaggttggacagaaaatcaaggacttcctggggaatctggtcccccggactgcgtcg

SEQ ID NO: 145354 - DNA, 510 bp, Artificial Sequence
  derived and/or modified sequence
atgaagacgcagcgaaacggacctagcttaggacgttggagcttagtgcttttgttgctcggtctcgtgatgccactggccatcgtggctcaagtcctctcgtatcaggaggcagtcttacgggctatagacgggattaatcagcgaagctcagacgctaacttatacaggctgttggacttggaccctcgaccaaccatggatggtgacccagatacccccaaacccgtgagttttaccgtcaaggaaacggtgtgcccaagaacgacacaaaaatcaccggaggactgcgatttcaaggaagacgggttggttaagaggtgcgttgggactgtgattctaaaccaagccagagactctttcgacatcagctgcgataaggataaccggcggagcgcacgacttggcaacttctttagaaaagtcaaggagaagatcgggggcgggctaaagaaggtgggtcagaagatcaaggacttcctagggaacctcgttcctaggacagccagc

SEQ ID NO: 145355 - DNA, 510 bp, Artificial Sequence
  derived and/or modified sequence
atgaaaactcaaagaaatggacctagcctgggacggtggtccctcgtgctgctccttctcggactggtgatgccccttgccattgtcgctcaagtcctttcgtaccaagaagcagtgctgagggctatcgacggaatcaatcagcggtcgtcggacgccaacctctatcgcctcctggacctcgacccaagacctaccatggatggagatccggacactcctaagccggtatccttcactgtgaaggagactgtgtgccctcgcaccactcagaaatctcctgaagattgcgacttcaaggaagatggcttggttaaaaggtgcgtgggaaccgtgatcctgaaccaggcgcgggatagctttgacatcagctgcgacaaggataatagacgctcggcccggctgggcaatttcttcagaaaagtcaaggagaagattggaggaggcctcaagaaggtggggcagaagattaaggactttctgggtaatcttgtcccacggaccgcatca

SEQ ID NO: 145356 - DNA, 510 bp, Artificial Sequence
  derived and/or modified sequence
atgaaaactcaacgcaacggccccagcttgggtcgatggtccctcgtccttcttctgctggggctggtcatgcctctcgccattgtggcccaggtactgtcttatcaggaggcggtgctccgggccatagacggcattaatcagaggtccagtgatgccaacctttaccggcttttggacctcgatcctcggcccacgatggatggagatccggacacccccaagcctgtctcctttaccgtcaaggagaccgtttgcccacgcacgacccaaaagagtcctgaggattgcgacttcaaggaggatgggcttgttaaaaggtgtgttgggactgtcattttgaatcaggcgcgagacagttttgatataagttgtgataaagacaacaggcggagcgccagactcgggaactttttccggaaggtcaaggaaaagataggaggagggttgaaaaaggtagggcagaaaatcaaagacttcctgggaaatctcgtgcctcgcaccgccagc

SEQ ID NO: 145357 - DNA, 510 bp, Artificial Sequence
  derived and/or modified sequence
atgaaaacgcaaaggaacggaccctctctgggcaggtggtcccttgtacttttgctgctgggactggtcatgcctctggccatcgtggcacaggtgctaagttaccaagaagctgtgttaagagccattgacggcatcaatcagcgatccagcgatgctaatctatatagactcctcgacttggatccgaggcccactatggatggggacccagacacccctaagcctgtttctttcacggtgaaagaaacggtttgccctaggacaacacagaaatccccagaggattgtgactttaaggaggacggtctcgtgaagcgatgcgtaggcacagtgattctgaaccaagctagggactcctttgatattagctgtgataaggataacagaaggtccgcccgcctgggcaacttcttcagaaaagtaaaagaaaaaatcggcggaggcctgaagaaggtgggacagaaaatcaaagacttccttgggaatctcgtacccagaaccgccagt

SEQ ID NO: 145358 - DNA, 510 bp, Artificial Sequence
  derived and/or modified sequence
atgaaaacacaaagaaatggaccaagtttaggtagatggtcattagtattattattattaggattagttatgccacttgctatagtagctcaagtacttagttatcaggaagctgttcttcgagcaattgatggaattaatcaacgatctagtgacgctaatctttatagacttttagatttagatccaaggccaacaatggatggagatccagatacaccaaagcctgtatcattcacagttaaagaaacagtctgcccacgaacaactcaaaaatctccagaagattgtgattttaaagaagacgggttagttaagagatgtgttggaacagttatattaaatcaagcaagggattcatttgacatttcgtgtgataaggataatagacgatcagcaagattaggaaattttttccgaaaagtaaaagaaaaaataggaggtggattgaaaaaagttgggcaaaaaatcaaagattttttaggaaaccttgttccacgaactgcttct

SEQ ID NO: 145359 - DNA, 510 bp, Artificial Sequence
  derived and/or modified sequence
atgaaaactcagagaaacggaccaagcctgggacggtggtcacttgtgctgcttctccttggattggtgatgcctctcgcaatagtggcccaagtgctgagctaccaagaagccgtgctgagggccatcgatggtatcaaccaacgctcgtcggacgcaaacctctaccggcttttggacctggatccaagaccaaccatggacggagatcctgacacccctaagcccgtgtcgttcactgtcaaggaaactgtctgcccacggacgactcaaaaatcgcctgaagattgcgatttcaaggaggacgggctcgtgaagcgctgtgtgggaaccgtgattctgaatcaagcccgagattccttcgatatcagctgtgataaggacaaccggagatcagctagactgggtaactttttccgtaaggtcaaggagaagatcggcgggggcctgaaaaaggtggggcagaagatcaaggacttccttggaaacctggtgccaagaacggcgagc

SEQ ID NO: 145360 - DNA, 510 bp, Artificial Sequence
  derived and/or modified sequence
atgaagactcagcgcaacggtccttccctcggccggtggtccctcgtgttactccttctgggactcgtgatgccgctcgctattgtcgcccaggtgctgagttaccaggaggctgtcctccgtgccattgacggtatcaaccagcggtcttctgatgctaacctctaccgcctgctcgacctcgacccccgtcctacgatggatggtgacccggacactcccaaacccgtctccttcactgtgaaggagaccgtgtgcccccgcaccacgcagaagtctcccgaagactgtgacttcaaggaggacggcctggtgaagcgctgcgtcgggaccgttattctgaaccaggcccgcgattctttcgatatttcgtgcgacaaggacaacagacggtcggctcgcctaggaaacttctttcgcaaggtcaaggagaagatcggtggtggcctcaagaaggtcggtcagaagatcaaggattttctaggcaacctcgtaccgcggaccgcctct

SEQ ID NO: 145361 - DNA, 510 bp, Artificial Sequence
  derived and/or modified sequence
atgaaaactcaaaggaacggcccctcactcggcaggtggagcttggtactgttgctcctcggtctggtgatgccactcgcgatcgtggcacaggttctttcgtaccaggaagcggtgctgagagcgatcgatggtatcaatcaacgcagctcagacgctaatttgtacagactgctcgacctggaccctagaccgaccatggatggggacccagacaccccgaagcccgtctctttcactgtcaaggaaacggtgtgtccacggactacccagaaatctccagaggactgcgatttcaaagaggatggcctggtgaaacgttgcgtgggcaccgtcattctgaatcaagcccgggactcctttgacatcagctgcgacaaggataaccggcgctccgccaggctcggcaacttcttcaggaaggtgaaagaaaagatcggagggggactcaagaaggttggtcagaagatcaaggactttctgggaaacctggtgcctcggaccgcctcc

SEQ ID NO: 145362 - DNA, 510 bp, Artificial Sequence
  derived and/or modified sequence
atgaaaactcaacggaatgggccgtctctgggacgatggtcactggtgctgttgcttctcgggctggtgatgcctctggcaatcgttgcacaggtgctttcgtaccaagaagccgtgctcagggccattgatgggattaaccaaaggtcctcggacgcaaatctctacagactgctggaccttgatcctcgtcctaccatggacggtgatccagatacgcctaagcctgtgtccttcactgtgaaggagactgtatgccccaggaccacccagaagagccctgaagattgcgactttaaggaggacggtcttgtgaaaaggtgtgttggcactgtgattctcaatcaggcacgggattcgtttgatatatcatgtgataaggataacagacgcagcgccagactggggaacttcttccggaaagtgaaggagaaaatcggtggcggactgaagaaggtgggtcagaagataaaggactttctcgggaatctcgtgccacgaaccgcttcg

SEQ ID NO: 145363 - DNA, 510 bp, Artificial Sequence
  derived and/or modified sequence
atgaagacccaaagaaatggcccttcacttggcagatggtccctagtcctgctactgctcgggctggtcatgcctctcgctattgtggcccaggtcttgagttatcaggaggccgtactaagagccattgacggcatcaatcaaagatccagtgacgccaatctataccgccttctggacttggacccaaggcctaccatggacggcgatcccgatacccctaagcctgtgtccttcacagtcaaggaaaccgtgtgccctagaacaacacagaaaagtccagaagattgcgactttaaggaggatggcctggtgaagagatgtgtgggcacagtcatcctcaaccaagctagagattctttcgatatttcctgcgacaaggacaacaggaggtccgctcgcctgggtaatttttttcggaaggtaaaagagaaaatcggaggaggtctgaagaaagtgggccagaaaataaaagactttctgggcaacctcgttccaaggacagctagc

SEQ ID NO: 145364 - DNA, 510 bp, Artificial Sequence
  derived and/or modified sequence
atgaaaacgcaacgtaatggtccgtcgttaggtcgttggtcgctagtactactactattaggtctagtaatgccgctagcgatagtagcgcaagttctatcgtatcaagaagcggtattacgagcgatagatggtataaatcaacgatcgtcggatgcgaatctatatcgtctattagatttagatccgcgtccgacgatggatggtgatccggatacgccgaaaccggtatcgtttacggttaaagaaacggtatgtccgcgtacgacgcaaaaatcgccggaagattgtgattttaaagaagatggtttagtaaaacgttgtgtaggtacggttatactaaatcaagcgcgagattcgtttgatatatcgtgtgataaagataatcgacgttcggcgcgactaggtaatttttttcgtaaagttaaagaaaaaataggtggtggtttaaaaaaagtaggtcaaaaaataaaagattttctaggtaatctagtaccgcgaacggcgtcg

SEQ ID NO: 145365 - DNA, 510 bp, Artificial Sequence
  derived and/or modified sequence
atgaagactcagagaaacggcccatccctcgggagatggagtctggtgcttttactcttggggttggtcatgcccctggccatcgtggcgcaggtattatcgtaccaggaggcagtactccgggcaatcgatgggattaaccagcggtccagtgacgccaatttgtatcggctactggatctcgatccccggcctaccatggacggcgacccagataccccgaaacccgtgtcctttaccgtcaaggagaccgtctgccctcggaccacccagaaaagtcccgaagattgcgatttcaaggaggacggtctggttaaacgctgtgttggcaccgtgattttgaaccaggctcgtgattcttttgacattagctgtgataaggacaaccgccgttccgcgcggctgggcaacttttttcgaaaagttaaggagaagataggtggtgggctgaaaaaggtcggacagaaaataaaggactttctcggcaatctagtgccacgaactgcgtcc

SEQ ID NO: 145366 - DNA, 510 bp, Artificial Sequence
  derived and/or modified sequence
atgaagactcaaagaaacggcccgtctctgggaagatggagccttgtcttgttactgttgggcttagtaatgccgctagctatcgtagcgcaggtgttatcttatcaagaagcagtcctgagggcgatcgatggtataaatcaaagaagcagcgatgcgaatttatacagattattggacctggatcctcgcccgacgatggacggagatccagatacgcctaaaccggttagctttacggtcaaagaaactgtctgtccgagaacaacgcagaaatcaccggaggattgtgattttaaggaggatggattggtcaaacgctgtgtgggaacagtgattctgaatcaggctagagattcttttgatattagttgtgataaggataataggaggagcgcacgtctgggcaatttctttcgaaaagtcaaggagaagataggaggcggccttaaaaaagttggtcagaagattaaagattttcttggtaatctcgtgcctcgtacagcaagc

SEQ ID NO: 145367 - DNA, 510 bp, Artificial Sequence
  derived and/or modified sequence
atgaaaacccagcgcaacggaccctccctcggacgctggtcgctggtgctgctgctgctggggctggtgatgccactggccattgtggcacaggtgttgtcgtaccaggaagccgtcctgcgcgcaattgacggaatcaaccagaggtcctcggatgctaacctgtacagactcctggacctggatccgcggccaaccatggatggggaccccgacacgccgaagcccgtcagcttcaccgtgaaggaaaccgtgtgtcctaggaccactcagaagtcgccggaggattgtgacttcaaagaggacggactggtcaagcggtgtgtgggcaccgtgatccttaatcaagcgcgcgactcctttgacatctcctgcgataaggacaacagacgctcggctagactgggcaatttcttccggaaggtgaaggaaaagatcgggggaggcctcaaaaaggtgggccagaagataaaggacttcttgggaaacttggtgccgcggaccgcgtcc

SEQ ID NO: 145368 - DNA, 510 bp, Artificial Sequence
  derived and/or modified sequence
atgaaaacgcagcgcaacgggccctcattagggagatggagtttggttcttctcctactcgggctggtcatgccgttggcaatagtggcgcaggtgttgagctaccaggaagctgtactgagggccattgacgggataaatcagagaagctcagatgctaacctgtataggctgctagaccttgaccccaggccaaccatggacggcgatcccgacactcccaagccggtctcctttactgtaaaggagactgtgtgcccgcgcaccacacagaaaagtcccgaggattgtgacttcaaagaagacggacttgtgaaaagatgcgtcggtactgttatcctgaatcaagccagggactcatttgatatctcctgtgataaggacaatagacgttctgctcgactgggcaatttttttagaaaggtaaaagagaagataggcggtggcttgaaaaaggttggtcagaagattaaggacttcctcgggaatctcgtgcccagaaccgcttct

SEQ ID NO: 145369 - DNA, 510 bp, Artificial Sequence
  derived and/or modified sequence
atgaaaacccagaggaacggaccctcacttggccgttggagccttgtcctcctgctgcttggtctcgtaatgccacttgccatcgtggctcaggtgctttcatatcaggaggcagttctgagggccattgatggcattaaccaaaggtctagtgatgccaacctgtacagattgctcgatctggaccccaggcccactatggatggggatcctgacactccaaagccagttagttttacggtgaaggagaccgtgtgtcctaggaccactcagaaaagtcctgaagattgcgattttaaagaagacggacttgtgaagcgctgtgtggggactgtcattttgaatcaagcccgggactcttttgatatttcatgcgacaaggataacagacggtccgctcgtctgggtaactttttccgtaaagtgaaggagaagatcggagggggactgaaaaaggtaggccaaaaaataaaggactttctaggtaatttggttccgcggaccgcctcc

SEQ ID NO: 145370 - DNA, 510 bp, Artificial Sequence
  derived and/or modified sequence
atgaagacccaacgcaatggtcccagtctcggacggtggtctctcgtgcttctgctactcggactcgtgatgccattggctattgtggcccaggtcctgagctatcaggaagctgtgctgcgcgcaatcgacggaatcaatcagagaagctctgacgcgaacttatacaggctgctggacctagacccccggcccacaatggacggcgatcccgacacccccaaacctgtgagtttcacagtgaaggagaccgtctgtccccggactactcaaaaatctcctgaagattgcgactttaaggaggatggcctggtcaagcgatgcgttgggactgttattttaaatcaggcccgggacagctttgacatttcatgtgacaaggataatcggaggagcgcgagactcggcaacttttttagaaaggttaaagagaaaatcggcggtggtctcaagaaagtcggacagaagatcaaagatttccttggaaacctagtgccccggactgccagt

SEQ ID NO: 145371 - DNA, 510 bp, Artificial Sequence
  derived and/or modified sequence
atgaagacccagagaaatggtccctctctcgggcgatggagtctcgtgcttcttctgcttgggctggtcatgccattagctatcgtggcccaagtgctgagctatcaggaggctgtccttagagccattgacgggattaaccaaaggtctagcgacgctaatctgtatcgactattagatttggatccgaggcccaccatggacggagacccagatacccccaaacctgttagctttacagtgaaagagaccgtatgtcctaggactacacaaaaatcgccagaggactgcgattttaaagaggacgggttggtgaagcgctgtgtggggacggtaatactaaaccaggctcgagacagtttcgacatctcctgcgataaagacaacaggcggtcagctcgtcttggtaatttttttcgcaaagtaaaggaaaaaatcggtggcggactcaaaaaggtcggtcaaaagatcaaagactttctgggcaacctggtccctcgcactgcctcc

SEQ ID NO: 145372 - DNA, 510 bp, Artificial Sequence
  derived and/or modified sequence
atgaagactcagcggaacgggccttccctggggcgctggtccctggttctgctgctgctgggactggtgatgcccctggctatcgtggctcaggtcctttcctatcaggaggcagtgcttcgagcaattgatggaataaaccagagaagcagcgatgcaaatttgtataggctgctggatttggacccaagacctaccatggatggagatccggatacaccgaagcctgtttccttcaccgtcaaggagaccgtgtgtcctagaactactcaaaagtctcctgaggattgtgatttcaaagaggacggcctggtaaaacgctgcgttgggacagtgatcctgaatcaagcccgggattctttcgacattagttgcgataaggacaatcgaaggagcgccagactggggaatttttttcggaaggtgaaagagaaaatcggtggggggctgaagaaagtcgggcaaaaaatcaaagactttctggggaacctcgtcccgcggacagcttca

SEQ ID NO: 145373 - DNA, 510 bp, Artificial Sequence
  derived and/or modified sequence
atgaaaacgcagagaaacggcccctctcttggaaggtggagccttgtgctcctcctgttgggactggtcatgccgctggcgatcgtggctcaagtcctgagctaccaggaagcagttctccgcgctatcgatgggatcaatcagcggtcgtctgatgccaatctgtaccgcctgcttgaccttgatccgcgcccgacgatggacggcgacccagacactccaaaacctgtgtcgtttaccgtcaaggagactgtgtgcccgcgcactacccagaagtcgcctgaagattgcgacttcaaggaggatggcctcgtgaaacgctgcgtgggaactgtgatcttgaaccaagcccgggactccttcgacatcagctgtgacaaagacaatcggaggtccgcgcgcctggggaacttcttccgaaaggtgaaggaaaagatcggcgggggcttgaaaaaagtgggtcaaaagattaaggatttcctgggaaacctggttccacgcaccgcgtct

SEQ ID NO: 145374 - DNA, 510 bp, Artificial Sequence
  derived and/or modified sequence
atgaaaacccagagaaatggaccctcgcttggacggtggagcctcgtccttctcctcctggggctggtgatgccactggcaatcgtggcacaggtgctgtcctaccaagaagcggtgctgagagcaattgatggcattaaccaacgatcgtccgacgccaatctgtatcgcctgcttgatctcgatcctaggcctactatggatggtgaccccgatactccaaaacctgtgtcgtttactgtgaaagaaaccgtctgcccacgaaccacccaaaagagtccagaggactgtgatttcaaagaagatggtcttgtgaagcggtgtgttggaaccgtcattctgaatcaggcacgggatagctttgatatatcctgtgataaggacaacaggcggtcggccaggcttggaaatttcttcaggaaggtgaaggaaaagatcggtggaggtttgaaaaaagtgggacagaaaatcaaagacttcctcgggaatctggtccctaggactgcttca

SEQ ID NO: 145375 - DNA, 510 bp, Artificial Sequence
  derived and/or modified sequence
atgaagactcagcggaatggtccttccctgggccgctggtcattggtcctcctcctcctgggcctggtcatgcctctggcaattgtcgcccaagttctgtcttatcaggaagcagtgctgcgggcaattgatgggataaaccagaggtcaagtgatgccaatctctatcgcttgttggatcttgaccctaggccgaccatggacggcgacccagatacccccaagcccgtgtcctttacagtaaaagaaaccgtgtgtccacggaccacgcaaaagtcccccgaggattgtgactttaaagaggacgggctggtgaagcgctgcgtgggcaccgtgattctgaatcaagctcgcgattctttcgatatatcctgcgacaaggacaacaggagatcagctcggctggggaacttcttcaggaaggtgaaggaaaaaattggaggcgggctgaagaaagttggccagaaaatcaaagacttcttgggcaatctggtccctagaacggccagt

SEQ ID NO: 145376 - DNA, 510 bp, Artificial Sequence
  derived and/or modified sequence
atgaagacacagcgcaacggcccctccctcggcaggtggagcctggtactcttgctcctgggcctggtcatgccacttgctattgtggctcaggtgttgtcttatcaagaggctgtcttgagggccattgacggtatcaaccaacgttcttctgacgccaacctgtaccgcctgctggatcttgatccacgtccaactatggacggtgaccccgacactccaaaaccagtctcattcaccgtcaaggaaacagtatgccccaggaccacacagaaaagtcccgaggactgcgatttcaaggaggatggtttggtcaagcgctgcgtgggaaccgttatcctcaatcaggctcgcgattctttcgacatctcctgcgacaaggataataggagatcagccaggcttggtaatttcttccgcaaggtcaaagagaagattggtggcggactcaaaaaagttggtcaaaaaatcaaggacttcctgggcaacttggttccacgtactgctagc

SEQ ID NO: 145377 - DNA, 510 bp, Artificial Sequence
  derived and/or modified sequence
atgaagactcagcgcaacggaccgtcgctgggacgctggtcactggtgttgctcctgctgggtctggtcatgccactggcaatcgttgcccaagtgctttcataccaggaggccgtcctgagggcgattgatgggattaaccagcgttcttccgatgctaacctgtacagactcctcgacctcgacccgcgtccgactatggacggcgatccggacaccccaaagccagtgtcattcaccgttaaggaaaccgtgtgcccgcggactacccagaagagcccggaagactgcgacttcaaggaagatggccttgtgaagcgctgcgtgggcactgtgatcctgaatcaggcccgcgactcgttcgatatcagctgtgacaaagacaaccggagatcggccaggctcggaaatttcttccgcaaggttaaggaaaaaatcggaggaggactgaagaaggtcggccaaaagatcaaggattttcttggcaatctggtgccgcgcaccgcttcc

SEQ ID NO: 145378 - DNA, 510 bp, Artificial Sequence
  derived and/or modified sequence
atgaagacccagcggaacggcccctcattgggacggtggagtctcgtgctactccttttaggactggtaatgcccctggcaatcgtggctcaggtcctgtcctaccaggaagctgtattgcgggcgatcgacggtatcaaccagcggagcagcgacgccaacctgtaccgccttttagatttggatcctagaccaacaatggacggtgacccagatactccaaaaccggtcagcttcaccgtaaaggagacagtctgccctaggaccactcagaagtctcctgaggactgcgactttaaagaagacggactcgtgaagcgctgtgtggggaccgtaatccttaaccaggcgagagatagctttgacatttcctgtgacaaagataaccgacggtccgcccggctggggaacttttttaggaaagtcaaggaaaaaatcggtggaggactgaagaaggtgggccagaagatcaaagatttcctgggaaatctggtgcccaggaccgcctca

SEQ ID NO: 145379 - DNA, 510 bp, Artificial Sequence
  derived and/or modified sequence
atgaaaactcaaagaaatggtccatccctgggtagatggtcgctcgttcttcttctgttgggcctggtcatgcctctggccatcgtcgcccaggtgttgagctaccaagaggcagtgctccgcgcgattgacggtattaaccagagaagcagcgacgcgaatttgtaccggctcctggatctcgatccacggccgactatggatggagatcccgacacgcctaaacctgtctcctttaccgtcaaggaaactgtgtgcccacgaaccactcaaaaatcaccagaggactgtgacttcaaggaagatgggcttgtgaaacggtgtgtgggtaccgtgatcctgaaccaagcacgggattcctttgacattagctgtgataaagacaatagacgcagcgcacggcttggtaacttctttagaaaggtgaaagagaagattggaggtgggctgaagaaggtcggtcagaagataaaagatttcttggggaacctggtgcctcgaaccgcatcc

SEQ ID NO: 145380 - DNA, 510 bp, Artificial Sequence
  derived and/or modified sequence
atgaaaacccagcgaaacggaccttcactcgggcggtggagcttggtcttgttgctgcttgggttggtgatgcccctggctatcgttgcccaggtgctttcctaccaagaagccgtcctgcgcgcgatagatggtatcaaccagcgcagctcggacgccaatctctaccggctgttggatttggacccgcgcccgacgatggacggtgatcctgacactccgaaacccgtgagcttcaccgtgaaggaaaccgtgtgtccaaggactacgcagaagtccccggaggactgcgatttcaaggaggatggcctggtgaaacgatgcgttggaaccgtgatcctgaaccaagcgcgtgactcgttcgacatttcctgcgacaaagacaatagaaggtcggcacggctcggaaactttttccggaaggtcaaggaaaagatcggcggagggctgaagaaggtcggacaaaagatcaaggattttctcggtaacctggtgccaagaactgcttct

SEQ ID NO: 145381 - DNA, 510 bp, Artificial Sequence
  derived and/or modified sequence
atgaagacccagcggaatgggccttctttagggagatggtcactagttctgctcctgctaggactggttatgccccttgccatagtcgcccaggtgctgagctaccaagaggccgtgctgcgggccatcgatggcattaatcagagaagcagtgacgccaatctgtaccggctgctggatttggatccgaggcctaccatggacggtgaccctgatactcccaaaccagtctcctttaccgtcaaggagacggtttgccccagaaccacccagaagagccccgaggactgcgacttcaaggaagacggcctcgtaaagcgatgtgtaggaaccgtgattctcaaccaagctcgggactccttcgacatatcttgcgataaggacaaccgacggagtgcaagactcgggaacttctttagaaaggtgaaggaaaaaatcgggggtggtctgaagaaagtggggcagaagatcaaagacttcctgggaaaccttgtgccccgaactgctagc

SEQ ID NO: 145382 - DNA, 510 bp, Artificial Sequence
  derived and/or modified sequence
atgaaaacgcagcgcgatggacactcactggggagatggtccctggtcctgctgcttctgggcttggtgatgccgttggcaatcatcgcacaggttctctcgtataaggaggcagtcctccgggcaatcgacggaatcaatcaacgctcatcagacgccaacctctaccgcttgctggacctcgatcccaggccgaccatggatggtgacccggacaccccaaaacctgtgtcgttcactgtgaaggaaaccgtctgtccgcgcaccactcagcagtctccagaagattgcgacttcaagaaggacggactggtgaaaagatgtatgggtactgtcaccctcaatcaagcacgcggatcgttcgacatttcgtgcgacaaggacaataaacggtttgccctgctgggggacttcttcaggaagagcaaggagaagatcggaaaggaattcaagcgcattgtgcagcggatcaaagatttcctgagaaatctggtcccccgcactgagtcc

SEQ ID NO: 145383 - DNA, 510 bp, Artificial Sequence
  derived and/or modified sequence
atgaaaacgcagagagatggtcattcgctggggcggtggtctttggtgctccttcttcttgggctcgttatgcctctcgcaataatcgcgcaggtcctttcgtacaaggaagccgtccttagagcaatcgacgggattaaccagcgctcatccgatgccaacctttaccgacttctggatctcgatccgaggcctactatggacggggatcctgatacccccaagccagtgtcgttcaccgtgaaggaaacggtctgtcctcgaacgactcagcaaagcccagaggactgtgatttcaagaaggatggcctcgtcaagaggtgtatgggtactgtgactcttaaccaagccaggggatcctttgatatttcatgtgacaaggataacaagcgctttgccctgctcggagatttctttagaaagtccaaggagaaaataggaaaggagttcaaacggatcgtgcagcggattaaggatttcctgcgtaacctggtccctcgaactgaaagc

SEQ ID NO: 145384 - DNA, 510 bp, Artificial Sequence
  derived and/or modified sequence
atgaagacacagagagatggacactctctaggtcggtggagtctcgtcttgttgctactgggccttgtcatgccgctggcaattattgcccaggtgttgagttacaaggaggccgtgctccgggctatagatggcatcaaccagcggtcatcggacgcaaacctctacaggttactggatctggatccccgccctactatggatggcgatcctgatacaccaaagcccgtttccttcacagtcaaagagactgtgtgtccaagaaccacccagcagtcaccagaggattgtgacttcaagaaagacggccttgtaaaaaggtgcatggggacagtgaccctgaatcaagccagaggaagttttgacatcagctgcgacaaggataacaagaggtttgcgcttttgggcgacttcttcagaaagagtaaggaaaaaatcggaaaggaattcaagaggattgtgcagcgtatcaaggacttcctacggaacctcgtgccccgcactgaatca

SEQ ID NO: 145385 - DNA, 510 bp, Artificial Sequence
  derived and/or modified sequence
atgaagacccagagggatggacattctctgggccgttggtctctggtcttgcttctgttaggccttgtgatgccattagctatcatcgcacaggtgttgagctacaaagaggctgttcttcgggctattgacggcattaaccagcgaagctcggacgccaatctatacagactcctggatttggatccccgcccaacaatggacggggatcctgacacgccaaaacccgttagttttacggtcaaagagactgtctgtccccggacaacccagcaatcccctgaggattgtgatttcaaaaaagatgggctggtgaagcggtgcatgggtaccgtcactctgaaccaggctcggggtagtttcgatatcagttgtgataaagacaataagcggttcgctttgctcggtgacttcttccgaaagtcaaaggaaaagattggcaaggagtttaaacggattgtacagaggattaaggactttttaagaaacttagtaccccgtactgagtct

SEQ ID NO: 145386 - DNA, 510 bp, Artificial Sequence
  derived and/or modified sequence
atgaagacccagcgggacggtcattccctgggacgatggtccctggttttgctgttgctcgggctagtcatgccccttgcgattatcgcccaggtcctgtcgtataaggaggctgtattgcgtgcgatcgacggtatcaaccagcgaagcagcgacgcaaacctgtaccgccttctcgacctggatccccgtcccaccatggatggtgatcccgacacacccaagcccgtcagcttcaccgtcaaggagactgtctgtccacgcaccacccaacaatcccccgaggactgcgatttcaagaaggatggcctcgtcaagcgttgcatgggcacggtcaccctcaatcaggctcggggttctttcgacattagctgcgataaggataacaagcggtttgccctcctcggagacttcttcagaaagtctaaggagaagatcggtaaggagttcaagagaatcgtccaacgaatcaaggacttcctgcggaacctcgtaccccgtaccgagtct

SEQ ID NO: 145387 - DNA, 510 bp, Artificial Sequence
  derived and/or modified sequence
atgaagacacagcgggatggacattctctgggacgctggtccctagtattgcttctactagggctggtcatgcctttggctatcatagcacaggtgctctcctataaagaagccgtccttagagctattgacgggataaaccagagatcctcagatgcgaacctttatcgattactggatttggatccccgccccactatggacggggatcctgatactcccaaacccgtgtccttcactgtaaaagaaactgtgtgcccaagaacaactcaacagtctccagaggattgtgacttcaagaaagatggactcgtgaaacgatgcatgggaacagtaacactcaatcaggctagaggaagttttgacatatcatgcgacaaagataataaaaggttcgcccttttaggggatttcttcagaaaaagtaaagaaaagatagggaaagaattcaaacggattgtacagagaattaaagattttctccgcaatctcgtccctcgcactgaatct

SEQ ID NO: 145388 - DNA, 510 bp, Artificial Sequence
  derived and/or modified sequence
atgaaaacacagagagacgggcattcgttaggacgatggtcactcgtgctgctacttctgggcctggtgatgcccctcgccattatcgctcaagtgctttcgtacaaggaggccgtgctgagggccatcgacggtattaatcagcggtcttccgacgcgaacctgtaccgcctgctggaccttgatccacgccccaccatggatggagaccccgacaccccaaagcccgtgtcttttaccgtcaaggagactgtgtgccccaggacgacccagcaaagccccgaggattgtgattttaaaaaagacgggctagtcaaacgatgcatgggaaccgtcactttgaaccaggcacgtgggtctttcgatatctcatgcgataaagacaacaaacggtttgcgctgttgggcgacttttttcggaagtccaaagaaaaaatcgggaaagaatttaaacgtatcgtgcaacgcattaaggatttcctgagaaatttggtgcctcgcaccgagtcc

SEQ ID NO: 145389 - DNA, 510 bp, Artificial Sequence
  derived and/or modified sequence
atgaagacccaaagagacggccatagtttggggagatggagcctggtcctacttctcctgggcctggtgatgcctttggctataattgcacaggtgctttcttataaagaggccgtcttgagagccatagatgggataaaccaaaggtcttccgacgcaaatttgtatcgtttattggatttggatccgcgtccgacaatggacggagaccccgatacgccgaaacccgtatctttcacagtcaaagaaactgtatgcccacggacaacgcaacaatcaccggaagattgtgatttcaagaaagatggccttgtaaagcgctgcatggggacggtcacactcaatcaggcccgcggcagttttgacatctcttgtgacaaagataataagcggttcgcactgctgggcgatttttttcgtaaatcaaaagaaaaaataggaaaagagtttaagaggattgtgcagaggattaaagattttcttaggaatcttgtgccgaggactgaaagt

SEQ ID NO: 145390 - DNA, 510 bp, Artificial Sequence
  derived and/or modified sequence
atgaagacacagcgcgacgggcatagcctgggccggtggtcactggtgctgctgcttttggggcttgtcatgcccttggccattatcgcacaagtactctcttacaaagaggcggtcctccgggctatcgatggcatcaaccagcggtccagtgacgctaatctgtacagactgctggatctcgatccgcggcctacaatggacggcgacccagacacacctaagccggtgtcctttacagtgaaagagaccgtgtgcccaaggactacgcagcagagtcctgaggattgtgatttcaagaaagacggcttggttaaaaggtgtatgggaactgtaacgctgaatcaggcaaggggatccttcgacatttcttgcgacaaagacaacaagcggttcgccctgctgggcgacttttttcgaaagtccaaggagaaaataggcaaagagttcaagcggatcgtccagcgaatcaaagatttcttgaggaatctggtgcctcgaacggaaagt

SEQ ID NO: 145391 - DNA, 510 bp, Artificial Sequence
  derived and/or modified sequence
atgaagacacagcgggacggtcactcccttggccgatggtctctggtgctgctgcttctcggacttgttatgccgctagccataattgcccaagttctgtcctacaaagaagctgtactaagagccatagatggcattaaccagagaagtagtgatgccaatctgtatcgcctgctggacctcgaccccaggccgacgatggatggcgacccagatacacccaaacccgtttccttcacagtcaaggagaccgtgtgcccccgcaccactcagcagagtccggaagactgcgatttcaagaaggatgggcttgtgaagcgatgcatgggcactgtcaccctgaaccaagctaggggctccttcgacatcagttgcgataaagataataaacgtttcgcgctgctgggcgacttttttaggaagagcaaagaaaaaatcggcaaggagttcaaaagaattgtccagaggattaaagacttcttgagaaacctcgtgccgaggacagagagc

SEQ ID NO: 145392 - DNA, 510 bp, Artificial Sequence
  derived and/or modified sequence
atgaagactcagagggatggccactcgttaggccgatggagcctggtacttctgcttctcggcttagttatgcccctggccatcattgctcaggtgctgtcatacaaagaggcagtcctgagggctatagatgggataaatcagcgctcaagcgacgccaacctctaccggcttctcgatctcgatcctagacccacaatggatggcgaccctgacacacccaaacctgttagctttactgtgaaagaaactgtgtgcccgaggaccactcagcagtcccctgaggattgtgactttaagaaagacggactggtcaaacgctgcatgggcacagtcaccctgaatcaagccaggggaagtttcgacatcagctgcgacaaggacaacaaaaggtttgccctgcttggcgatttttttcgtaaaagcaaagagaagatcggaaaagaatttaaacggatcgttcagagaattaaagacttcctcaggaacctggttccgagaacagagagc

SEQ ID NO: 145393 - DNA, 510 bp, Artificial Sequence
  derived and/or modified sequence
atgaaaacccagcgggatgggcactccctgggaaggtggtcgctcgtactcctgcttctcggacttgtcatgccgcttgcgatcatcgcgcaggttctctcatacaaggaggcagtgctccgggctatcgacggtattaaccaaaggtcgtccgatgccaatctgtatagactgcttgatctggatcctaggccgactatggacggggatcccgacactccgaagccggtgtccttcaccgtgaaagaaacggtgtgccctagaaccacccagcaatcaccagaggactgtgacttcaagaaagacggtctggttaagagatgcatgggtaccgtcacgttgaatcaggcccgaggctcattcgacatctcatgcgataaagataacaagcggttcgcactcctcggcgacttttttcgcaagtccaaggagaaaatcggaaaggaattcaagcggatcgtgcagaggatcaaggatttcctgcgaaacctcgtgcctcgcactgaaagc

SEQ ID NO: 145394 - DNA, 510 bp, Artificial Sequence
  derived and/or modified sequence
atgaagacacagcgtgacgggcacagccttggaaggtggagcctcgtcctgctgttgttgggcctagttatgcctctggctatcattgcacaagtgctatcctacaaggaggctgttcttcgggcgatcgatggaatcaaccagcgatcatccgacgcaaatctttacaggctcctcgatctggacccgcggccaaccatggacggagaccctgataccccaaagccagtgagcttcactgtgaaagagacagtctgccctcgaacaactcagcagagccccgaggactgcgattttaaaaaggatgggctggtgaaacggtgtatggggactgtgacacttaaccaggcccgcgggtcattcgatatatcgtgcgataaagacaataaacgattcgcactgctgggtgattttttcagaaagtcaaaggagaaaattggaaaggagtttaagaggatcgtgcaacggattaaggacttcctccgtaacctagtgccaagaacagagtct

SEQ ID NO: 145395 - DNA, 510 bp, Artificial Sequence
  derived and/or modified sequence
atgaaaactcagagggatggacattctttgggaagatggtcactcgtgctcttgcttctgggattggtgatgccactggctatcatcgcccaggtgcttagctacaaggaggccgttttgcgcgctattgacggtatcaatcagagaagtagtgacgcaaatctttaccgcttgttggacctggacccacgtcccactatggacggagacccagacacacccaaacccgtctcttttaccgttaaagagacagtgtgcccaagaacaacccaacagtcccctgaagactgtgacttcaaaaaggacggactggtgaagcgctgtatgggaactgtaaccctcaaccaggcaaggggctctttcgacatctcctgtgacaaagataacaagaggttcgccttgttgggcgactttttccgtaagtccaaggaaaaaataggaaaagagttcaaacgcattgtacagcgtatcaaagactttctgagaaacctcgtcccaaggaccgaaagt

SEQ ID NO: 145396 - DNA, 510 bp, Artificial Sequence
  derived and/or modified sequence
atgaaaacgcaaagagacggacactctctgggacgttggtcgctggtgcttttgctcctcggtttggtcatgccacttgcaatcattgcacaggtgctctcatacaaggaggcagtcctcagggcaattgatgggattaaccagcgatcaagcgatgcaaatctgtacaggcttcttgatttggaccctcgccctaccatggatggagatccagatactccaaagccagtctccttcaccgtgaaggaaaccgtgtgccctaggactacccagcaatcccccgaggattgcgatttcaagaaggacggccttgtgaaacgctgtatgggaaccgtgaccttgaaccaggcaagaggttcgttcgacattagctgcgataaagacaacaagaggtttgcactcctcggagacttctttagaaagtcgaaggaaaagattgggaaagaattcaagcgaatcgtgcaaagaatcaaggactttttgcgcaaccttgttccccggactgaaagt

SEQ ID NO: 145397 - DNA, 510 bp, Artificial Sequence
  derived and/or modified sequence
atgaaaacccaacgcgacgggcactctctcggtcgctggagcctggttctgctgctcctagggttggtgatgccactggcaattatcgcgcaggttctaagctacaaagaggcggtgctgcgcgctatcgacggcatcaatcagcgcagcagcgacgctaatttgtaccgtttgctggatttggaccctaggccgactatggacggagaccctgatacccctaaaccagtgtcttttacggtcaaagagaccgtttgtcctcgaactacccagcaatctccagaggactgtgatttcaaaaaggacgggctggtgaaacgctgtatgggtaccgtcaccttgaaccaggcccgcggtagctttgatatttcttgcgataaggacaacaagcgctttgcgttgttgggggatttctttcgcaagagcaaggagaaaatcggaaaagaatttaaacgcattgtgcagcgaatcaaagattttctgcgcaacctcgtgccgcggaccgaatcc

SEQ ID NO: 145398 - DNA, 510 bp, Artificial Sequence
  derived and/or modified sequence
atgaagacacagcgggacggacacagcctgggcagatggtcactagtgctgctgctgctggggttggtgatgcccctcgccataattgcccaggtgctgagctacaaggaggcagtgctgcgggcgattgatggcattaaccagaggtccagtgatgctaatctgtatcgcctcttggacctggatccaagacccactatggacggggaccccgatacccctaagcctgtgtcctttactgttaaggagacagtatgcccgcggacgacacagcagtcccccgaggactgtgattttaagaaggacgggttagtgaagaggtgcatgggaacagtcacattgaatcaggccagaggtagctttgacatttcttgcgataaggataacaaaagatttgcactgttgggggacttctttaggaagtccaaggaaaagatcggtaaagagttcaagaggatagtacagcgtatcaaagacttcctgaggaatctggtccctcgaaccgagagc

SEQ ID NO: 145399 - DNA, 510 bp, Artificial Sequence
  derived and/or modified sequence
atgaaaactcagcgggatggccattcgttggggcgttggtccctcgtcctcctgcttctgggcctggtgatgcctctggcgatcatcgctcaagtgctctcgtacaaggaagccgtccttagagcaattgatggcattaatcaacggagctccgatgcgaatctctacagacttctcgaccttgacccccggcctactatggatggtgatcccgatacgccaaagccggtcagctttaccgtgaaggaaaccgtttgtcctaggaccacgcagcagagcccagaggattgcgacttcaaaaaggacggcctggtgaagcgatgtatgggtaccgtgactcttaaccaggctagaggctcgtttgacatttcatgtgacaaagacaacaaacgttttgcactgcttggggacttcttccgcaagtcaaaggagaaaataggtaaggagtttaagagaattgtgcaacgaatcaaggattttcttcgaaacttggtccccagaactgagtcc

SEQ ID NO: 145400 - DNA, 510 bp, Artificial Sequence
  derived and/or modified sequence
atgaaaactcagcgggatgggcattcactaggacggtggagtcttgttctcctattactggggctagtgatgccacttgcaataatcgcccaggtactgtcctataaagaagccgtgttaagagctattgatgggataaatcagaggtcttccgacgcaaacctttataggttacttgacctcgatcccaggcctacaatggatggggatcccgacacaccaaagcccgtgtccttcacagtgaaagaaactgtgtgtccaaggactacacagcagtctcctgaggattgcgattttaaaaaagatggactcgtgaaacggtgcatggggacggtcactctcaatcaggccagggggtccttcgatatatcgtgcgataaagataacaagagatttgcactcctcggagattttttccgcaaatccaaagagaaaataggaaaagaatttaaacggattgtgcagcgcattaaagactttctccgcaacctcgtgccccgcacagaaagt

SEQ ID NO: 145401 - DNA, 510 bp, Artificial Sequence
  derived and/or modified sequence
atgaaaacgcagcgggacggacactccctcggaaggtggtccctggtcttgctgctcctgggtctggtgatgcccctcgccatcatcgctcaggtgctgtcatacaaagaagcagtgcttcgggccatcgatggaatcaatcagcgtagctcagacgccaacctctaccggctgttggacttggacccaagacccaccatggacggagatccggatactcctaagccggtgtcgttcaccgtgaaggaaaccgtgtgcccacggacgacccagcaaagccccgaagattgcgatttcaagaaagacgggctggtgaagcgctgcatgggaaccgtgactcttaatcaggccagaggttcatttgacatctcatgcgacaaagacaacaagagattcgccttgctcggagatttcttccgcaagtctaaggaaaagataggtaaggagtttaagcgaattgttcaacggatcaaagacttcctgaggaaccttgtgccgcgcactgaatcc

SEQ ID NO: 145402 - DNA, 510 bp, Artificial Sequence
  derived and/or modified sequence
atgaagacacaacgcgatggtcattctctgggccgctggtcactggtccttttgctgctgggtctggttatgccactcgcaatcatcgcccaggtcctttcatacaaggaggctgtgctgagggctatcgatggcattaatcagcgctcatcagatgctaatctctacagactgctggaccttgacccacgcccaacaatggacggagaccccgacactcccaagcccgtttcttttacggtcaaggaaactgtctgcccaagaaccactcaacagtctcccgaagactgcgacttcaaaaaggacggtctcgtaaagcgctgtatgggcaccgttacccttaaccaggcccgcggtagcttcgacatctcttgtgataaggacaacaagagattcgccctcctgggtgacttttttcgcaaaagcaaagagaagataggaaaggagttcaaaaggattgtacagagaattaaagacttcctgagaaatttggttcccagaacagaatct

SEQ ID NO: 145403 - DNA, 510 bp, Artificial Sequence
  derived and/or modified sequence
atgaaaactcagagagacggacactcgctgggacggtggtcccttgtccttcttctcctcggacttgtcatgccgttggcgattattgcacaggtgcttagctacaaagaagccgtcttgcgtgctattgatggtattaaccagagatcatcggatgcaaacctttaccgccttctggatctggatcctaggccaactatggatggagatccagatacccccaagccagtgtcctttaccgtgaaagaaactgtgtgcccccgcactacccagcagtcaccagaagattgtgactttaagaaggacggcctcgtcaaaagatgtatgggtactgtgaccctgaaccaggcacggggttcattcgacatcagctgtgacaaggacaataagcgttttgcgctgcttggagacttttttcgcaaatcaaaggagaaaattggcaaggagtttaagaggatagtgcagaggattaaggatttcctgcgcaaccttgtcccaagaactgagtcg

SEQ ID NO: 145404 - DNA, 510 bp, Artificial Sequence
  derived and/or modified sequence
atgaaaacccagcgcgacggacactctctcggtcgctggtccctggttctgctactgctgggactggtgatgcctttagcaatcatcgcacaggtgttgagttacaaggaggctgtgctgcgagccatcgatggcatcaatcaacggtcttcagacgcaaatttgtaccgattactggacctcgatccacggcctacaatggacggagatccagacacacccaagccagtctcattcactgtcaaagagaccgtttgccctcgcacaactcagcaatcccccgaagattgtgacttcaagaaggatgggttggtgaagagatgtatggggacggtgaccttgaatcaggcccggggttcgtttgacatctcctgcgacaaggataacaagaggttcgccctgctgggagatttttttagaaagagtaaagagaaaatcggtaaggagtttaaacgtatagtgcagcgaataaaagacttcctcagaaacctggtgcctcgcaccgaatcc

SEQ ID NO: 145405 - DNA, 510 bp, Artificial Sequence
  derived and/or modified sequence
atgaagactcagagggacggacactctctagggcgatggtcactggtcctcttgctactaggcctggttatgccactcgcaattattgcccaagtgcttagttataaagaagctgtcctgagggccatagatggtataaatcagaggagctctgatgcaaatctgtatcgcttactggatctggacccgcgtccaacaatggatggtgatccagacactcctaaaccggtatcttttacagtgaaagaaacggtttgccctcgcactacccagcagtctcccgaagactgcgacttcaaaaaggatggcctggtgaaaagatgtatgggcacagtcaccttgaaccaggccagggggtcttttgatatttcctgcgataaggacaataagaggttcgccctgttgggcgatttttttagaaagtccaaagagaaaattggcaaagaattcaaaaggattgtacagcggatcaaggatttcctgagaaacctggtgccccgcaccgagagc

SEQ ID NO: 145406 - DNA, 510 bp, Artificial Sequence
  derived and/or modified sequence
atgaaaacgcagcgggacggacatagcctgggaaggtggtcgttggtgctcctgctgttggggcttgtgatgccccttgccataatcgctcaagtcctctcgtacaaggaagccgtcctccgcgccatcgatgggatcaatcaacgcagctctgacgcgaacctgtaccggctcctcgatctcgatccacgaccaactatggacggagatccggacacgccgaagccagtttcattcaccgtgaaagagactgtgtgtccccggaccactcaacaatcgccggaagattgcgacttcaagaaggacggactggtgaagcggtgcatgggaaccgtgaccctgaatcaagcgaggggttcctttgatatttcatgtgacaaggacaacaaacggttcgccctgctgggcgactttttccggaagtcgaaggagaaaatcgggaaggaattcaagagaattgtgcaacggatcaaggatttcctcagaaacctggtgcctcgcaccgaatca

SEQ ID NO: 145407 - DNA, 510 bp, Artificial Sequence
  derived and/or modified sequence
atgaagactcagagggacggtcacagtctgggccggtggtccctcgtgctgctacttcttggactggttatgcccttagcaatcattgctcaggtgctttcttacaaagaggccgtccttcgagccatcgacggcatcaaccagaggtccagtgacgccaatttatacaggctgctcgatcttgatcctaggcccaccatggacggagaccccgatacgcctaagccagtgtcattcaccgtgaaagaaaccgtgtgtccgagaacaacccaacagagccccgaagattgtgattttaagaaggatggcctggtcaaacgctgtatgggcactgtaactctgaaccaggcaaggggatcattcgatatcagttgtgataaggataataaacgctttgcattactgggtgacttttttagaaagtccaaggaaaaaataggtaaagagttcaaaagaatcgtccagcgtatcaaggacttcctacggaacctggtgccgcgtacagagtcc

SEQ ID NO: 145408 - DNA, 510 bp, Artificial Sequence
  derived and/or modified sequence
atgaaaacccagcgcgacggacacagcctgggccgctggtcactggtcctgctcctcctgggactggtgatgccactcgcgataattgcccaagtcctctcttacaaggaagcggtgctccgggccattgacgggatcaatcaacggagcagtgatgcaaatctgtaccgccttcttgacctcgaccccagaccgactatggacggcgatcctgacaccccaaaaccagtgtcgttcactgtgaaagaaaccgtgtgcccccgcacgacccaacagtccccggaggactgcgacttcaagaaggatgggttggttaaacgctgtatgggaacggtgactcttaaccaggcgagaggatctttcgatatctcctgcgacaaggacaacaagcgatttgctctgttgggtgatttctttcgtaagagcaaggagaagatcggcaaggaattcaagagaatcgtgcagaggatcaaagactttctgagaaaccttgtaccgaggactgagtcg

SEQ ID NO: 145409 - DNA, 510 bp, Artificial Sequence
  derived and/or modified sequence
atgaaaacccaacgcgacggccatagcctcggtcggtggtcattggtgctgctcctgctgggcttggtgatgccgcttgctatcatcgcacaagtgctctcgtacaaagaagcggtgctcagagcaatcgatggaatcaatcaacgctcctcagacgccaacctgtacagactgctggacctggatcctagaccgactatggacggcgatcctgacaccccgaagccggtgtcgttcaccgtgaaggaaactgtctgcccccggactacccagcagtcaccggaagattgcgatttcaagaaggatggccttgtcaagcggtgtatgggaactgttaccctgaaccaggcccgcggatccttcgatatctcgtgcgacaaggataacaagcgctttgcactgctgggggacttcttccgcaagtcaaaggagaagatcggaaaggaattcaaaagaatcgtgcagcggataaaagactttcttagaaatctcgtcccaaggactgaatcc

SEQ ID NO: 145410 - DNA, 510 bp, Artificial Sequence
  derived and/or modified sequence
atgaagacacaacgagatggtcactccctaggacgatggagcttggttttgctgctattgggtctggttatgcctcttgctattatagcccaagttctctcctacaaagaagcagtattgagagcaatcgatggtattaaccagagaagctcagatgcaaatctgtatcgactccttgacctggacccacgtccaacgatggatggcgatccagatacacctaagcctgtctcattcactgtgaaagagactgtttgcccccgtactactcagcaatcacccgaagattgtgatttcaaaaaagatggtttggtaaagagatgtatgggaaccgtcacacttaatcaggccagaggttcgttcgacattagctgcgataaagataataaacgcttcgctctgcttggtgatttttttcggaagtccaaggaaaaaatcggtaaggagttcaagagaatagtgcagcgtatcaaggatttcctccgtaatttagttcctagaacagaatct

SEQ ID NO: 145411 - DNA, 510 bp, Artificial Sequence
  derived and/or modified sequence
atgaaaactcagagggatggacactcattgggcagatggtcgcttgtcctgctcctgctgggactggtgatgccactcgcaatcatcgcccaggtcctctcgtacaaagaagcggttctgcgggcaattgatggaattaaccagcgatcctcggacgccaacctttacaggctgctcgacctcgatcccagacctactatggacggcgacccggatactccaaaaccggtgtcctttactgtgaaggaaaccgtgtgcccgcgcaccacccaacaatcacctgaggactgcgacttcaaaaaggacggactggtcaagagatgcatggggactgtgacgcttaaccaggctagaggtagcttcgacatctcctgtgataaggacaataagcggtttgccctgctcggagacttcttccgcaaaagtaaggagaagatcgggaaagaattcaagcgcatcgtgcagcgcatcaaggatttccttagaaatctcgtgccgaggaccgagagt

SEQ ID NO: 145412 - DNA, 510 bp, Artificial Sequence
  derived and/or modified sequence
atgaaaactcagagggatggacattcccttggacgttggtcactcgtcctgttgctgctcggcctggtgatgccgctggcgattattgcccaagtgctttcctacaaagaggccgtcctgcgggcgatcgatggaatcaaccaacggtcctccgacgcaaatctctaccgcctcctggaccttgacccccggcctaccatggacggggacccggatactccaaagcccgtcagtttcaccgtgaaagagactgtgtgtccacggaccactcagcagagcccagaagattgcgacttcaagaaagatggccttgtgaagcgctgcatggggaccgtcaccctgaatcaggcacggggctcctttgacatctcgtgtgacaaggacaacaaacgctttgcgctgctgggggacttcttccgcaagtcaaaggaaaagattgggaaggaattcaagagaattgttcaaagaatcaaggacttcctgcggaacctggtgccgaggaccgaatcc

SEQ ID NO: 145413 - DNA, 510 bp, Artificial Sequence
  derived and/or modified sequence
atgaaaacccagcgcgacggacattcgttgggaagatggtcgttggtcctccttcttctgggccttgtgatgccgcttgccatcatagcacaggtgcttagctacaaggaggcagtgctcagagccatcgacggaatcaaccaacgttcctcggatgcaaacctctacaggttgctcgatctggatccccgccctactatggatggcgacccggacactcccaaaccagtgagctttactgtcaaggaaaccgtgtgccctaggactacccagcaatccccagaggactgcgatttcaaaaaggatggtcttgtgaaacgttgtatgggaacggtgaccctgaatcaagcccgggggagctttgatatctcatgtgataaagataacaaaaggttcgcacttctgggagactttttccgaaaatcaaaggagaaaattggcaaggagtttaagcggattgttcaaagaattaaggattttcttcgaaacctggtcccaaggaccgaaagc

SEQ ID NO: 145414 - DNA, 510 bp, Artificial Sequence
  derived and/or modified sequence
atgaaaacgcagagagacgggcacagtctggggcggtggtcactggtgctcctcttgctcgggctggttatgcccctcgccataatcgctcaagtactgtcatacaaggaggccgtattgagggccattgatggcataaatcagcggtccagcgacgccaacctctaccgactgctggatctggacccacgaccgactatggatggagaccctgacacaccaaagccggtctcctttactgtcaaggaaacagtctgccctaggaccacgcagcaatcccccgaggactgtgatttcaagaaggacggcctggtgaagaggtgcatgggtactgttacactgaatcaggcgaggggttcctttgacatctcctgcgacaaagacaacaagcggtttgcactgctgggtgatttttttcggaagagcaaggagaaaatcggtaaggaatttaagaggattgtccagcgaataaaagacttcctcaggaacctcgtccccaggacagagagc

SEQ ID NO: 145415 - DNA, 510 bp, Artificial Sequence
  derived and/or modified sequence
atgaaaactcaacgagatggtcatagtttaggtagatggagtcttgttttattattattgggattagttatgccacttgctattattgcacaagtcttatcatataaagaagcagtactaagagcaatagatggaattaatcaaagatcatcagatgcaaatttatatagattattagatcttgatccacgtccaactatggatggagatcctgatactccaaaacctgttagttttactgtgaaagaaactgtttgtccaaggacaacacaacaatcaccagaggattgtgattttaaaaaggatggtttggtaaaaagatgtatgggtactgttactttaaatcaagctagaggatcatttgatatcagttgtgataaggataataaaagatttgctcttctaggagacttttttagaaaatcaaaggaaaaaattggaaaagaatttaagagaattgtacaaagaattaaagatttcttaagaaatcttgttccaagaacagaatca

SEQ ID NO: 145416 - DNA, 510 bp, Artificial Sequence
  derived and/or modified sequence
atgaaaacccagcgggatggacacagcttggggcgatggtcgctggtgctgctcctcctcgggctcgtgatgccactcgcgattatcgcgcaggtgctgagctacaaggaggccgtcctgagggcgattgacggaatcaaccagcggagttctgacgccaatctttacagactgctcgacctggatccacgacccaccatggatggcgaccctgacaccccgaagccggtgtcatttacggtgaaagagacggtctgtccacgcactacccagcagtcgccggaagattgcgacttcaagaaggacggactcgtcaagagatgcatggggactgtcaccctgaaccaagcccgcggatcgtttgatatctcttgtgataaagacaacaaacggtttgccttgctgggagacttcttccggaaatcaaaggagaagatcggaaaagaattcaaacgcatcgtgcaacggatcaaggatttcttgagaaatttggtgccgaggactgaatcg

SEQ ID NO: 145417 - DNA, 510 bp, Artificial Sequence
  derived and/or modified sequence
atgaaaacgcagcgcgacggacactcacttggccgctggtccctggtgctgctgctgcttggtttggtgatgccacttgcgattatcgcccaggtgctcagctataaggaggccgtcttgagagctattgacggcatcaaccagagatcatcggacgctaacctgtaccggctgctggatctggacccgcgcccaaccatggatggtgacccggatacgccgaagcctgtctctttcaccgtgaaggagacggtttgcccgcggactacccagcagtccccagaggactgcgacttcaagaaggatggattggtgaagcgttgtatgggcactgtgaccctgaatcaagcgcggggctcgtttgatatctcctgtgataaagacaataagaggttcgcactcctcggtgacttctttcggaaaagcaaggagaagatcggcaaggaattcaaaagaatcgtccagcggattaaagacttcctgcggaacctggtgccgcgcaccgagtcc

SEQ ID NO: 145418 - DNA, 510 bp, Artificial Sequence
  derived and/or modified sequence
atgaaaacccagcgcgacgggcactcactgggccgttggtctctggtcctgctgctgctggggctcgtgatgccgctggcaatcatagcccaagtcctgtcatataaggaagctgtactgcgggcaatcgatggcattaaccagcgctcctcggatgctaacttgtacaggctactggatttagaccctaggcctaccatggatggcgatcctgatacaccaaaaccggtgagctttacggtgaaggaaacagtgtgccccagaacaactcaacagagtccagaagactgcgacttcaaaaaagatgggctcgtgaaaaggtgcatgggcacagtgacgctgaatcaagcccgtgggtcatttgacatttcctgtgataaagacaacaaacgcttcgcgttgctcggagatttctttcggaagtcaaaggagaagatcggtaaagagttcaagcgcatcgtgcaacgaatcaaagattttttacgtaacttggtgcctaggactgagagc

SEQ ID NO: 145419 - DNA, 510 bp, Artificial Sequence
  derived and/or modified sequence
atgaagactcagagggacggccactcactgggtcgctggtccctggtgctgctgctcctcggcctggtaatgcctctggccatcatcgcacaagttctaagctacaaggaggcagttttgagagcaatcgatgggatcaaccagaggagctcagacgctaatttatacagactgctcgaccttgacccgcggcccaccatggatggcgacccagatacaccgaaaccggtgtcattcacagtgaaggaaaccgtgtgccctcggaccacccaacagtctcccgaagattgtgattttaagaaggatgggctggttaaacggtgcatgggtacggttacactgaaccaggctcgggggtcctttgatattagctgcgataaagataacaagcgctttgctttactgggggacttcttccgcaagtcaaaggagaaaatcggcaaggagttcaaacgaatcgtccagcggatcaaagactttctcaggaatctggtgccaaggacggaatct

SEQ ID NO: 145420 - DNA, 510 bp, Artificial Sequence
  derived and/or modified sequence
atgaagacccagcgggacggtcactcgctgggacgctggtcacttgtcctgctccttctgggtctggttatgcccctggctatcatcgcacaagtgctgagttacaaagaggccgttctccgtgcgatcgatggtatcaatcaaaggtcgagtgatgcgaatctctaccgattgctcgatcttgacccacgtccgacgatggatggcgaccccgatacgcccaagccagtttccttcacggtgaaggagactgtttgcccacgtactacacagcagagcccggaggattgtgacttcaagaaggatggtttggtgaagcgctgcatggggactgtgaccttaaaccaagcacgagggagctttgatatttcctgcgataaagataataaacgatttgccctgttgggagatttcttccgcaagtccaaagagaagataggcaaagagtttaagcgcattgttcagcgtatcaaggattttctcaggaacctggtccctagaacagagagt

SEQ ID NO: 145421 - DNA, 510 bp, Artificial Sequence
  derived and/or modified sequence
atgaaaacccaacgtgacggacattcccttggtcgttggagccttgtgcttctcttgcttgggctcgtgatgccccttgctattatcgcgcaagtgctttcgtacaaggaggcagtgctgagagctattgatgggattaatcagcggtcgtccgatgcaaatctgtaccggctgcttgatctggaccctagaccaactatggacggtgaccctgataccccaaagcccgtttcctttaccgtcaaggaaaccgtgtgtcccagaactactcaacaaagccctgaggattgtgacttcaagaaggatggccttgtgaagagatgtatgggaacggtgacgcttaaccaagcacgcggttcatttgacattagctgcgataaggataacaagcggttcgcacttctcggagatttcttccgcaaatcaaaggaaaagattggaaaggagtttaagcgaattgttcagcgcataaaagattttctccgtaaccttgttccacggaccgaatcc

SEQ ID NO: 145422 - DNA, 510 bp, Artificial Sequence
  derived and/or modified sequence
atgaagacacaacgtgacgggcactcgcttggtcgatggtctttggtcctgctcttgctcgggttggtaatgccccttgctatcatcgctcaggttctgagctacaaggaagctgttttacgggcgatcgatgggattaatcaacgctctagcgacgcaaatctctacagattgttggatcttgatccgcgtccgaccatggacggtgatcccgacactccgaagcccgtgtccttcactgtgaaagagaccgtgtgccctcgaaccacccagcaaagcccagaggattgcgatttcaagaaggatgggctggttaagaggtgtatgggaacggtaacattaaaccaagccagaggctcgtttgatatatcgtgtgacaaggataacaaaaggttcgcgttgctcggcgacttctttcgaaagagtaaagagaagattggcaaggaatttaagcgcatcgtgcagaggatcaaggattttttgcgtaatctggtcccacgaaccgagagt

SEQ ID NO: 145423 - DNA, 510 bp, Artificial Sequence
  derived and/or modified sequence
atgaaaacgcagcgtgacgggcactccttaggtcggtggagtctggttctgctactgctgggccttgtgatgcccttagccatcatcgcccaggtactgtcctacaaggaagcggtgctcagagctattgacggtattaatcagaggagctctgatgctaacctctatcgactgctcgatttggaccctagaccaaccatggatggtgatcccgacactcctaaacctgtatctttcacagtaaaagaaacagtgtgcccccgtacgacgcagcagagccccgaggattgtgattttaaaaaagatggacttgttaagcgttgcatgggcacggtgacactaaatcaggctcgcggttcctttgacatatcttgcgacaaagataataaaaggttcgccctgctcggagatttcttccggaagtccaaggaaaaaattggaaaggagtttaaacgcatcgtccagcgaattaaggattttttacgcaacctggtgccaagaacagaaagt

SEQ ID NO: 145424 - DNA, 510 bp, Artificial Sequence
  derived and/or modified sequence
atgaagacacagagggacggccattcgctcggacggtggtccttggtactgttattgctggggctcgttatgccccttgccatcatcgctcaggtcctcagttacaaagaggccgtgctgagagcaattgacggtataaatcagcgctctagcgatgctaatctgtatcggctcctcgatttggatcctaggcctactatggacggtgatcctgatacgcccaaacccgtttcttttactgttaaagaaactgtatgtccgcggactacgcaacagtctcctgaggactgtgactttaagaaggatgggcttgtcaaacggtgcatgggcaccgtcaccctcaatcaggcccgcggctcatttgatataagctgcgacaaggataacaaacgcttcgctctactgggggattttttcaggaaatccaaggagaaaatcggcaaagagttcaagcgaatagtgcagaggatcaaagactttctgaggaatctcgtgccccgcacagaatct

SEQ ID NO: 145425 - DNA, 510 bp, Artificial Sequence
  derived and/or modified sequence
atgaaaacccagagagacggtcatagtttggggcgttggtcactggttcttctgctactgggtctcgtgatgccacttgctattattgcacaggtgctttcatacaaggaggccgtgctgagggccatcgatggcataaatcaacggtccagtgatgccaacctgtatcgcctgctggacctggacccacggcccactatggatggcgaccctgatacccctaagcccgtgagtttcaccgtcaaggaaacagtatgcccacgtacaacacaacaatcaccagaagactgtgatttcaagaaagatggcttagtgaaacggtgcatggggacagtgaccctgaatcaagcacgcgggtccttcgacattagctgcgataaagacaacaaacggtttgccttgttaggcgacttttttcggaagagtaaggaaaaaatcggaaaagagtttaagcgaattgtgcagcgtatcaaggacttccttcggaatctggtgcccaggacagagtcc

SEQ ID NO: 145426 - DNA, 510 bp, Artificial Sequence
  derived and/or modified sequence
atgaaaacacagcgcgatggtcacagcctgggcaggtggtctttggttcttttgctgctcggactggtcatgcccctagcaattatcgcacaggtcctgtcgtacaaagaagccgtcctgcgggcgatcgatggaatcaaccagcgcagttctgacgcaaatctgtacagactcctggacctcgaccctagacctacaatggatggagatcctgacactcctaaacctgttagttttaccgtgaaggagaccgtgtgtcctaggaccacccagcagtcacccgaggattgtgattttaagaaagatggtctggtgaagcggtgtatgggaacagtgacacttaatcaggccagaggctcttttgatatttcgtgtgataaagacaacaaaaggttcgcactgctcggagacttcttccggaaatctaaagaaaagattgggaaggagtttaaacgcattgtacaaagaatcaaggattttctcagaaacttggtcccgcggacagagtcc

SEQ ID NO: 145427 - DNA, 510 bp, Artificial Sequence
  derived and/or modified sequence
atgaaaacacagagagacgggcacagcttgggccgttggagcctagttttgctgctgttgggactggtgatgcccctcgccattatagcacaggtgctttcctacaaggaagcggtgctgcgtgcgatagatgggattaatcagcgcagctcggatgccaacttgtacagacttctcgatctggatcctaggcctactatggacggtgaccccgacactcccaagcccgtaagttttaccgtcaaagagaccgtctgccccagaacaacccagcagagccctgaggattgtgatttcaagaaggacggcctggtgaagcgctgcatgggcaccgtgactttgaatcaggcaaggggcagctttgatataagctgtgacaaagacaacaagaggttcgctctcctcggtgatttcttcagaaaaagcaaagagaagattggcaaagaatttaagcggatcgtgcagagaatcaaggattttcttaggaatctagtccccaggactgagagt

SEQ ID NO: 145428 - DNA, 510 bp, Artificial Sequence
  derived and/or modified sequence
atgaaaacccagcgggacggacattccctcggccgctggagcttggtcctgctgctgctcggtttggtgatgccgctggccatcatcgcccaagtgctgagctacaaggaggcagttctccgggctatcgacggaatcaaccaacggtcatccgacgcgaatctctaccgcctcctggacctcgatccccgccctactatggacggagatcccgacactccgaagcccgtctcgttcaccgtgaaggaaaccgtgtgccctcggactacccaacagtcaccagaagattgtgactttaagaaggacggcctcgtgaaacgctgtatggggactgtgactctgaatcaagccaggggatcgttcgacatctcatgcgacaaggataacaagcgcttcgccctgctgggcgactttttccgcaaatcaaaggagaagatcggcaaggaattcaagcgcattgtccagagaatcaaggattttcttaggaacttggtgccgagaactgagagc

SEQ ID NO: 145429 - DNA, 510 bp, Artificial Sequence
  derived and/or modified sequence
atgaaaacgcagagggacgggcactcccttggacggtggagcctggtactgctgctgctcgggttggtcatgcccctagctataatcgcacaggtcctgtcttacaaagaggccgtcttacgggccatcgacggcattaaccaaaggtccagcgacgccaacctttatcggctgctagacttggacccccgaccaacaatggatggcgaccccgacactccgaagcccgtgtctttcactgtgaaggagacggtttgccctaggacgacccagcagagccctgaggactgtgattttaaaaaggatggcttggtgaagaggtgtatgggcacagttaccctgaatcaggcccgcggatcatttgatatatcctgtgacaaggacaacaagcgatttgcgttgttgggagactttttcagaaagtccaaggaaaaaattggcaaagaatttaagcgcatcgtacagagaattaaggacttcctgagaaacttagtgccacggacagagagt

SEQ ID NO: 145430 - DNA, 510 bp, Artificial Sequence
  derived and/or modified sequence
atgaaaacgcagagggatgggcactcgcttggaaggtggagcctggtgctccttctgctcggactcgtcatgccattggccatcattgcacaagtgctctcatacaaggaagcagtgctgagggcaattgatgggatcaatcaaaggtcatcggatgcaaacctgtacagacttctggaccttgacccacgccccaccatggatggtgacccagataccccgaagccggtgtcatttaccgttaaggaaaccgtgtgtcctcgtaccactcaacaatccccagaagattgcgatttcaagaaggatggcctggtgaagcgctgtatgggtacggtgaccttgaaccaggcaaggggatcatttgatattagctgtgataaagataacaagagattcgcacttctcggagactttttccgaaagtcaaaggagaaaataggaaaggaattcaaacggatcgtccaacgcataaaagacttccttcgcaacctcgtgcccagaaccgagagc

SEQ ID NO: 145431 - DNA, 510 bp, Artificial Sequence
  derived and/or modified sequence
atgaagacccagcgggacggacatagtctgggacggtggtctctggtacttctgcttctaggcttggtcatgcctctggccatcattgcgcaagtgctctcatacaaagaagcagtgctgcgggcaatcgatgggatcaatcaacgttcctctgatgccaatctctatcgattgctggacttggatcctcgtcctaccatggatggagaccccgatacccccaagcccgtgtcatttaccgtgaaagaaaccgtatgcccacgaacaacacagcagagtccagaggattgcgacttcaagaaagatggtttggtgaagagatgcatgggcaccgtgacattgaatcaggcccgcggcagcttcgatatctcttgcgacaaggataacaaacgctttgctctgctcggcgacttcttccgaaagtccaaggagaaaataggcaaggagtttaagaggatcgtgcagaggattaaggattttctcaggaacctggtgcccaggacagaatcc

SEQ ID NO: 145432 - DNA, 510 bp, Artificial Sequence
  derived and/or modified sequence
atgaaaacccagcgggacggacactcactcggacgctggtcactggtcttgctgctgcttgggctggtgatgcctctggctattatcgcccaggtcctgagctacaaggaagcggtgctgcgcgctatcgatggaatcaatcagcgcagctcggatgcgaatctctaccgcctccttgacctcgacccgaggccgaccatggacggtgacccggacaccccgaaacccgtatccttcaccgttaaggaaactgtgtgcccaagaaccactcaacaatcacctgaggactgcgacttcaagaaagacggactcgtcaagcgctgcatgggcactgtgactctgaaccaagcacgcggttcgttcgacatctcatgtgacaaggacaacaagaggtttgccctgctgggggactttttcaggaagtccaaggagaaaatcggaaaagaattcaagcgcatcgtccagaggattaaagatttcttgaggaaccttgtgccacgcaccgagtcg

SEQ ID NO: 145433 - DNA, 510 bp, Artificial Sequence
  derived and/or modified sequence
atgaaaacgcaaagagatggccactcgctgggtagatggtcgctggtcctcctgttgctgggactggtcatgccgctcgccataattgcacaggttctctcatacaaggaagccgtgctgagggccattgatggcattaaccaacgctcgtccgatgctaatctttacagattgctggatcttgacccacgccctaccatggacggggatccagatacccctaagcctgtgtcatttactgtcaaggaaactgtgtgtccgcgaacgactcaacagtccccagaagattgcgatttcaagaaggatggacttgtgaagcggtgtatgggaaccgtgactctgaaccaagccagaggttcgttcgacatttcgtgcgataaggacaataagaggtttgcactgctgggagacttttttcgtaagtccaaggaaaagattggtaaggagtttaaacgcattgtgcaacgcatcaaagactttttgcgaaacctggtgccacgcaccgaatcg

SEQ ID NO: 145434 - DNA, 510 bp, Artificial Sequence
  derived and/or modified sequence
atgaagacacagagggacggtcactccctagggagatggtccctcgttttgctgctcttgggacttgtaatgccgcttgcaatcattgcccaagtcctgagctataaggaagctgtgttaagggcgatcgacgggatcaaccagcgctcctctgacgctaatctgtaccggctgctcgacctggatccacgtccaaccatggatggagacccagacacgcccaagcccgtatccttcactgttaaagagacagtgtgtcctaggaccacgcagcagagccctgaagactgcgatttcaaaaaggatggactggtaaagcggtgtatgggcaccgtaacactgaaccaagccagggggagtttcgacatttcatgtgataaggacaacaagcggtttgcactgctaggagacttctttagaaaatctaaggaaaagataggcaaagagttcaaacggatcgtgcaaaggattaaggacttcctgcgcaacctggtgccgcggaccgagagc

SEQ ID NO: 145435 - DNA, 510 bp, Artificial Sequence
  derived and/or modified sequence
atgaaaacccagcgggatgggcattcccttggaagatggagcctggtgctgctgcttctcggactcgttatgccgctcgcaattatcgcccaagtgttgagttacaaggaagctgtacttagggccattgacggcataaatcaacggagctcggatgccaacctttaccgtctcctcgatcttgatcctaggcctactatggacggtgatccagataccccaaagcctgtctcattcaccgtcaaagaaaccgtgtgtccaaggacgacccagcagagcccggaggattgtgacttcaaaaaagacggacttgtcaagcgttgtatgggaaccgtgactctcaaccaggcaagaggctcctttgatatctcgtgtgacaaggataacaagagatttgcccttctgggagatttctttcggaagtcgaaggagaagataggtaaggagtttaagcggatcgtgcaacgtattaaggatttccttagaaacctggtgccccgcactgaatcg

SEQ ID NO: 145436 - DNA, 510 bp, Artificial Sequence
  derived and/or modified sequence
atgaaaacccagcgcgatggacattcactgggacgttggtcccttgtgttgttgcttttgggccttgtcatgccgctcgcgattatcgcacaagtgctgtcatacaaggaagcagtcctgcgggccattgacggaattaaccagagatcctccgacgctaatctgtataggctgctcgatctcgatccacgccccactatggatggggaccctgatacgccaaagcccgtgagctttaccgtgaaggagactgtgtgccccagaaccactcagcaatcgcctgaggattgtgatttcaaaaaggacggtctggtcaaacggtgtatgggaactgtgactcttaaccaggcgcgcggttcgtttgacatcagctgcgacaaggataacaagagatttgcattgctgggagactttttcaggaagagcaaagaaaagattggaaaagagtttaagcgtatcgtgcagcgcattaaggattttctgaggaaccttgtgcctaggaccgaaagc

SEQ ID NO: 145437 - DNA, 510 bp, Artificial Sequence
  derived and/or modified sequence
atgaagacccagcgcgacggtcattcactcggccggtggtctctggtactactgctgttaggccttgtgatgcctctggccattatcgcccaggttttgtcctataaggaagccgtcctacgcgccatcgacgggataaaccaacgcagctccgacgctaatctttatcgtctgctcgatttggaccctaggcccaccatggacggggaccctgatactcccaagcccgtaagttttaccgtgaaggaaaccgtgtgcccgaggactacccagcagtcccctgaagattgcgacttcaagaaggacggcctggtgaaaagatgcatgggcactgtgaccctcaaccaggctagagggagtttcgatatctcttgtgacaaggataacaaacgctttgccttgttaggtgactttttccgcaagtcgaaagaaaaaatcggcaaggaatttaaacggatagtgcagagaatcaaagacttcctgcgcaatctcgtcccaagaacagaaagt

SEQ ID NO: 145438 - DNA, 510 bp, Artificial Sequence
  derived and/or modified sequence
atgaaaactcagagagacggccattcactgggacgctggtcgctggtgctcctcctcctgggccttgtgatgcctctcgccatcatcgctcaggtcctgagctacaaagaagcagtcttgcgcgccatcgatggaatcaaccaaagatcctctgacgctaacttgtaccgcctgctggatctggatccacgcccgactatggacggagatccggacacgcccaagccggtttcgttcactgtgaaggaaaccgtgtgccctcggaccactcaacaaagcccagaggactgcgacttcaagaaagatggactcgtgaagaggtgtatgggaaccgtgaccctcaaccaagcccgcgggagcttcgatatcagctgcgataaagacaacaagaggttcgcactcctcggggacttctttcggaagtcgaaggaaaagatcggaaaggagttcaaacgcatcgtgcaaagaatcaaagactttctgagaaatctggtgccaagaaccgaatca

SEQ ID NO: 145439 - DNA, 510 bp, Artificial Sequence
  derived and/or modified sequence
atgaaaacccaacgggacggccatagcttgggtcgctggtcacttgtgctgctcctgcttggcctcgtcatgcctctcgccatcattgcccaggtgttgtcgtacaaggaggccgtgctgcgcgccatcgatggaatcaatcaacgctcgtccgacgctaatctctacagactcctcgacctggatcctcgcccaaccatggatggggacccagacactcctaaaccggtgtcgttcaccgtgaaagagacggtctgcccacgcaccacccaacagtcgccggaggactgcgatttcaaaaaagacggacttgtgaagaggtgcatgggtaccgtgacgctgaaccaggcacgcggatcattcgacatttcatgtgataaagacaataagcgcttcgccctgttgggagatttcttcagaaagagcaaggagaagatcggcaaggagtttaagaggatcgtgcaacgcatcaaggatttcctgcggaacctggtcccgagaactgagtcc

SEQ ID NO: 145440 - DNA, 510 bp, Artificial Sequence
  derived and/or modified sequence
atgaagacccagagagacggccatagtctcggcagatggtctctcgtgctcttactcctagggctcgtgatgcccctggctatcattgctcaagttctgagctacaaagaagcagtgctgagggccatagacggaatcaaccagaggtcaagcgacgctaatctgtaccgcttgttagaccttgatcccaggccgacaatggacggagatccagatacccccaagccggtgagctttacagtcaaggaaactgtgtgcccaaggacaactcaacagtcccccgaagactgcgactttaaaaaagatggactggtgaagagatgcatgggaaccgtaacgctgaaccaagctaggggatctttcgatatcagctgcgacaaagataacaagagatttgccctgcttggcgattttttccggaagagcaaggagaagatcggcaaggagttcaaacgcatcgtgcagagaattaaggacttccttagaaaccttgtaccgcgcaccgaaagt

SEQ ID NO: 145441 - DNA, 510 bp, Artificial Sequence
  derived and/or modified sequence
atgaaaacccagagagacggtcatagcctgggccgttggtcacttgtactcctcctcctggggctggtaatgcctctggccatcattgcccaagtgctgagctataaggaagcagtgctgagagccattgatgggattaaccagcggtccagcgatgccaacttgtaccgcctacttgatttggaccccagacctacgatggacggggaccctgacacccccaagccagttagctttacagtgaaagaaaccgtctgtccgaggacaacacaacaaagcccagaggactgcgacttcaagaaggacgggctcgtgaagcgatgcatgggtacagtcacacttaaccaagctcggggtagcttcgatatctcctgcgacaaagacaataagcggttcgccctgctgggcgacttctttagaaagagtaaggagaagattggcaaggaatttaagagaatcgtgcagcgtatcaaggactttctgcgaaatcttgtgccaaggaccgagagc

SEQ ID NO: 145442 - DNA, 510 bp, Artificial Sequence
  derived and/or modified sequence
atgaaaacccagcgggacggtcacagtctcggacgctggagcctggtgctgctccttcttggcctggtaatgccgctcgcaataatcgcgcaggtgctttcatacaaggaagccgtgctgagagcgatcgacggaatcaatcagcggtcatcggatgcaaacctgtaccgcttgctcgacctggacccacggccaaccatggatggtgacccggatactccgaagccagtgtcattcaccgtgaaggaaaccgtgtgccctcgcaccactcagcaatccccggaggactgcgacttcaagaaggatggattggtgaaacgatgcatgggaacggtcaccctgaaccaggccaggggctccttcgatatctcctgcgataaggacaacaaacggttcgccctgttgggggacttctttcggaaatccaaagagaagatcggaaaggagtttaagcggatcgtgcagcggatcaaggacttcctgcggaatttggtccctcgcactgagtcc

SEQ ID NO: 145443 - DNA, 510 bp, Artificial Sequence
  derived and/or modified sequence
atgaagacccagagggacggacacagtcttggcaggtggagcttggttctgctgttgctcgggctggtaatgcctctggccatcatagctcaggttctgtcctacaaagaggcagtgctccgggccattgacggtataaaccagaggtccagcgacgccaatctgtatcgactcctggaccttgacccaaggcctacaatggatggtgaccccgatacccctaagccggtgtcctttactgtgaaagagaccgtgtgccctcgcactacccagcagtctcctgaggactgcgattttaagaaggatggcctggtgaaacggtgtatgggcaccgtgaccctcaaccaggcccgcggcagcttcgatatttcttgcgataaggacaataaaagattcgcactcctcggcgatttctttcgcaagagtaaggagaaaatagggaaggagtttaaaagaattgtgcaacggatcaaagactttctcagaaatctcgtgccacgcacagaatcc

SEQ ID NO: 145444 - DNA, 510 bp, Artificial Sequence
  derived and/or modified sequence
atgaaaacgcagcgcgacggtcacagcctgggccgttggtcccttgtgcttctcctcctcggtttggtgatgcctctggcgatcatagcacaagtgctgtcttacaaagaagccgttctgcgggccattgacggcattaatcagcggtcgtccgatgccaacctttataggctgcttgaccttgatcctagacctactatggatggtgaccctgatactcccaagccagtctcatttaccgtgaaggaaactgtgtgtccgcggactactcagcagtcgcccgaagattgcgatttcaagaaagatggtcttgtgaagcgttgcatgggtaccgtcaccctgaaccaagcgaggggtagcttcgatatttcatgtgataaggacaataagagattcgccctcctgggcgactttttcagaaagtcaaaggaaaagatcggaaaagagtttaagagaattgtgcagcgcatcaaggattttcttcggaatctggtccccaggactgaaagc

SEQ ID NO: 145445 - DNA, 510 bp, Artificial Sequence
  derived and/or modified sequence
atgaagacccagagggatggacacagtctgggacggtggagcctcgtgcttctgttactgggcctcgtcatgccgttggcgataatcgctcaagtactttcatataaggaagccgtcctcagagctatcgatggaatcaaccagcggtcatccgacgctaacttatatcgcctgttggatctggacccccgcccaactatggatggggaccctgatactcccaagccggttagtttcaccgtcaaagagacggtgtgtcctaggaccacgcagcagtctccggaggattgcgacttcaaaaaggatggtcttgtcaagaggtgtatggggaccgtgacgctgaaccaagcacgcggctctttcgatatatcatgtgataaggacaacaaacgctttgctcttctgggcgatttttttcgtaagagcaaggagaaaattgggaaggaattcaagcgtattgtccaaagaataaaagacttccttaggaacctggtccctagaacggaaagc

SEQ ID NO: 145446 - DNA, 510 bp, Artificial Sequence
  derived and/or modified sequence
atgaagacacaacgtgatggccattcacttggaaggtggtcccttgtcttattgttacttggccttgtaatgcccttagcaattatcgctcaagtattgtcttacaaggaggctgtgctacgagctatcgatgggatcaatcaaagaagttcagatgctaatctttaccggctcctcgatttggatcctcgtcccacgatggacggagatccagacacgccgaaaccagtatctttcactgtgaaagagactgtttgtccacgaacaacacagcagagcccagaggactgtgattttaaaaaagatggactcgtaaaaagatgtatgggaacagtaacactgaatcaagcgaggggatcgttcgatatttcatgcgacaaagacaataagcgatttgccctgcttggagactttttcagaaagagcaaagaaaagattggaaaggaattcaagagaattgttcaacgcataaaagactttttaaggaatttggttccacgaactgagtcc

SEQ ID NO: 145447 - DNA, 510 bp, Artificial Sequence
  derived and/or modified sequence
atgaaaacccaacgtgatggtcattccctggggaggtggtccctggtcctgctgctgttgggattggtgatgcctcttgcaattatcgcacaggtcctttcttacaaagaggcagtccttcgagcgattgacggaatcaaccaacggtcgagcgatgcaaacctttataggctgctcgatcttgatcctagacccaccatggacggggaccccgataccccaaagcctgtgtcatttaccgtgaaggaaaccgtctgtccaaggactacgcaacagtcgcctgaggactgcgatttcaagaaggatggtctggtgaagaggtgtatgggcaccgtgactcttaaccaagcccggggttcgtttgacatatcgtgcgacaaggacaataaacgattcgcgctgttgggcgactttttccgcaagtccaaggaaaagattggaaaagaattcaagcggattgtgcaaaggattaaggattttcttagaaatcttgtgccacgtaccgaatcg

SEQ ID NO: 145448 - DNA, 510 bp, Artificial Sequence
  derived and/or modified sequence
atgaaaacccagagagacggacattcgctgggcagatggtcactggtccttctccttcttggacttgtgatgcctcttgcaatcatcgcccaggtgctgtcttacaaggaagcagtgcttagagccatcgatggtatcaatcagagatcatcggacgcaaacctttaccggctgttggacctcgatcctcggccgactatggacggcgatcctgatactcctaaaccagtctcattcacggttaaagaaacggtgtgtccacggactacccaacaatcccctgaggactgtgatttcaagaaagatggtctggtcaagcggtgcatgggaactgttactctgaaccaagctagaggatcgtttgatattagctgcgataaggataacaagagattcgcccttctgggtgatttctttcgcaagtcaaaagaaaagataggtaaagagtttaagcgaattgtgcagcgtatcaaggactttcttagaaatctggtccctagaaccgaaagc

SEQ ID NO: 145449 - DNA, 510 bp, Artificial Sequence
  derived and/or modified sequence
atgaaaactcagcgtgatggacacagcctgggacgctggtcgctggtgctgctcctcctgggactggtgatgccgctcgcgatcatcgctcaggtcctgagctacaaggaggcagtcctgagagccattgacggcatcaatcaaagatccagcgatgccaacttgtacaggctcctggatctcgaccccaggcctacgatggacggggacccggacaccccgaagcctgtgtcgttcactgtgaaggaaactgtgtgcccacgcaccacccagcagtccccagaggactgcgattttaagaaggatggattggtgaagcgctgcatgggcaccgtgaccttgaaccaagcccgaggttccttcgacatctcatgtgacaaagacaacaagcggttcgcgctgctgggcgacttctttcggaaatcaaaagaaaagatcggaaaggaattcaaacgcattgtccaaagaatcaaggatttccttcggaatcttgttccgcggactgagtcg

SEQ ID NO: 145450 - DNA, 510 bp, Artificial Sequence
  derived and/or modified sequence
atgaaaacccaaagggacggacactcgcttggtcggtggagcctggtcctgttgctgctcgggctggtcatgccactggccattatagcgcaggtgctgtcctacaaagaggctgtgctccgggcaatcgatggtatcaatcaaaggtcctcggacgccaatctctaccgactccttgatctcgatccgcgcccaaccatggacggcgacccggacaccccgaagccagtctcgttcaccgtcaaggaaaccgtctgcccacgcacgactcagcagtcccccgaggattgcgacttcaaaaaggatggacttgtgaaacggtgtatggggaccgtaactctcaatcaggccagaggcagctttgatatctcatgcgataaagacaataagcgtttcgctctgttgggagattttttccgtaagagcaaggagaagatcggcaaggaattcaagagaattgtgcaacggatcaaggacttcctgcggaacttggtgcctcgcactgaatct

SEQ ID NO: 145451 - DNA, 510 bp, Artificial Sequence
  derived and/or modified sequence
atgaaaacgcagcgcgacggtcactccttgggacggtggtcactggtgctgctcttgctgggccttgtgatgcccctggccatcatcgcacaagtcctttcgtacaaagaagccgtccttcgggcgatcgacggtatcaatcagcggagctcagacgcaaatctgtaccgccttctcgatctcgatccaaggccgactatggacggagatccagatactccgaaacctgtgtcattcaccgtgaaggaaaccgtgtgcccaagaacgacccagcagtcccctgaggactgtgacttcaagaaggatggactggtaaagaggtgcatgggcacggtgactctgaaccaggctcgtggatcgtttgacatctcatgcgataaggacaacaagagattcgccctgctcggggacttctttcgaaagtcaaaggaaaagataggaaaagagttcaaacggatcgttcaaagaatcaaagacttcctgaggaacctcgtgcctcggaccgaatct

SEQ ID NO: 145452 - DNA, 510 bp, Artificial Sequence
  derived and/or modified sequence
atgaagacacagagggatgggcattccctcgggcgatggtctttagtcttgcttctcctcgggttggtcatgcctcttgcaatcatcgcgcaggtgttgtcatataaggaagcagtcctccgggccatagatggaatcaatcagcgctccagtgacgcgaacctgtaccgcctgcttgatctcgatccaaggcctaccatggacggggaccccgatacacctaaacctgtctctttcacagtgaaggagacagtgtgtccaagaactacacagcagagtccagaggattgcgattttaagaaagatggcctagtgaaacggtgtatgggcaccgtgacactgaaccaggcaagaggcagtttcgatatctcctgcgacaaagacaataagcgctttgcccttctgggggacttcttcaggaagtccaaggagaagattggaaaggaattcaagaggatagtgcaacggattaaggatttcctgcggaacttagtcccaaggactgagagc

SEQ ID NO: 145453 - DNA, 510 bp, Artificial Sequence
  derived and/or modified sequence
atgaaaacccagcgcgatggacactcgttgggacggtggtccctggtgcttctgctgctcggactggtgatgccacttgctattatcgcacaggtcctgtcgtacaaggaagccgtgctgagagcgatcgacggaatcaaccaaaggagctcagacgccaacctctatcggctcctggatctggaccctcgtcctaccatggatggagatcccgacactccgaaaccagtctccttcaccgtgaaggaaaccgtgtgtccgcgaacgactcaacaatcgccggaggactgcgacttcaaaaaagacggcctggtgaagcggtgcatgggaaccgtcactctgaatcaagcgagaggatcctttgacatctcgtgcgataaagataacaaacggttcgcgctcctcggagatttcttccggaagtcaaaggagaaaattggtaaggaattcaagcgcatcgtccaacggatcaaggattttctgcgcaacctggtgccgcgcaccgaatcg

SEQ ID NO: 145454 - DNA, 510 bp, Artificial Sequence
  derived and/or modified sequence
atgaagacccagcgggacggacattcactgggacggtggtccctggtgctgctccttttgggtctcgtgatgccacttgccatcattgcacaggtgcttagctataaagaggcggtcctgagggccatcgatggcataaaccagcggtcctccgacgccaacctgtatagactgctggatttggatccgcgacccactatggacggcgaccccgacactccaaagcctgtgtctttcactgtaaaagagaccgtgtgcccacggacaacgcagcagtcacctgaggattgcgacttcaagaaagatggactcgtgaagcggtgcatgggtaccgtgacactgaatcaggctcgaggtagtttcgatatcagttgtgataaggataataaaaggttcgctctgctgggggacttcttcaggaaaagtaaagagaaaattggcaaggagttcaagcggatcgttcagcgaatcaaggattttctcaggaatcttgtgcctagaactgagtcc

SEQ ID NO: 145455 - DNA, 510 bp, Artificial Sequence
  derived and/or modified sequence
atgaaaacgcaacgtgatgggcacagcctcggcaggtggagcctggtgctcctcctactagggctggtcatgcctcttgcaattatcgcccaggtcctcagctataaagaggctgtcctcagggcaatcgacgggatcaaccagcgaagcagtgatgcgaacttgtaccgactgctcgacttggacccgaggccaaccatggacggtgaccccgatactcctaagcccgtctcatttaccgttaaggaaactgtgtgcccacgcaccacacaacagtcacccgaggactgcgacttcaagaaggatggacttgttaagcgatgtatgggcaccgttaccctcaatcaggcccgaggatcgtttgacatttcttgtgataaggacaataaaagattcgccctgctcggtgacttctttcgaaagagcaaagagaaaataggaaaagaattcaaacgcatcgtccagaggataaaggactttctgagaaatttggtgccccgtaccgagtcc

SEQ ID NO: 145456 - DNA, 510 bp, Artificial Sequence
  derived and/or modified sequence
atgaaaacacagcgcgacggacactctttgggccggtggtctctagtgctgctgctgctagggttggtgatgcctctggctataatagcacaggtcctctcctataaggaagcagtgctgcgggcgatcgatggcattaatcagcgaagctctgatgctaacctctatcgcctcctcgacctggaccctcggcctaccatggacggagatccagacacaccaaaacctgtgtcgttcacagtcaaggagacagtgtgccctcgaaccactcagcagagcccagaagattgtgatttcaagaaagatggtcttgtgaaaaggtgcatgggcacagtcaccctaaatcaagcacgagggagcttcgacatctcttgtgacaaggacaacaaaaggtttgcactcttgggcgacttctttcgcaaatcaaaagaaaaaataggaaaggaatttaagcggatcgtacagcggattaaggattttttaagaaatttggttccacggacagagtct

SEQ ID NO: 145457 - DNA, 510 bp, Artificial Sequence
  derived and/or modified sequence
atgaagactcagcgagacggccatagtctgggccggtggagccttgtgctcctcttgttgggtttagtgatgccgctcgccataatcgctcaggtgctatcctacaaagaggcagtcctgagagcaatcgatgggatcaaccagcgttcttcagacgcgaatctgtatagattactagacttggacccccggccgacaatggacggtgaccctgatactcccaaaccggtttcattcacagttaaggagacagtctgccccagaacaactcagcagtcccccgaggactgcgattttaagaaggatgggctggttaagcggtgcatggggacggtgactctgaaccaagcacgtggatctttcgacattagctgtgataaggacaataaacggtttgcactgctcggagacttctttaggaaatccaaagagaaaattgggaaggagttcaagagaatcgtgcagaggatcaaagacttcttgcggaatctcgtcccacggactgagagc

SEQ ID NO: 145458 - DNA, 510 bp, Artificial Sequence
  derived and/or modified sequence
atgaagacccaacgagatggacactctttgggccggtggagtttggtcctcctccttctggggttagtgatgccactggccataattgctcaagttttatcgtataaggaggcagtccttcgggctatcgatgggataaaccagcggagctccgacgcgaacctgtaccgccttcttgaccttgaccctaggccaactatggatggcgaccctgatactcccaaacccgtgtccttcacagtcaaggagacggtgtgcccgaggacaacccagcagtcacctgaggactgcgatttcaagaaggacgggctggtcaaaaggtgtatggggacggtaacacttaaccaagcacgggggtccttcgatatttcttgtgacaaagacaataaacggtttgctctattgggggatttttttagaaaatcaaaggaaaagatcgggaaggagtttaaacggattgtgcagcgcatcaaggacttcctccgaaacctggtgcctcgtacagaaagc

SEQ ID NO: 145459 - DNA, 510 bp, Artificial Sequence
  derived and/or modified sequence
atgaaaacccaacgggatggtcatagtctcggtcgatggtcgcttgtccttcttctgctggggttggtcatgcctctggccattattgcacaagtcttgagctacaaggaagcggtgctcagggcaattgatggtatcaaccagagatcaagcgatgcaaatctgtaccgacttctggatttggatccaagaccaactatggacggagatcctgacactcctaaacccgtctcctttaccgttaaggaaactgtatgccccagaacgacccaacagtccccagaagattgtgacttcaaaaaagacggacttgtaaagaggtgcatgggaactgtgaccctcaaccaggccagaggttcgttcgatatttcctgtgataaggataacaagcgatttgcactgctgggagacttctttagaaagtccaaggagaagataggaaaagagtttaagcgcatcgtgcaacgcatcaaggacttccttcggaatctggtcccacggactgaatct

SEQ ID NO: 145460 - DNA, 510 bp, Artificial Sequence
  derived and/or modified sequence
atgaaaacccagcgcgatggtcattctttgggacgctggtcgcttgtcctgctcctgctgggactggtgatgcctctcgcgatcattgcacaagtgctctcctacaaggaggccgtcctgcgggcaatcgacggaatcaaccaacggagctctgacgctaatctttacaggcttctggatctcgatcctcgtccgactatggatggcgaccccgacacgcccaagccagtgtcctttactgtgaaagagactgtgtgtccacgcactactcagcaaagccctgaagattgcgacttcaagaaggacgggttggtgaagcgatgtatgggtactgtgacccttaatcaagcacgcggctcatttgatatcagctgtgacaaggataacaagcgctttgccctcttgggggacttctttcgcaagtcgaaggaaaagattggtaaagaattcaagagaattgtgcaacggatcaaagattttcttaggaatctggtaccgcggaccgaatcg

SEQ ID NO: 145461 - DNA, 510 bp, Artificial Sequence
  derived and/or modified sequence
atgaagacgcagagggacggccactccctggggcgttggtctctcgtgctgctgcttctgggtctcgttatgccactggctatcatcgcacaggtgctaagctacaaagaagctgtcttgcgggccatagatggcatcaatcagcgtagttcagatgcgaacttgtacagactgctagatctggacccccggcctaccatggacggtgaccctgacacacctaagcccgttagctttactgtaaaggagaccgtttgcccacggaccacccaacagtcccctgaagactgtgatttcaaaaaagatggcctggtgaagcggtgcatgggcaccgtgacactgaatcaggcacgcggatcatttgatatcagctgcgacaaagacaacaaaaggttcgctttgttaggggatttcttcagaaagtcaaaagagaagatcggaaaggagtttaagcgcattgttcagcgtatcaaagacttcctccggaacctggtgccacggactgagtcc

SEQ ID NO: 145462 - DNA, 510 bp, Artificial Sequence
  derived and/or modified sequence
atgaaaacacagcgcgatggacactctctcggcaggtggagcctggtcctgttactcctgggattagtgatgcccctggcaatcattgctcaggtcttgtcatacaaagaggcagtcctccgggccattgatggtatcaatcaacggtcttcagatgcaaacctttatagactcctcgacctggatccaagacctacgatggatggggaccccgacactcccaagcctgtaagtttcaccgtaaaggaaaccgtctgcccacgcactacacagcagtcaccggaagattgtgacttcaaaaaggacggactggtgaaaaggtgtatgggcaccgtgacactgaaccaggcgagggggagttttgatattagctgtgacaaagacaataaaagatttgctctgttaggtgactttttccggaagtcaaaggagaagatagggaaggagtttaaacggatagttcagaggattaaggactttctgcggaacctggtgcctcgaacggagtct

SEQ ID NO: 145463 - DNA, 510 bp, Artificial Sequence
  derived and/or modified sequence
atgaaaacccagagagacgggcattctctggggcgctggtcactcgtcttgctgctgttgggacttgtcatgcccctcgccattattgcacaggtcttgtcctacaaggaagccgtcttgcgggctatcgatggcataaatcagaggtccagtgatgccaacttatatagacttctcgatctcgatcctcgacctacaatggatggtgaccccgacacccccaaacctgtttcttttacagtcaaggagactgtgtgcccacgaaccacgcagcagtcccccgaggactgcgatttcaagaaggacgggctagtcaaaagatgcatgggaaccgtgaccttgaaccaggcaagaggatcgtttgacatctcgtgcgataaagataataagcggttcgctctgctgggggatttcttccgtaaatccaaagagaagatcggaaaagaatttaaacgtatcgtacagcgcataaaggattttcttcgaaacctggtccccaggacagaatcc

SEQ ID NO: 145464 - DNA, 510 bp, Artificial Sequence
  derived and/or modified sequence
atgaaaacgcaacgtgatggtcattcgctaggtcgttggtcgttagttctattattattaggtttagtaatgccgctagcgataatagcgcaagtactatcgtataaagaagcggttttacgagcgatagatggtataaatcaacgatcgtcggatgcgaatctatatcgtttactagatttagatccgcgtccgacgatggatggtgatccggatacgccgaaaccggtatcgtttacggttaaagaaacggtttgtccgcgtacgacgcaacaatcgccggaagattgtgattttaaaaaagatggtctagttaaacgatgtatgggtacggttacgttaaatcaagcgcgaggttcgtttgatatatcgtgtgataaagataataaacgttttgcgttattaggtgatttttttcgaaaatcgaaagaaaaaataggtaaagaatttaaacgtatagttcaacgtataaaagattttttacgaaatttagttccgcgtacggaatcg

SEQ ID NO: 145465 - DNA, 510 bp, Artificial Sequence
  derived and/or modified sequence
atgaaaactcaaagggacggacattcccttggcagatggagccttgtgctcctccttcttggattggtgatgcctctcgccatcattgcccaagtgctttcatacaaggaggcggtgctccgagcaattgacggaattaaccagcgatcgtccgatgcgaacctgtacaggctgcttgatctcgatcctagacctactatggatggcgatcccgacacgccgaaacccgtgtcattcaccgtcaaggaaacggtctgtccacgcactacccaacagtccccggaggattgtgatttcaagaaggatggtttggtgaaacgatgcatgggtacggttaccctgaatcaggcacgcggctcgtttgatatctcctgcgacaaggacaacaagaggtttgcactgttgggggacttcttccgcaagagcaaagaaaagataggcaaggaattcaaaagaatagtgcaacggatcaaggattttcttagaaatttggtgccaagaactgaaagc

SEQ ID NO: 145466 - DNA, 510 bp, Artificial Sequence
  derived and/or modified sequence
atgaaaacgcagagggacggccattcccttggaagatggagccttgtccttttgctcctcggccttgttatgcctctcgcaattatcgcacaagtcctcagctacaaggaggcagtgcttcgcgccattgatggtatcaatcaacgctcgtccgacgcaaacctgtaccggctgcttgatctggatccccgccctaccatggacggagatccggatacccctaagcctgtgtccttcaccgtgaaggaaaccgtgtgtcctcgcactactcagcaatcacctgaagattgtgatttcaaaaaagatggactggtgaagagatgcatggggaccgttaccctgaatcaagcaaggggatcatttgatattagctgtgataaggataacaaacgatttgccctgctcggagatttcttccgcaagagcaaggaaaagattggcaaggagtttaagcgcatagtccagaggattaaggatttcctcagaaatctcgtgcctagaactgaatcg

SEQ ID NO: 145467 - DNA, 510 bp, Artificial Sequence
  derived and/or modified sequence
atgaaaacgcaacgcgacgggcacagcctcgggcgctggtcattggttcttctgctgctgggattagtcatgcccctggccattatcgcacaagtcctcagctacaaggaagcggtactccgagctatcgacggcattaatcagcggtccagtgacgccaatttgtaccggctcctagacttggaccccagacctacaatggatggagatcccgacaccccgaaaccggtctcctttactgttaaagagactgtttgcccacgcacaacacagcagtccccggaggattgcgatttcaagaaagacggtttagttaagcgctgtatgggcaccgtcactctgaatcaggcccgagggtcatttgatatctcctgcgataaggataataagcgattcgccttgcttggcgacttttttaggaagtccaaggaaaagattggaaaagagtttaaaagaatcgtacaaaggatcaaggattttctgcgaaacctagtgccaaggactgagagt

SEQ ID NO: 145468 - RNA, 656 nt, Artificial Sequence
  derived and/or modified sequence
gggaaauaagagagaaaagaagaguaagaagaaauauaagagccaccaugaaaacacaacgggauggacacucgcuuggacgcuggucccuugucuuguugcugcucggccucgugaugccucucgccaucauugcgcaagugcucucauacaaagaggcugucuugagagcgaucgaugguaucaaccagagaucgucagaugccaaucuguaucgguugcuggaccuugacccccgaccaacaauggacggggauccggauacccccaagcccgugagcuuuaccguaaaagaaacgguguguccgaggacuacucagcagucccccgaggacugcgauuucaagaaggacgggcucgucaagcgguguauggggacgguaacgcugaaccaggcgaggggaucauucgauauuucgugcgacaaggacaacaaacgguuugcacuucuuggugacuuuuuccgcaagucgaaagagaagaucggaaaagaauucaagaggaucguccagcgcauuaaggacuuuuugagaaaucucgugccgcgaacagaaagcuaaugagcugccuucugcggggcuugccuucuggccaugcccuucuucucucccuugcaccuguaccucuuggucuuugaauaaagccugaguaggaag

SEQ ID NO: 145469 - RNA, 656 nt, Artificial Sequence
  derived and/or modified sequence
gggaaauaagagagaaaagaagaguaagaagaaauauaagagccaccaugaaaacgcagcgaaauggacccagccucggucgcuggucauuggugcuucugcuucugggucuggugaugccucucgcuaucguagcgcaagucuugucguaucaagaggcgguccuuagggccauugauggaaucaaccagagaucgucggaugcaaaucucuaccggcuucucgauuuggacccgaggccaacuauggacggggacccggauacgccgaaacccguguccuuuacgguaaaagaaacagugugcccucgcacaacccagaagucccccgaagauugugacuucaaagaggauggguuggucaagcgaugcgucggaaccgugauuuugaaucaggccagggacucguucgacaucagcugugacaaagacaaccggagaucagcgagacuuggaaacuucuuucggaaggugaaagagaagaucgguggcgggcugaagaaggucggacagaagauuaaggacuuucucgggaaccucguaccccgcacugcaucauaaugagcugccuucugcggggcuugccuucuggccaugcccuucuucucucccuugcaccuguaccucuuggucuuugaauaaagccugaguaggaag

SEQ ID NO: 145470 - RNA, 513 nt, Artificial Sequence
  derived and/or modified sequence
augaagacucagagagaugggcauagccucggacgcuggucccuggugcuccuccuguuaggauuagucaugccacucgcuauuauagcacagguacucuccuacaaagaggcuguguugagagcuauugauggaauuaaccagagaaguucugacgcuaacuuguauaggcugcuggaucuggacccucgcccaacaauggauggcgauccagacacccccaaaccuguuaguuucaccgucaaggaaacuguguguccccgaacuacacagcaaucucccgaggauugugacuucaagaaagacgggcucgucaaaagaugcaugggcaccguaacccugaaucaggccagaggaagcuucgacaucucgugugauaaagacaacaagcguuucgcucuacugggagacuuuuuuaggaagucuaaagagaagauaggaaaagaauuuaaaagaaucgugcagcgcaucaaagacuuccucagaaaccuggugccgcgaaccgaaaguuag

SEQ ID NO: 145471 - RNA, 513 nt, Artificial Sequence
  derived and/or modified sequence
augaagacccagcgcgauggccauucccugggacguuggagucuuguccugcuguuguuggggcugguuaugccacucgccauuaucgcucaaguacuuucuuacaaagaagcuguacuucgugcuauagacggaaucaaucagcggucuucugacgcuaauuuauaccgccuacuggaccuugauccccgaccaacuauggacggggacccugacacccccaagcccgucaguuuuacugugaaagaaacuguuugcccgcguacgacccagcagaguccugaagauugcgacuucaaaaaggacgggcuggugaagcgauguaugggaaccguuacccugaaucaggcaagaggcucuuucgacauuagcugugacaaagauaacaaaagguuugcccuguugggcgauuuuuuuagaaagucaaaagagaaaaucggcaaggaauucaaaagaauuguacagagaaucaaggauuuccugagaaaccugguaccaaggacugaaucguag

SEQ ID NO: 145472 - protein, 434 aa, Artificial Sequence
  derived and/or modified sequence
MAEDSGKKKRRKNFEAMFKGILQSGLDNFVINHMLKNNVAGQTSIQTLVPNTDQKSTSVKKDNHKKKTVKMLEYLGKDVLHGVFNYLAKHDVLTLKEEEKKKYYDTKIEDKALILVDSLRKNRVAHQMFTQTLLNMDQKITSVKPLLQIEAGPPESAESTNILKLCPREEFLRLCKKNHDEIYPIKKREDRRRLALIICNTKFDHLPARNGAHYDIVGMKRLLQGLGYTVVDEKNLTARDMESVLRAFAARPEHKSSDSTFLVLMSHGILEGICGTAHKKKKPDVLLYDTIFQIFNNRNCLSLKDKPKVIIVQACRGEKHGELWVRDSPASLALISSQSSENLEADSVCKIHEEKDFIAFCSSTPHNVSWRDRTRGSIFITELITCFQKYSCCCHLMEIFRKVQKSFEVPQAKAQMPTIERATLTRDFYLFPGN

SEQ ID NO: 145473 - protein, 292 aa, Artificial Sequence
  derived and/or modified sequence
MAALLQIEAGPPESAESTNILKLCPREEFLRLCKKNHDEIYPIKKREDRRRLALIICNTKFDHLPARNGAHYDIVGMKRLLQGLGYTVVDEKNLTARDMESVLRAFAARPEHKSSDSTFLVLMSHGILEGICGTAHKKKKPDVLLYDTIFQIFNNRNCLSLKDKPKVIIVQACRGEKHGELWVRDSPASLALISSQSSENLEADSVCKIHEEKDFIAFCSSTPHNVSWRDRTRGSIFITELITCFQKYSCCCHLMEIFRKVQKSFEVPQAKAQMPTIERATLTRDFYLFPGN

SEQ ID NO: 145474 - DNA, 1305 bp, Artificial Sequence
  derived and/or modified sequence
atggccgaggactctggcaagaagaagcggaggaagaatttcgaggccatgttcaaaggaatcctacagtcagggctcgataacttcgtaattaaccacatgctcaaaaacaatgtcgccggacaaaccagtattcagacactggtgcctaatactgaccagaaatctacaagcgtaaagaaagataaccataaaaagaagacggtgaaaatgctcgaatacctggggaaggatgtgctacatggagtattcaactacctggccaaacatgacgtcctcaccttgaaagaggaagaaaagaaaaagtactacgatacaaaaatcgaggataaggctctgattctggttgattctttacggaagaatcgggtagcgcaccagatgttcacgcagaccctgttgaatatggaccagaagatcaccagcgttaagcctttgctgcagatagaggcaggcccccctgagtccgcagagtctactaacatcctaaaactatgtcctcgtgaagagttcctgcggctgtgcaaaaagaatcatgacgagatttacccgatcaagaaacgagaagaccggaggcggttggcccttataatctgcaataccaagtttgatcacttgcccgcgcggaacggcgcccactacgacattgtcggcatgaaaagactcttacagggtcttgggtacacagtggttgatgagaaaaacctcactgcccgcgacatggaatcagtgttgagagctttcgccgcccggcccgagcataagagttcagactccaccttcctcgttctgatgagccacggaattctcgaaggtatttgcggcactgcacacaaaaaaaaaaagccggatgtgctcctgtacgacaccatttttcagattttcaataaccgaaattgcctgtccttgaaggacaagccaaaagtgattatcgtgcaagcttgtaggggcgagaagcacggagagctttgggtgagagactcccctgccagcctcgctctaatcagttcacaaagcagtgaaaacctggaggccgatagcgtgtgtaagatccacgaagaaaaagattttatcgccttttgttccagtactccccataacgtgtcttggagggatcgaactcgtggatctatcttcataaccgagctgatcacgtgtttccaaaagtattcctgttgttgtcatctgatggagattttcagaaaagtgcagaaaagctttgaagtcccacaggccaaagcccagatgccgactatcgagagggccactcttacaagagatttctacctgttccctggtaattag

SEQ ID NO: 145475 - DNA, 1305 bp, Artificial Sequence
  derived and/or modified sequence
atggctgaagattctgggaagaagaagaggaggaagaactttgaggccatgttcaagggcatcctgcagagcggcctggacaactttgtgatcaaccacatgctgaagaacaacgtggccggccagaccagcatccagaccctggtgcccaacacagaccagaagagcacctctgtgaagaaggacaaccacaagaagaagacagtgaagatgctggagtacctgggcaaggatgtgctgcatggagtcttcaactacctggccaagcatgatgtgctgaccctgaaggaggaggagaagaagaagtactatgacaccaagattgaggacaaggccctgatcctggtggacagcctgaggaagaacagagtggcccaccagatgttcacccagaccctgctgaacatggaccagaagatcacctctgtgaagcccctgctgcagattgaagctggccccccagagagcgctgagagcaccaacatcctgaagctgtgcccccgggaggagttcctgcggctgtgcaagaagaaccatgatgagatctaccccatcaagaagagagaagatagaagaaggctggccctgatcatctgcaacaccaagtttgaccacctgcctgccagaaatggagcccactatgacatcgtgggcatgaagaggctgctgcagggcctgggctacacagtggtggatgagaagaacctgacagcccgggacatggagagcgtgctgcgggcctttgctgcccggcctgagcacaagagcagtgacagcaccttcctggtgctgatgagccacggcatcctggagggcatctgtggcacagcccacaagaagaagaagccagatgtgctgctgtatgacaccatcttccagatcttcaacaacagaaactgcctgagcctgaaggacaagcccaaggtgatcatcgtgcaggcctgccgcggggagaagcacggggagctgtgggtgcgggacagccctgccagcctggccctgatcagcagccagagcagcgagaacctggaggccgacagcgtgtgcaagatccacgaggagaaggacttcatcgccttctgcagcagcaccccccacaacgtgtcctggagggacaggacccggggcagcatcttcatcacagagctgatcacctgcttccagaagtacagctgctgctgccacctgatggagatcttcaggaaggtgcagaagagctttgaggtgccccaggccaaggcccagatgcccaccatcgagcgggccaccctgacccgggacttctacctgtttcctggcaactag

SEQ ID NO: 145476 - DNA, 1305 bp, Artificial Sequence
  derived and/or modified sequence
atggccgaggacagcggcaagaagaagcggcggaagaacttcgaggcgatgttcaaagggatcctccaaagcggacttgacaacttcgtgattaatcacatgcttaagaataacgtcgccggccagacatccatacagactctcgtcccgaacacggatcagaagagtaccagtgtgaagaaagataaccataagaagaaaaccgttaaaatgctcgaatatctgggcaaagatgtgttgcatggcgtgtttaattatttggcaaaacatgatgtcctgactctcaaagaggaggagaaaaaaaagtattacgataccaagatagaagacaaagcacttattcttgtggattcactgcgaaagaacagggtcgcacaccagatgttcacacagacactgctaaatatggatcagaagattacaagcgtaaaacccttgctgcagattgaggcagggccccccgagagcgcagaatccacgaacatcctgaagctgtgtccacgtgaggagttcctgagactgtgtaagaaaaatcatgatgagatctatcccatcaagaaacgggaggatcgtagacgcttagccctgatcatctgtaatactaaattcgatcacctgccagcccggaatggggctcattacgacattgtagggatgaaacgcttactgcaggggctcggctacaccgtcgtcgatgaaaagaacctcactgccagagatatggaatccgttttgcgtgcatttgcggctaggcccgaacacaagtcgagcgatagtactttcctcgtgctcatgtcccacggaattctcgaaggcatttgtgggactgcccacaagaagaagaagccggatgtgctgctatatgatacaatcttccaaatttttaacaacaggaattgtctgtctcttaaggataaacctaaggtgattattgtacaggcatgcagaggcgagaagcacggcgagctgtgggtcagagactcccccgcctcactggcgctgatttcttcacagtcttccgagaacctggaagcggattctgtgtgcaagatccacgaagagaaggacttcattgcattctgttcttcaaccccccacaatgtgtcctggcgagatcgaacccgggggtctattttcatcaccgaactcattacctgtttccagaaatattcgtgctgttgtcatcttatggagatctttcgaaaggtgcagaagtctttcgaagtgccccaggcgaaggcccagatgccaactatcgagcgcgccaccctgactagggacttttaccttttcccgggtaattag

SEQ ID NO: 145477 - DNA, 1305 bp, Artificial Sequence
  derived and/or modified sequence
atggctgaggattctggcaaaaagaagagaagaaagaatttcgaagccatgtttaaaggaattctgcagtctggcctggataattttgtgattaaccatatgctgaagaataatgtcgctggccaaactagcatccagacccttgtgccaaacacagatcagaaatcaacatccgtcaagaaggacaatcacaagaagaagaccgtcaaaatgctggagtacctgggcaaagatgtgctccatggtgtatttaattaccttgccaagcacgacgttctcaccctgaaggaggaagaaaagaagaagtactatgataccaagatagaggataaggcgcttattctcgttgactccctgaggaaaaatcgcgtggcccaccaaatgttcacgcagacactgctcaatatggatcagaagattacgtctgtgaagcctcttctgcagatcgaagccggtccaccggagagcgctgagtctacgaatatacttaagctgtgtcctcgcgaagaattcttgaggctctgtaagaagaaccacgacgagatatatcccatcaagaaacgagaggatagaaggcgactcgctctcatcatttgtaacacaaaattcgaccatctacccgcacgtaacggagctcattatgacattgtgggcatgaagcgcctgctgcaggggcttggttatactgtggtggacgaaaagaacctgacagccagagatatggagagcgtgctgagggcttttgctgcacgtcctgaacacaagtccagcgactccactttcctggtcctcatgtctcatggaattctagaaggcatctgcggcacggcccacaaaaagaagaaacccgacgtcctcctgtatgacaccattttccaaatatttaacaatcggaactgcctaagcctcaaggacaaaccaaaggtgatcatcgtgcaagcttgtagaggcgagaagcatggcgagttgtgggtgagggatagcccggcatccctggcacttatctcttcccagtcttcagaaaacctcgaagcagacagcgtgtgtaagatccatgaagagaaggactttatcgccttttgttcttctaccccacacaatgtgtcttggcgagaccgaacccgcggttctatttttataaccgagctgatcacctgtttccagaagtattcttgctgttgtcatctaatggagatcttccgaaaggtgcagaagtcgttcgaggtgccccaggcaaaagcgcagatgccgacaatcgagcgggctactctgactcgcgacttttacctttttcctggaaattag

SEQ ID NO: 145478 - DNA, 1414 bp, Artificial Sequence
  derived and/or modified sequence
atggctgaagacagtggcaaaaaaaaaaggcgtaagaattttgaagctatgttcaaaggtatccttcagagtggattggataacttcgtgataaaccacatgctaaagaacaacgtggctggacaaacatctatccagaccctagtacctaatacggatcaaaagtcgaccagtgtaaaaaaagacaaccacaaaaaaaaaacagttaagatgttggaatacctgggcaaagatgttcttcatggtgtttttaattatttggcaaaacacgatgttctgacattgaaggaagaggaaaagaaaaaatattatgataccaaaattgaagacaaggccctgatcttggtagactctttgcgaaagaatcgcgtggctcatcaaatgtttacccaaacacttctcaatatggaccaaaagatcaccagtgtaaaacctcttctgcaaatcgaggctggaccacctgagtcagcagaatctacaaatatactcaaactttgtcctcgtgaagaattcctgagactgtgtaaaaaaaatcatgatgagatctatccaataaaaaagagagaggaccgcagacgcctggctctcatcatatgcaatacaaagtttgatcacctgcctgcaaggaatggggctcactatgacatcgtggggatgaaaaggctgcttcaaggcctgggctacactgtggttgacgaaaagaatctcacagccagggatatggagtcagtgctgagggcatttgctgccagaccagagcacaagtcctctgacagcacgttcttggtactcatgtctcatggcatcctagagggaatctgcggaactgcgcataaaaagaaaaaaccggatgtgctgctttatgacaccatcttccagatattcaacaaccgcaactgcctcagtctaaaggacaaacccaaggtcatcattgtccaggcctgcagaggtgaaaaacatggggaactctgggtcagagactctccagcatccttggcactcatctcttcacagtcatctgagaacctggaggcagattctgtttgcaagatccacgaggagaaggacttcattgctttctgttcttcaacaccacataacgtgtcctggagagaccgcacaaggggctccatcttcattacggaactcatcacatgcttccagaaatattcttgctgctgccacctaatggaaatatttcggaaggtacagaaatcatttgaagttccacaggctaaagcccagatgcccaccatagaacgagcaaccttgacaagagatttctacctctttcctggcaattgaaaatgaaaccacaggcagcccagccctcctctgtcaacatcaaagagcacatttaccagtatagcttgcatagtcaatatttggtatttcaataaaagtaaagactgta

SEQ ID NO: 145479 - DNA, 1305 bp, Artificial Sequence
  derived and/or modified sequence
atggccgaggacagcggcaagaagaagagaagaaagaacttcgaggccatgttcaagggcatcctgcagagcggcctggacaacttcgtgatcaaccacatgctgaagaacaacgtggccggccagaccagcatccagaccctggtgcccaacaccgaccagaagagcaccagcgtgaagaaggacaaccacaagaagaagaccgtgaagatgctggagtacctgggcaaggacgtgctgcacggcgtgttcaactacctggccaagcacgacgtgctgaccctgaaggaggaggagaagaagaagtactacgacaccaagatcgaggacaaggccctgatcctggtggacagcctgagaaagaacagagtggcccaccagatgttcacccagaccctgctgaacatggaccagaagatcaccagcgtgaagcccctgctgcagatcgaggccggcccccccgagagcgccgagagcaccaacatcctgaagctgtgccccagagaggagttcctgagactgtgcaagaagaaccacgacgagatctaccccatcaagaagagagaggacagaagaagactggccctgatcatctgcaacaccaagttcgaccacctgcccgccagaaacggcgcccactacgacatcgtgggcatgaagagactgctgcagggcctgggctacaccgtggtggacgagaagaacctgaccgccagagacatggagagcgtgctgagagccttcgccgccagacccgagcacaagagcagcgacagcaccttcctggtgctgatgagccacggcatcctggagggcatctgcggcaccgcccacaagaagaagaagcccgacgtgctgctgtacgacaccatcttccagatcttcaacaacagaaactgcctgagcctgaaggacaagcccaaggtgatcatcgtgcaggcctgcagaggcgagaagcacggcgagctgtgggtgagagacagccccgccagcctggccctgatcagcagccagagcagcgagaacctggaggccgacagcgtgtgcaagatccacgaggagaaggacttcatcgccttctgcagcagcaccccccacaacgtgagctggagagacagaaccagaggcagcatcttcatcaccgagctgatcacctgcttccagaagtacagctgctgctgccacctgatggagatcttcagaaaggtgcagaagagcttcgaggtgccccaggccaaggcccagatgcccaccatcgagagagccaccctgaccagagacttctacctgttccccggcaactag

SEQ ID NO: 145480 - protein, 567 aa, Artificial Sequence
  derived and/or modified sequence
MPDSPVDVKTQSRLTPPTMPPPPTTQGAPRTSSFTPTTLTNGTSHSPTALNGAPSPPNGFSNGPSSSSSSSLANQQLPPACGARQLSKLKRFLTTLQQFGNDISPEIGERVRTLVLGLVNSTLTIEEFHSKLQEATNFPLRPFVIPFLKANLPLLQRELLHCARLAKQNPAQYLAQHEQLLLDASTTSPVDSSELLLDVNENGKRRTPDRTKENGFDREPLHSEHPSKRPCTISPGQRYSPNNGLSYQPNGLPHPTPPPPQHYRLDDMAIAHHYRDSYRHPSHRDLRDRNRPMGLHGTRQEEMIDHRLTDREWAEEWKHLDHLLNCIMDMVEKTRRSLTVLRRCQEADREELNYWIRRYSDAEDLKKGGGSSSSHSRQQSPVNPDPVALDAHREFLHRPASGYVPEEIWKKAEEAVNEVKRQAMTELQKAVSEAERKAHDMITTERAKMERTVAEAKRQAAEDALAVINQQEDSSESCWNCGRKASETCSGCNTARYCGSFCQHKDWEKHHHICGQTLQAQQQGDTPAVSSSVTPNSGAGSPMDTPPAATPRSTTPGTPSTIETTPR

SEQ ID NO: 145481 - protein, 577 aa, Artificial Sequence
  derived and/or modified sequence
MPDRTEKHSTMPDSPVDVKTQSRLTPPTMPPPPTTQGAPRTSSFTPTTLTNGTSHSPTALNGAPSPPNGFSNGPSSSSSSSLANQQLPPACGARQLSKLKRFLTTLQQFGNDISPEIGERVRTLVLGLVNSTLTIEEFHSKLQEATNFPLRPFVIPFLKANLPLLQRELLHCARLAKQNPAQYLAQHEQLLLDASTTSPVDSSELLLDVNENGKRRTPDRTKENGFDREPLHSEHPSKRPCTISPGQRYSPNNGLSYQPNGLPHPTPPPPQHYRLDDMAIAHHYRDSYRHPSHRDLRDRNRPMGLHGTRQEEMIDHRLTDREWAEEWKHLDHLLNCIMDMVEKTRRSLTVLRRCQEADREELNYWIRRYSDAEDLKKGGGSSSSHSRQQSPVNPDPVALDAHREFLHRPASGYVPEEIWKKAEEAVNEVKRQAMTELQKAVSEAERKAHDMITTERAKMERTVAEAKRQAAEDALAVINQQEDSSESCWNCGRKASETCSGCNTARYCGSFCQHKDWEKHHHICGQTLQAQQQGDTPAVSSSVTPNSGAGSPMDTPPAATPRSTTPGTPSTIETTPR

SEQ ID NO: 145482 - protein, 69 aa, Artificial Sequence
  derived and/or modified sequence
MPDRTEKHSTMPDSPVDVKTQSRLTPPTMPPPPTTQGAPRTSSFTPTTLTNGTSHSPTALNGAPSPPNG

SEQ ID NO: 145483 - protein, 79 aa, Artificial Sequence
  derived and/or modified sequence
MPDRTEKHSTMPDSPVDVKTQSRLTPPTMPPPPTTQGAPRTSSFTPTTLTNGTSHSPTALNGAPSPPNGFSNGPSSSSS

SEQ ID NO: 145484 - protein, 26 aa, Artificial Sequence
  derived and/or modified sequence
MPDRTEKHSTMPDSPVDVKTQSRLTP

SEQ ID NO: 145485 - protein, 101 aa, Artificial Sequence
  derived and/or modified sequence
MPDRTEKHSTMPDSPVDVKTQSRLTPPTMPPPPTTQGAPRTSSFTPTTLTNGTSHSPTALNGAPSPPNGFSNGPSSSSSSSLANQQLPPACGARQLSKLKR

SEQ ID NO: 145486 - DNA, 3463 bp, Artificial Sequence
  derived and/or modified sequence
tgaataaattattcggcatttagcttatcattctgaatttcactttttgctttttggtgctctgaaacttgcagagagaggtggagtgctaaggggagggtaggggttgtgatactttgcacacacatccctgtcattgttctgcctaaagagacagggctgggttcaaggccacatgtgctcctgtcatcctccacatttctgctccaagtgcaatccggagtgtcagctctccatctgtctctgcctggcaggcgcacgcgcccagcaccctgcctccggcgatgccgccccagcccctctgatggccctcctctctgctgccactcattccagaacaggaggcatgagcccggaacgcgcttgcttttaggagacagccactttctgtgtggtacgctggattcaaggatgcctgatcgtactgagaagcactccacaatgccagactcacctgtggatgtgaagacgcaatctaggctgactcctccaacaatgccacctcccccaactactcaaggagctccaagaaccagttcatttacaccgacaacgttaactaatggcacgagccattctcctacagccttgaatggcgccccctcaccacccaatggcttcagcaatgggccttcctcttcttcctcctcctctctggctaatcaacagctgcccccagcctgtggtgccaggcaactcagcaagctgaaaaggttccttactaccctgcagcagtttggcaatgacatttcacccgagataggagaaagagttcgcaccctcgttctgggactagtgaactccactttgacaattgaagaatttcattccaaactgcaagaagctactaacttcccactgagaccttttgtcatcccatttttgaaggccaacttgcccctgctgcagcgtgagctcctccactgcgcaagactggccaaacagaaccctgcccagtacctcgcccagcatgaacagctgcttctggatgccagcaccacctcacctgttgactcctcagagctgcttctcgatgtgaacgaaaacgggaagaggcgaactccagacagaaccaaagaaaatggctttgacagagagcctttgcactcagaacatccaagcaagcgaccatgcactattagcccaggccagcggtacagtccaaataacggcttatcctaccagcccaatggcctgcctcaccctaccccacctccacctcagcattaccgtttggatgatatggccattgcccaccactacagggactcctatcgacaccccagccacagggacctcagggacagaaacagacctatggggttgcatggcacacgtcaagaagaaatgattgatcacagactaacagacagagaatgggcagaagagtggaaacatcttgaccatctgttaaactgcataatggacatggtagaaaaaacaaggcgatctctcaccgtactaaggcggtgtcaagaagcagaccgggaagaattgaattactggatccggcggtacagtgacgccgaggacttaaaaaaaggtggcggcagtagcagcagccactctaggcagcagagtcccgtcaacccagacccagttgcactagacgcgcatcgggaattccttcacaggcctgcgtctggatacgtgccagaggagatctggaagaaagctgaggaggccgtcaatgaggtgaagcgccaggcgatgacggagctgcagaaggccgtgtctgaggcggagcggaaagcccacgacatgatcacaacagagagggccaagatggagcgcacggtcgccgaggccaaacggcaggcggcggaggacgcactggcagttatcaatcagcaggaggattcaagcgagagttgctggaattgtggccgtaaagcgagtgaaacctgcagtggctgtaacacagcccgatactgtggctcattttgccagcacaaagactgggagaagcaccatcacatctgtggacagaccctgcaggcccagcagcagggagacacacctgcagtcagctcctctgtcacgcccaacagcggggctgggagcccgatggacacaccaccagcagccactccgaggtcaaccaccccgggaaccccttccaccatagagacaacccctcgctagacgtgaactcagaactgtcggaggaaagacaacacaaccaacgcgaaaccaattcctcatcctcagatgctcaaagttgttttttttgtttgtttgtttattagatgaattatcctatttcagtacttcagcaagagagaacctaactgtatcttgaggtggtagtaaaacacagagggccagtaacgggtcgtaatgacttattgtggataacaaagatatcttttctttagagaactgaaaagagagcagagaatataacatgaaatgatagatttgacctcctccctgttattttcaagtagctgggattttaaactagatgacctcattaaccgatgctttaccaaacagcaaaccaagagattgctaattgctgttgaaagcaaaaatgctaatattaaaagtcacaatgttctttatatacaataatggaaaaaaaaaaaagaggaaaaccctcaagggcatgagcattggatacagcagtagacattttaacaagaagatgaatggcgtccgtgggttgctaactgaactttgaagacccgctacaaaacgcgcagatgtgcagcagattggaaggagacacagatgttcggtttttttcctgtttctgaaaagaaataataatatccaggtcaacagaatgaaaaatgaaagatgatttgcaatgggatgtatgaatacagcagcaagaaaaaaaaatgccataatacaaaaggctccatatatatatatatatatatatatatacacacacacacacgcacatatacacacacacacacacacacacacacacacacacacacacacacacacacacacaagtaagagactcagcctgcagttaattagcattctggcagttttgacatcagccagctgccctaaataacccttcaacgtttcttcacttttgcaaggttccacagagtaagacattgggtctattccagctcattcattttatattgaaaaaaataattttaaaaatggtggcttcagctccagcccctttccaaaatttttcaaccccaccctgtttggatttttaattaaaaactagtagttctcttggtgttaaaacacttctgtcctgtgaggtttcccaatggtgtttttcttgtaaatgtgttggacaaatgtgaagatgcattgtagtttaaccatatgcccacatttagtctctttattcctagttggtgagaaacctgtatctttctatgctgcttttatatctgtatgtattagtgatatttctctagtagttaaaaaaaaaaaaaggaaaaaaagactctttttggttgtcctcaag

SEQ ID NO: 145487 - DNA, 1734 bp, Artificial Sequence
  derived and/or modified sequence
atgccagataggactgagaaacatagtacgatgcccgatagcccagttgatgtgaagactcagagcagattgacaccaccgactatgcccccccccccaacaacccagggcgccccccggacctcgtctttcactcccacgactctgacaaatggaacgagccactcccccaccgccctgaacggggcaccgagcccccccaatggattctctaatggacccagctcgtccagttcgagctctttggccaatcaacagctccccccagcatgcggggctcggcagctctctaagctgaagagattcctgacgactctgcagcagttcggaaacgatatctcacccgaaattggagaacgcgtgcgtaccctggtgctcggcctggtcaattcgaccctcactattgaggaattccacagtaaactgcaggaagccacaaactttcctttgcgaccatttgtgatcccttttctgaaagccaacctccctctactgcaacgcgaattgctccattgcgccagattagcaaaacagaatccagctcagtacctggcccagcacgagcagcttctgctagacgcttcaaccacgagtccagtggactcgagcgagttgctcctggatgtgaacgagaatgggaagaggcgcaccccagatcggacaaaggagaacggtttcgatagagagcccctgcactctgaacatcctagcaaaaggccatgcaccattagccccgggcagcgctacagccctaataatggactttcctaccagcctaacggactgccacatcccaccccccctcccccgcagcattacaggttggacgacatggcaatagcgcatcattatagagattcataccgccaccctagccatcgagaccttagagacagaaaccgccccatgggactgcacggcacaagacaggaggagatgattgaccaccgactgacagacagagaatgggccgaagaatggaagcacctggatcatctgttgaactgcattatggacatggtggagaagacacggcgaagtctcacggtgttgcggcgttgccaggaggccgatcgagaggagcttaattactggatccgcagatattcagacgcagaggacctgaagaagggcggtgggtctagctccagtcactcgcggcagcaatctcccgtaaaccctgacccagtcgccctggacgcgcacagggagttcctccacaggcccgcttccgggtacgttcctgaggagatctggaagaaagctgaggaggcagtcaacgaggtgaagaggcaggccatgactgaactgcagaaagccgtgagcgaggctgaaagaaaggcgcacgacatgattactaccgagcgggccaaaatggaaagaacggtggcggaggccaagcggcaggctgcagaagatgctctggcagtaatcaaccaacaagaagatagttctgaatcttgttggaactgtggacggaaagcttccgagacctgctctggttgtaatactgcaaggtattgtgggagcttctgtcagcataaggattgggagaagcaccatcacatctgcgggcagaccctgcaagcacagcaacagggggacacgcctgctgtgtcttcctccgtcacccctaatagtggcgccggatcaccaatggacaccccaccagcagcaactcccaggtcaaccacaccgggaactccttcaacaattgagacgacccccaggtag

SEQ ID NO: 145488 - DNA, 210 bp, Artificial Sequence
  derived and/or modified sequence
atgcctgaccggaccgaaaagcactcgactatgccagacagccccgttgatgtgaagacccaaagcaggctgaccccccccacaatgccacctcctcctactacacagggtgcgcccaggacctcaagtttcacacctacaacgctgacaaacggcactagccacagccccacagcgctgaatggcgccccatcgccccccaacgggtag

SEQ ID NO: 145489 - DNA, 240 bp, Artificial Sequence
  derived and/or modified sequence
atgcccgaccgcacagaaaagcactccaccatgcctgactcccccgtagacgtgaaaactcagagccggctgaccccgccaactatgcctcctcccccgacaactcaaggagccccaagaactagctcctttactcctacgaccctcactaatggtacctcacacagcccaaccgcacttaatggagcacctagccctcctaacggctttagtaacgggcctagctctagcagcagctag

SEQ ID NO: 145490 - DNA, 1734 bp, Artificial Sequence
  derived and/or modified sequence
atgcccgaccggaccgaaaagcactctaccatgccagacagccctgtagacgtgaaaactcagtcaagattaacacccccgacaatgccacccccacccacaacgcaaggcgcccctcggacgtcctcctttacccctaccacgctcacaaatggcactagccacagtccaactgcattgaatggtgctccctctcctcctaacgggttcagcaatgggccaagctcctccagcagctcttctctggccaaccagcaactcccacccgcttgtggggctcggcagctcagcaagctgaagaggtttctgaccactctccagcagtttggcaacgacatctctcccgaaatcggggaacgcgtgaggactttagtgctggggttagtcaattctacattaacgattgaggaattccatagcaagctccaggaggcaaccaatttcccattaagaccatttgtgataccttttctgaaagccaatttaccattgctgcagcgggaattgcttcattgcgccaggctggctaagcagaatccggcccagtacctcgcgcagcacgagcagcttctcctcgatgcctccaccacctcacctgtggactcgtctgagttgttgctggacgtcaatgaaaatggaaaacggcgaacaccagatcgcacaaaagaaaacggatttgatcgggagcccctgcatagtgagcatcccagcaagcggccctgcacaatcagccccggccagcggtattcccccaacaacgggctttcttaccagcccaatgggctgccccacccgacccccccccccccacagcactatagattggacgatatggctattgcccaccactaccgcgactcatacaggcaccccagccaccgagatctgagggaccggaatcggccaatggggctgcacgggactagacaagaggagatgattgaccaccggttgacggaccgtgagtgggctgaggagtggaagcacctcgaccacttattgaattgtatcatggatatggtcgaaaagactagaaggtctctcaccgttctccgccgctgccaggaggccgacagggaggagctgaactattggatccgacgatattcagacgctgaagacctgaaaaaggggggcggcagttcgagttcacactcacgccagcaaagccccgtaaaccccgatccagtggctctggatgcccaccgagagtttctgcaccgtcccgcatccggttacgtgcctgaagagatctggaaaaaggccgaggaggcggttaacgaggtcaagcggcaggccatgacagagctgcagaaggccgtgagcgaggctgagaggaaagcacacgatatgatcactacagaacgcgccaagatggagcgtaccgtcgctgaagccaagaggcaggctgccgaggatgcacttgccgtgattaaccagcaggaagatagctctgaatcatgttggaactgtgggaggaaggcctctgagacatgcagcgggtgcaatacagctagatattgtggctcattctgccagcacaaggattgggagaaacaccaccacatttgtgggcagactctgcaagcccagcagcagggcgacactccagccgtttcaagcagcgtgaccccaaattctggagcaggaagtccaatggacactccgccggctgccacaccaagatccactaccccaggcaccccctctacaattgagacaactccgaggtag

SEQ ID NO: 145491 - DNA, 81 bp, Artificial Sequence
  derived and/or modified sequence
atgccagaccggaccgagaagcactctaccatgcctgactcacccgtggacgtgaagactcagagtcggctcaccccatag

SEQ ID NO: 145492 - DNA, 306 bp, Artificial Sequence
  derived and/or modified sequence
atgccagatcgaaccgagaagcactccacaatgcccgatagtcctgttgatgtgaaaacccagagtagactgacaccaccaaccatgccgccgccgccaacgactcagggcgctcctcggaccagtagctttactcccacaacactaacgaatggcacgtcccacagcccaaccgccctgaacggcgccccatctcccccgaacggtttttccaacggtccgagctcatcttcatccagttccctcgcgaaccagcagttgccccctgcatgcggagcacgacagctgagcaaactgaagcggtag

SEQ ID NO: 145493 - DNA, 1734 bp, Artificial Sequence
  derived and/or modified sequence
atgccagacagaacagagaagcacagcaccatgccagacagccctgtggatgtgaagacccagagccggctgaccccacccaccatgcctcctccacccaccacccagggcgcccccaggaccagcagcttcacccccaccaccctgaccaacggcaccagccacagccccacagccctgaatggagcccccagcccccccaacggcttcagcaatggccccagcagcagcagcagcagcagcctggccaaccagcagctgcccccagcctgtggggcccggcagctgagcaagctgaagcgcttcctgaccaccctgcagcagtttggaaatgacatcagccctgagattggagagcgggtgaggaccctggtgctgggcctggtgaacagcaccctgaccatcgaggagttccacagcaagctgcaggaggccaccaacttccccctgcggccctttgtgatccccttcctgaaggccaacctgcccctgctgcagcgggagctgctgcactgtgcccggctggccaagcagaacccagcccagtacctggcccagcacgagcagctgctgctggatgccagcaccaccagccctgtggacagcagcgagctgctgctggatgtgaatgaaaatggcaagaggaggaccccagacaggaccaaggaaaatggatttgaccgggagcccctgcacagcgagcaccccagcaagaggccctgcaccatcagccctggccagcgctacagccccaacaacggcctgagctaccagcccaacggcctgccccaccccaccccacctccaccccagcactaccgcctggatgacatggccatcgcccaccactacagagacagctaccgccaccccagccaccgggacctgcgggacaggaaccggcccatgggcctgcacggcacccggcaggaggagatgattgaccaccggctgacagaccgggagtgggccgaggagtggaagcacctggaccacctgctgaactgcatcatggacatggtggagaagaccaggaggagcctgactgtgctgcggcgctgccaggaggccgaccgggaggagctgaactactggatccgccgctacagtgatgctgaggacctgaagaagggcggcggcagcagcagcagccacagccggcagcagagccctgtgaacccagaccctgtggccctggatgcccaccgggagttcctgcacaggcctgccagcggctacgtgcctgaggagatctggaagaaggccgaggaggccgtgaatgaggtgaagaggcaggccatgacagagctgcagaaggctgtgtctgaggccgagaggaaggcccatgacatgatcaccacagagcgggccaagatggagaggacagtggccgaggccaagaggcaggccgcagaagatgccctggccgtcatcaaccagcaggaggacagcagcgagagctgctggaactgtggcaggaaggccagcgagacctgcagcggctgcaacacagcccgctactgcggcagcttctgccagcacaaggactgggagaagcaccaccacatctgtggccagaccctgcaggcccagcagcagggcgacaccccagctgtgagcagctctgtgacccccaacagcggggccggcagccccatggacaccccacctgctgccacccccaggagcaccaccccaggcacccccagcaccatcgagaccaccccaagatag

SEQ ID NO: 145494 - DNA, 210 bp, Artificial Sequence
  derived and/or modified sequence
atgccagacagaacagagaagcacagcaccatgccagacagccctgtggatgtgaagacccagagccggctgaccccacccaccatgcctcctccacccaccacccagggcgcccccaggaccagcagcttcacccccaccaccctgaccaacggcaccagccacagccccacagccctgaatggagcccccagcccccccaacggctag

SEQ ID NO: 145495 - DNA, 240 bp, Artificial Sequence
  derived and/or modified sequence
atgccagacagaacagagaagcacagcaccatgccagacagccctgtggatgtgaagacccagagccggctgaccccacccaccatgcctcctccacccaccacccagggcgcccccaggaccagcagcttcacccccaccaccctgaccaacggcaccagccacagccccacagccctgaatggagcccccagcccccccaacggcttcagcaatggccccagcagcagcagcagctag

SEQ ID NO: 145496 - DNA, 81 bp, Artificial Sequence
  derived and/or modified sequence
atgccagacagaacagagaagcacagcaccatgccagacagccctgtggatgtgaagacccagagccggctgaccccctag

SEQ ID NO: 145497 - DNA, 306 bp, Artificial Sequence
  derived and/or modified sequence
atgccagacagaacagagaagcacagcaccatgccagacagccctgtggatgtgaagacccagagccggctgaccccacccaccatgcctcctccacccaccacccagggcgcccccaggaccagcagcttcacccccaccaccctgaccaacggcaccagccacagccccacagccctgaatggagcccccagcccccccaacggcttcagcaatggccccagcagcagcagcagcagcagcctggccaaccagcagctgcccccagcctgtggggcccggcagctgagcaagctgaagaggtag

SEQ ID NO: 145498 - DNA, 574 bp, Artificial Sequence
  derived and/or modified sequence
gattcagaagtcgataagaccaggagaagtgaagatgtaacatgttatctgtcgctcctcttagctggcggagagaatttacatttaaagattagcagagtgagaaagagaaatctgccttttgttgtgtggggtgaggaggaggcatctacccctggccttgacgctatctcccatcacctctgctatccagacaggactcaccgaggcgcacgcgcccagcaccctgcctccggcgatgccgccccagcccctctgatggccctcctctctgctgccactcattccagaacaggaggcatgagcccggaacgcgcttgcttttaggagacagccactttctgtgtggtacgctggattcaaggatgcctgatcgtactgagaagcactccacaatgccagactcacctgtggatgtgaagacgcaatctaggctgactcctccaacaatgccacctcccccaactactcaaggagctccaagaaccagttcatttacaccgacaacgttaactaatggcacgagccattctcctacagccttgaatggcgccccctcaccacccaatggctt

SEQ ID NO: 145499 - DNA, 2453 bp, Artificial Sequence
  derived and/or modified sequence
acttttcctccctctcccgctccgtctcacacgcaccctctgtttattttcctgcctccatctgggccctgctgatattgtaatcaccctgatgcacgttggcttctctcctctccctcctgcgctcacacactcactcacacacaatgtgccatcctgacaaggcttttacttctgataagctccaatgtgtgtttaatgaatacaaagccgcggtctgggtgccgcctcggccgcggccgctctcccgcgctcctttgccagaagctggcggagagaatttacatttaaagattagcagagtgagaaagagaaatctgccttttgttgtgtggggtgaggaggaggcatctacccctggccttgacgctatctcccatcacctctgctatccagacaggactcaccgagtatcaaatgataagaactgagcacactggatgaaataatacttgcactgggagcactaagaaaagattgatctctgggctggtgaacataatctctgtcccagtcagaaaaggagagaggaaattagcagagcgattggtggagaatgatatctgtcaaaagaaacacttggagagcactgagtttagtaataggtgactgccggaaaaaagggaactttgaatattgtcaagaacaggaggcatgagcccggaacgcgcttgcttttaggagacagccactttctgtgtggtacgctggattcaaggatgcctgatcgtactgagaagcactccacaatgccagactcacctgtggatgtgaagacgcaatctaggctgactcctccaacaatgccacctcccccaactactcaaggagctccaagaaccagttcatttacaccgacaacgttaactaatggcacgagccattctcctacagccttgaatggcgccccctcaccacccaatggcttcagcaatgggccttcctcttcttcctcctcctctctggctaatcaacagctgcccccagcctgtggtgccaggcaactcagcaagctgaaaaggttccttactaccctgcagcagtttggcaatgacatttcacccgagataggagaaagagttcgcaccctcgttctgggactagtgaactccactttgacaattgaagaatttcattccaaactgcaagaagctactaacttcccactgagaccttttgtcatcccatttttgaaggccaacttgcccctgctgcagcgtgagctcctccactgcgcaagactggccaaacagaaccctgcccagtacctcgcccagcatgaacagctgcttctggatgccagcaccacctcacctgttgactcctcagagctgcttctcgatgtgaacgaaaacgggaagaggcgaactccagacagaaccaaagaaaatggctttgacagagagcctttgcactcagaacatccaagcaagcgaccatgcactattagcccaggccagcggtacagtccaaataacggcttatcctaccagcccaatggcctgcctcaccctaccccacctccacctcagcattaccgtttggatgatatggccattgcccaccactacagggactcctatcgacaccccagccacagggacctcagggacagaaacagacctatggggttgcatggcacacgtcaagaagaaatgattgatcacagactaacagacagagaatgggcagaagagtggaaacatcttgaccatctgttaaactgcataatggacatggtagaaaaaacaaggcgatctctcaccgtactaaggcggtgtcaagaagcagaccgggaagaattgaattactggatccggcggtacagtgacgccgaggacttaaaaaaaggtggcggcagtagcagcagccactctaggcagcagagtcccgtcaacccagacccagttgcactagacgcgcatcgggaattccttcacaggcctgcgtctggatacgtgccagaggagatctggaagaaagctgaggaggccgtcaatgaggtgaagcgccaggcgatgacggagctgcagaaggccgtgtctgaggcggagcggaaagcccacgacatgatcacaacagagagggccaagatggagcgcacggtcgccgaggccaaacggcaggcggcggaggacgcactggcagttatcaatcagcaggaggattcaagcgagagttgctggaattgtggccgtaaagcgagtgaaacctgcagtggctgtaacacagcccgatactgtggctcattttgccagcacaaagactgggagaagcaccatcacatctgtggacagaccctgcaggcccagcagcagggagacacacctgcagtcagctcctctgtcacgcccaacagcggggctgggagcccgatggacacaccaccagcagccactccgaggtcaaccaccccgggaaccccttccaccatagagacaacccctcgctag

SEQ ID NO: 145500 - DNA, 585 bp, Artificial Sequence
  derived and/or modified sequence
aacataagtgggaagctatttattcccttgttgctgaggttggttgagatcgtactgagaagcactccacaatgccagactcacctgtggatgtgaagacgcaatctaggctgactcctccaacaatgccacctcccccaactactcaaggagctccaagaaccagttcatttacaccgacaacgttaactaatggcacgagccattctcctacagccttgaatggcgccccctcaccacccaatggcttcagcaatgggccttcctcttcttcctcctcctctctggctaatcaacagctgcccccagcctgtggtgccaggcaactcagcaagctgaaaaggttccttactaccctgcagcagtttggcaatgacatttcacccgagataggagaaagagttcgcaccctcgttctgggactagtgaactccactttgacaattgaagaatttcattccaaactgcaagaagctactaacttcccactgagaccttttgtcatcccatttttgaaggccaacttgcccctgctgcagcgtgagctcctccactgcgcaagactggccaaacagaaccctgccc

SEQ ID NO: 145501 - DNA, 572 bp, Artificial Sequence
  derived and/or modified sequence
gagaagaaaatagccagctttagataaagcactataacaaaggcttctagttttatatatcatggtgtccattaaagcttaatagggaagagtccattgaacctggctgggcgcacgcgcccagcaccctgcctccggcgatgccgccccagcccctctgatggccctcctctctgctgccactcattccagaacaggaggcatgagcccggaacgcgcttgcttttaggagacagccactttctgtgtggtacgctggattcaaggatgcctgatcgtactgagaagcactccacaatgccagactcacctgtggatgtgaagacgcaatctaggctgactcctccaacaatgccacctcccccaactactcaaggagctccaagaaccagttcatttacaccgacaacgttaactaatggcacgagccattctcctacagccttgaatggcgccccctcaccacccaatggcttcagcaatgggccttcctcttcttcctcctcctctctggctaatcaacagctgcccccagcctgtggtgccaggcaactcagcaagctgaaaaggtt

SEQ ID NO: 145502 - DNA, 1734 bp, Artificial Sequence
  derived and/or modified sequence
atgcccgaccggaccgagaagcacagcaccatgcccgacagccccgttgatgtgaaaactcagtcacggttgactccaccaacaatgcctcctcctcctacaacacagggcgcgcctaggacaagttcattcacccctacaacgctcactaacggcacctctcactcccctaccgccctgaatggggcaccatccccccccaacggtttctccaatgggccgtcctctagttcttcgtccagcttagccaaccagcaactcccgcctgcatgcggcgccagacagctctcaaaactcaaacgttttctgactacgctgcagcaattcgggaatgatatcagtcccgaaattggagaacgggtacgcaccctggtcctgggcctagttaattctactctcactattgaggagttccactcgaagctgcaggaagccactaactttccgctgcgccccttcgtaattccattcctaaaggccaatttacccctgctccaaagagagctcctacactgcgccaggctcgctaaacaaaacccagcgcagtatctggcccagcatgaacagcttttacttgacgcttctacaacatcaccggtggactcaagcgagttgctgcttgacgtgaacgagaatggaaagcgccgcacaccggatagaaccaaggaaaacggatttgacagagagcctctgcacagcgaacatccatccaaacggccatgtaccatctcaccgggccagagatacagcccaaataatggattatcctatcagcccaatggcttgccgcatcccacccctcctccgccacagcactatcgcttggacgacatggctatcgctcatcattaccgggattcctatcggcacccctctcacagggacttacgtgaccgaaatcgacccatgggtctgcacggaaccaggcaggaagaaatgatcgatcatcgccttacggatagagaatgggcagaagagtggaagcatctcgaccaccttctgaactgcataatggatatggttgaaaagaccagacgctctctgacagtgcttcgaaggtgccaagaggccgatcgtgaagaattgaactactggatcagacgatatagcgacgccgaggacttgaagaagggcggaggaagctctagtagtcattccaggcaacagtcgccggtaaatccggaccccgtggcactggatgcccatcgggaatttctgcatcggccagccagcgggtatgtgcctgaagaaatttggaagaaggcagaggaagcagttaacgaggtgaagcgccaggcaatgactgagttgcagaaggccgtgtcagaggctgagaggaaggcacacgatatgattaccaccgagcgagccaaaatggagcggacagtggccgaagccaaacgccaggcagccgaagacgcgcttgctgtgatcaaccagcaagaagacagttccgaatcatgttggaattgcggtcgaaaggcctcggagacctgttcgggatgcaataccgctaggtattgtggatctttttgccagcacaaagattgggaaaagcatcatcacatctgtggccaaaccttacaagctcaacagcaaggagacacaccagccgtgagctcttctgtgacacccaacagtggggctggttcccctatggatacacctcccgctgccacacctagatctaccaccccggggaccccctcaacaatcgagaccacaccgcggtag

SEQ ID NO: 145503 - DNA, 210 bp, Artificial Sequence
  derived and/or modified sequence
atgcccgaccggaccgagaagcacagcaccatgcccgacagccccgtcgatgtgaagactcaaagcagactgacaccgcccacgatgccgccccctcccaccacccagggcgctcctcgtacatcttcatttactccaacaactctgactaacgggacatcccacagccccacagctctgaatggggccccctcaccacctaatggctag

SEQ ID NO: 145504 - DNA, 240 bp, Artificial Sequence
  derived and/or modified sequence
atgcccgaccggaccgagaagcacagcaccatgcccgacagccccgtggacgtcaagactcagtctaggttaacaccacccactatgccccctcccccaaccactcagggggcgcctcgaacatctagcttcacaccaaccacgcttactaacggcacctcgcacagccccaccgctctgaacggtgcaccatcacccccgaatggattctccaatggcccatctagctcctccagttag

SEQ ID NO: 145505 - DNA, 1734 bp, Artificial Sequence
  derived and/or modified sequence
atgcccgaccggaccgagaagcacagcaccatgcccgacagccccgtggacgtaaaaacgcagagtcgccttactcccccaaccatgccaccccctcccactacccagggtgctccccgcacgtctagttttacccctactaccctaactaatggtacctcacactccccaacagcactcaacggtgctcccagtccacccaatggttttagcaacggaccttcttcttcttcaagcagttccctcgcaaatcagcagttgcccccagcatgtggtgcacggcagttgagtaaattgaagcgattcttgacgactttacaacagttcggtaatgatatcagcccggaaattggggagagagtgcgaacattggtgctgggcttagttaattcgacactgacaatcgaggagttccattcaaagttacaggaagctactaatttccctctgcggccgttcgtcattcctttcctgaaagctaacttgccactgttgcagagagagctcctgcattgtgcacgcctggccaaacagaatcctgctcaatacctggcccagcacgagcagctgctactggacgcatccaccaccagtcctgttgatagctctgagctcctgcttgacgtcaatgagaatggtaagaggaggacccccgaccgaacaaaggagaacggctttgatcgcgagccacttcattccgagcatccctccaaacgcccctgcaccatctcccccggtcagagatacagtcctaacaacggactgtcctatcagcccaatggtctcccccatcccacacccccgcccccgcagcactatcgcctcgatgatatggctatcgcccaccattaccgagactcctacagacatccctctcatagagatctccgggacaggaataggcctatgggattgcacggaaccaggcaagaagagatgattgaccatcggctcaccgatagagagtgggctgaggagtggaaacacctggatcacttgctgaactgcattatggatatggtggagaagacgaggcggagcctgaccgtgctgaggcgctgccaggaagcggaccgagaggagctcaactattggatcaggcgctactctgacgctgaggaccttaagaagggagggggctcaagctctagtcatagccgacagcagagcccagtgaatcccgaccccgttgctctcgacgcccaccgggagtttctccaccggcctgctagcggttatgttccagaggagatctggaagaaggcagaggaagccgtgaacgaagtgaaaaggcaggcgatgacagaacttcagaaggccgtgtcagaagccgagcgtaaagctcacgacatgatcaccaccgagagagcgaagatggagcgtactgtggccgaagcaaaacggcaggcagccgaggatgctctggccgtaattaatcagcaagaagactctagcgagtcgtgctggaactgtggacgcaaagcatcggagacctgttccggctgtaacactgcccggtactgtggaagtttctgtcagcacaaggattgggagaagcaccaccatatttgcggccaaacactacaggcacagcagcagggagatacccccgccgtttcctcatctgtgacacctaattcaggcgcaggatcaccaatggacactcctcccgcagccaccccacggagtacaaccccaggaaccccgtccaccatagaaaccacccctaggtag

SEQ ID NO: 145506 - DNA, 81 bp, Artificial Sequence
  derived and/or modified sequence
atgcccgaccggaccgagaagcacagcaccatgcccgacagccccgtggatgtgaaaacccaaagcaggttaaccccttag

SEQ ID NO: 145507 - DNA, 306 bp, Artificial Sequence
  derived and/or modified sequence
atgcccgaccggaccgagaagcacagcaccatgcccgacagccccgttgacgttaagacacagtctaggctgacccccccaactatgcccccaccgccaaccacacagggcgcaccacgcacgagttccttcacgcccactactcttactaacggcacaagtcacagtccaacggcactgaatggcgccccgtccccaccaaatgggttctcaaacggaccaagctcgtcttcttctagcagtctggctaatcagcagctgcctcccgcatgcggtgctcggcagttgtccaaactgaaacgctag

SEQ ID NO: 145508 - DNA, 1734 bp, Artificial Sequence
  derived and/or modified sequence
atgcctgataggaccgaaaaacactcaacaatgccagacagcccggtcgatgtgaagacccagagccggctgacccccccaactatgccccctcctcctacgactcagggagcccctcggacttccagtttcactcccaccacccttaccaatggaacctcccattcaccaaccgccctaaacggcgctcccagcccccctaatggcttctccaatggacctagcagtagctcttccagttctctcgctaatcagcagctgccacccgcttgtggggctcgacagctttccaaactgaagcggtttctgaccaccctccagcaattcggcaatgacattagccccgaaatcggagagcgcgtcagaaccctggtcctggggttagtgaatagcaccctgaccattgaagagttccactctaaacttcaggaagccactaactttcccctccggccattcgtcattccgtttttgaaagccaaccttcccctgcttcaacgggagctgcttcactgtgcaaggcttgcaaagcaaaatcctgctcagtacctggcccagcacgaacagctgttgcttgatgcttccacaacctctcccgttgactcatctgagctgttgctcgacgtgaacgaaaacggtaaacgccgtaccccagatcggaccaaagaaaacggcttcgacagagaacctctgcactctgagcaccccagtaagcggccttgcactatcagcccgggtcagcggtattctcctaacaatggcctgtcttatcaaccaaatggactgccgcatcccacaccccctcctccccaacactaccggctcgatgatatggcaattgcacaccactatcgcgacagttacagacatcccagccacagagaccttcgcgacagaaaccgacccatgggtttacacgggacccgccaagaggagatgatcgatcataggcttaccgacagagaatgggccgaggaatggaagcacctggatcaccttttgaattgtatcatggacatggttgaaaagaccaggagatccctgacggtccttcgcagatgtcaagaggctgacagagaagaactaaattattggattcggcgatattcggatgctgaagacttaaagaaagggggtgggagcagttcctcccatagtagacagcagtcacccgtgaatcctgaccctgtcgccctggatgcccaccgagagtttctgcaccgccctgcaagtggatacgttcctgaagaaatctggaaaaaggccgaggaggccgtgaacgaggtgaagcgacaggctatgacagagctacaaaaagccgtgtccgaagccgaaagaaaagcacacgacatgatcaccaccgagcgcgctaagatggaaagaacagtagctgaggcaaaaaggcaggctgcagaagatgcgctggctgttatcaaccaacaggaggattcgtctgaatcgtgctggaattgtggcagaaaggcttctgagacttgtagcggctgtaacaccgcacgttactgtggatctttctgccagcacaaggattgggagaaacaccaccatatttgcggacaaacgctgcaggcccaacagcagggagatacccccgcagttagctcatctgtaacacctaattcaggagctggatctcccatggacaccccccctgcggcaaccccccgaagcacaacccccggtacaccctcaacaattgagaccacccctcgctag

SEQ ID NO: 145509 - DNA, 210 bp, Artificial Sequence
  derived and/or modified sequence
atgcctgatagaacagagaagcatagcactatgccagactccccagttgacgtgaagacgcagtcccggttaaccccaccaacaatgcctccacccccaaccacacaaggcgctccgagaacctcaagttttactccgacaacccttaccaatggcacctcccattcgcccacagctcttaatggcgctcctagcccccctaacgggtag

SEQ ID NO: 145510 - DNA, 240 bp, Artificial Sequence
  derived and/or modified sequence
atgcccgacagaaccgaaaaacatagcacgatgccagattcccctgtggatgttaaaacgcaatcgaggttaacgcctcctacaatgcccccaccccctacaacccaaggagcgccacggacttcctccttcacacccacgactctgacaaatggtaccagtcactctcctacagctctgaatggtgctcccagccctcccaatggcttttccaacggtccctctagctcttcctcctag

SEQ ID NO: 145511 - DNA, 1734 bp, Artificial Sequence
  derived and/or modified sequence
atgcctgaccgtaccgagaagcactcaaccatgcctgattcacccgtggacgtgaagacacagagcagacttactcctcccacaatgccccctccccctactacccaaggcgcacctcgcacgtcatcctttacccctacaaccctgacgaatggaacgtcccactctccaactgcacttaatggcgctccaagccctcctaacggcttctccaatggtcccagctcttcctcgagcagctctctggcaaatcagcaattgccccctgcttgcggggcacgccaactgagcaagctgaaaaggttccttacaacgttgcagcagttcggaaatgacatatcccccgagattggtgagcgggttaggacgctggtcctcgggttggtgaacagcacactgactatcgaggagtttcactccaagctacaggaggccacaaatttcccactccggccatttgtgatccctttccttaaggctaatctgcctctacttcagcgcgagttacttcactgcgccaggttggctaaacaaaatccagctcagtacctggcccagcacgagcaactgctgcttgacgccagcaccactagtcccgtcgattcctccgaacttctgctggacgtgaatgaaaatggaaagaggcgtacccctgacaggaccaaggagaatggcttcgatcgcgaaccactccactctgagcacccgtctaagcgaccttgcactatttctccgggacagcgctactccccaaataatggactgtcataccagcccaacggcctgccacacccaactcctcctccaccacagcactataggttggatgatatggctattgcgcatcactatcgagattcttaccgacatccatcccacagggatctgcgtgacaggaatcggccaatggggttacacgggaccaggcaagaggaaatgatcgatcaccggctcaccgatcgtgaatgggcggaggaatggaaacacctggatcacttgctaaactgcataatggatatggtggaaaaaacacgtcgctcgcttacagtcttgaggcgctgccaggaagcagacagggaagagcttaattactggattcggcgatatagcgacgccgaggacttaaagaagggcggaggttcaagctcgagccactctagacagcagagtccggtaaatccagaccccgtagctctcgatgcccatcgagaattcctccataggcctgcctctggatatgttcctgaagaaatctggaaaaaggccgaggaagcggtgaacgaggtaaagaggcaagccatgaccgaacttcagaaagctgtctcagaagcggaaagaaaggcccatgacatgattactacagagagagccaagatggagagaaccgtggcagaagcaaaacgccaggctgcagaggatgccttagcggtcataaaccagcaggaggactcctcggagagttgctggaattgcgggagaaaagcctctgagacgtgtagtggctgtaacaccgctagatactgtgggtcgttttgccagcacaaggactgggagaagcaccaccacatttgtggccagacgttacaggctcaacagcagggtgatactccagcagtcagtagctcagtgacacctaacagtggggctggctctccaatggacactccacccgcagccacgcccagatcaacgactcccggaacaccaagtacaatagaaacaacacctaggtag

SEQ ID NO: 145512 - DNA, 81 bp, Artificial Sequence
  derived and/or modified sequence
atgcccgaccgtactgaaaagcactctacaatgcccgattcgccagtcgacgtcaaaacacagtccaggttgacgccatag

SEQ ID NO: 145513 - DNA, 306 bp, Artificial Sequence
  derived and/or modified sequence
atgccagacaggaccgaaaagcacagcacaatgcctgactcccccgtcgatgttaaaacccagagtcgcttgacaccccctaccatgcctccccctccaactacccagggcgctccaagaacatcatctttcacaccgacgacactcaccaacggtacaagccattccccaacggctctaaatggtgcgccttcccctcctaatggtttcagtaacgggcctagtagcagttcctcttcctcactggctaaccagcaactgccccctgcgtgtggcgcacgtcagctttccaaattgaaacggtag

SEQ ID NO: 145514 - DNA, 1734 bp, Artificial Sequence
  derived and/or modified sequence
atgcccgacagaaccgagaagcacagcaccatgcccgacagccccgtggacgtgaagacccagagcagactgaccccccccaccatgccccccccccccaccacccagggcgcccccagaaccagcagcttcacccccaccaccctgaccaacggcaccagccacagccccaccgccctgaacggcgcccccagcccccccaacggcttcagcaacggccccagcagcagcagcagcagcagcctggccaaccagcagctgccccccgcctgcggcgccagacagctgagcaagctgaagagattcctgaccaccctgcagcagttcggcaacgacatcagccccgagatcggcgagagagtgagaaccctggtgctgggcctggtgaacagcaccctgaccatcgaggagttccacagcaagctgcaggaggccaccaacttccccctgagacccttcgtgatccccttcctgaaggccaacctgcccctgctgcagagagagctgctgcactgcgccagactggccaagcagaaccccgcccagtacctggcccagcacgagcagctgctgctggacgccagcaccaccagccccgtggacagcagcgagctgctgctggacgtgaacgagaacggcaagagaagaacccccgacagaaccaaggagaacggcttcgacagagagcccctgcacagcgagcaccccagcaagagaccctgcaccatcagccccggccagagatacagccccaacaacggcctgagctaccagcccaacggcctgccccaccccacccccccccccccccagcactacagactggacgacatggccatcgcccaccactacagagacagctacagacaccccagccacagagacctgagagacagaaacagacccatgggcctgcacggcaccagacaggaggagatgatcgaccacagactgaccgacagagagtgggccgaggagtggaagcacctggaccacctgctgaactgcatcatggacatggtggagaagaccagaagaagcctgaccgtgctgagaagatgccaggaggccgacagagaggagctgaactactggatcagaagatacagcgacgccgaggacctgaagaagggcggcggcagcagcagcagccacagcagacagcagagccccgtgaaccccgaccccgtggccctggacgcccacagagagttcctgcacagacccgccagcggctacgtgcccgaggagatctggaagaaggccgaggaggccgtgaacgaggtgaagagacaggccatgaccgagctgcagaaggccgtgagcgaggccgagagaaaggcccacgacatgatcaccaccgagagagccaagatggagagaaccgtggccgaggccaagagacaggccgccgaggacgccctggccgtgatcaaccagcaggaggacagcagcgagagctgctggaactgcggcagaaaggccagcgagacctgcagcggctgcaacaccgccagatactgcggcagcttctgccagcacaaggactgggagaagcaccaccacatctgcggccagaccctgcaggcccagcagcagggcgacacccccgccgtgagcagcagcgtgacccccaacagcggcgccggcagccccatggacaccccccccgccgccacccccagaagcaccacccccggcacccccagcaccatcgagaccacccccagatag

SEQ ID NO: 145515 - DNA, 210 bp, Artificial Sequence
  derived and/or modified sequence
atgcccgacagaaccgagaagcacagcaccatgcccgacagccccgtggacgtgaagacccagagcagactgaccccccccaccatgccccccccccccaccacccagggcgcccccagaaccagcagcttcacccccaccaccctgaccaacggcaccagccacagccccaccgccctgaacggcgcccccagcccccccaacggctag

SEQ ID NO: 145516 - DNA, 240 bp, Artificial Sequence
  derived and/or modified sequence
atgcccgacagaaccgagaagcacagcaccatgcccgacagccccgtggacgtgaagacccagagcagactgaccccccccaccatgccccccccccccaccacccagggcgcccccagaaccagcagcttcacccccaccaccctgaccaacggcaccagccacagccccaccgccctgaacggcgcccccagcccccccaacggcttcagcaacggccccagcagcagcagcagctag

SEQ ID NO: 145517 - DNA, 81 bp, Artificial Sequence
  derived and/or modified sequence
atgcccgacagaaccgagaagcacagcaccatgcccgacagccccgtggacgtgaagacccagagcagactgaccccctag

SEQ ID NO: 145518 - DNA, 306 bp, Artificial Sequence
  derived and/or modified sequence
atgcccgacagaaccgagaagcacagcaccatgcccgacagccccgtggacgtgaagacccagagcagactgaccccccccaccatgccccccccccccaccacccagggcgcccccagaaccagcagcttcacccccaccaccctgaccaacggcaccagccacagccccaccgccctgaacggcgcccccagcccccccaacggcttcagcaacggccccagcagcagcagcagcagcagcctggccaaccagcagctgccccccgcctgcggcgccagacagctgagcaagctgaagagatag

SEQ ID NO: 145519 - protein, 193 aa, Artificial Sequence
  derived and/or modified sequence
MLGVLELLLLGAAWLAGPARGQNETEPIVLEGKCLVVCDSNPTSDPTGTALGISVRSGSAKVAFSAIRSTNHEPSEMSNRTMIIYFDQVLVNIGNNFDSERSTFIAPRKGIYSFNFHVVKVYNRQTIQVSLMLNGWPVISAFAGDQDVTREAASNGVLIQMEKGDRAYLKLERGNLMGGWKYSTFSGFLVFPL

SEQ ID NO: 145520 - DNA, 582 bp, Artificial Sequence
  derived and/or modified sequence
atgctgggagttcttgagctgctcctcctgggggcagcttggctggccggccctgcccgggggcagaacgagaccgagcctatagtacttgagggtaaatgtctcgtggtctgcgacagcaatcctacctccgatcccactggaactgctttaggcatttcggtccggagtggatccgccaaagtggccttttctgcaattcgctccacaaatcacgagcctagcgagatgagcaatcgtactatgatcatctacttcgaccaggtactggttaatatcggcaacaatttcgactccgagcgatccacttttattgcgccacgaaagggtatctactctttcaactttcacgtagtcaaggtttacaaccggcaaaccattcaggtgtcacttatgctgaacggctggcccgtcataagcgcttttgccggggatcaagacgtcactcgggaggccgcctctaacggggtcctgattcagatggaaaaaggggaccgggcctatctgaaactggagagagggaacttgatgggcgggtggaagtactccactttctcaggtttcttggtgtttcctttgtag

SEQ ID NO: 145521 - DNA, 582 bp, Artificial Sequence
  derived and/or modified sequence
atgctgggcgtgctggagctgctgctgctgggcgccgcctggctggccggccctgcccggggccagaatgaaacagagcccatcgtgctggagggcaagtgcctggtggtgtgtgacagcaaccccaccagtgaccccactggaacagccctgggcatctctgtgcgcagcggcagcgccaaggtggccttcagcgccatccgcagcaccaaccacgagcccagcgagatgagcaacagaaccatgatcatctactttgaccaggtgctggtgaacatcggcaacaactttgattctgagaggagcaccttcatcgcccccaggaagggcatctacagcttcaacttccacgtggtgaaggtgtacaaccggcagaccatccaggtgtccctgatgctgaatggctggcctgtgatcagcgcctttgctggggaccaggatgtgacccgggaggccgccagcaatggagtgctgatccagatggagaagggggaccgggcctacctgaagctggagcggggcaacctgatgggcggctggaagtacagcaccttcagcggcttcctggtgttccccctgtag

SEQ ID NO: 145522 - DNA, 582 bp, Artificial Sequence
  derived and/or modified sequence
atgctgggcgtgctggagctgctgctgctgggcgccgcctggctggcaggccctgcccgaggtcagaacgagactgagcccatcgtgctcgaaggtaagtgcctggtggtgtgtgattctaatcccacctccgatcccaccggaacagcgttgggcatctcagtgcgatctgggagcgccaaagtcgcctttagcgcaattaggagtacaaaccacgaacccagcgaaatgtctaatcgcaccatgatcatctacttcgaccaagtgctggtgaatatcgggaataactttgattcagaacgcagcaccttcattgcaccccggaaagggatctatagcttcaatttccacgtggtgaaagtgtacaataggcaaactatacaggtatccctgatgctgaacggatggcctgtaatttccgcattcgccggagatcaggacgtcacacgcgaggctgctagcaatggtgtgctgatacagatggaaaagggcgaccgggcttatttgaaactggaacgggggaaccttatgggaggctggaagtattcgacctttagtgggtttctcgttttcccattgtag

SEQ ID NO: 145523 - DNA, 582 bp, Artificial Sequence
  derived and/or modified sequence
atgctgggggtgttggaacttcttctcctgggagccgcttggttggccggaccagccagaggacaaaacgaaaccgagcccatcgttttagaaggcaagtgtcttgtggtgtgcgatagtaaccccacctcggaccccactggcacagcactgggcatatctgtgcgctcgggatcagcaaaagtggctttttcggccattagaagtaccaaccacgagcctagtgaaatgagcaaccgcactatgataatttactttgaccaggtactcgtcaacattgggaacaatttcgactccgagcgaagcaccttcatcgctcctcgtaaggggatatactctttcaactttcacgtcgtgaaagtgtacaataggcagaccattcaggtgtccctgatgctgaacgggtggcccgttatctccgctttcgcaggcgaccaggacgtgacccgggaggctgcgagcaacggcgtcctgattcagatggaaaagggcgaccgggcatacctcaagctggagcggggtaatctcatggggggatggaagtattctaccttctcaggattcctcgtgttccccctatag

SEQ ID NO: 145524 - DNA, 582 bp, Artificial Sequence
  derived and/or modified sequence
atgctcggagtgcttgagctattgctcctcggtgcagcctggctggcaggcccagcaaggggacagaacgaaactgaaccaatagtcctggagggaaagtgcctagtggtgtgcgattccaatccaacctcagacccaacgggcactgctcttggaatctcagtgaggtcagggtctgcaaaggttgcattttcagcgatccggtcaaccaaccatgagccctcagaaatgtcaaaccggacaatgatcatatactttgaccaggttctggtgaatattgggaacaatttcgacagcgaaagatccacgtttattgctccaagaaaaggtatttacagcttcaatttccacgttgttaaggtgtacaataggcaaactattcaagtaagcctgatgctgaatggatggcccgtgatttccgcgtttgccggtgatcaggacgtgacgagagaggctgccagcaacggcgtactcatacaaatggaaaaaggggaccgggcttacctgaaattggaacgcggcaacctgatgggggggtggaaatactcaacgttcagcggattcctggtattcccactgtag

SEQ ID NO: 145525 - DNA, 582 bp, Artificial Sequence
  derived and/or modified sequence
atgctcggagtgttagaactactgctccttggtgcggcctggctggccggacctgctcgaggccaaaatgagacagaaccaattgtgctggaggggaagtgtctcgtggtgtgcgactccaatcctaccagtgatccaaccggcacagcacttggcatcagtgtccggtcgggctcagctaaagtggcttttagcgccatcagaagcactaatcatgaaccttctgaaatgtctaacagaacaatgataatctattttgatcaagtactcgtaaatattggcaataacttcgactcggagcgcagtacattcatcgctccgcgtaaagggatatactcctttaactttcacgtggtcaaggtgtataataggcaaacaatccaggtctcactaatgcttaacggatggccggttataagcgctttcgctggcgatcaggacgtgaccagagaagcagcatccaacggcgtgcttattcaaatggaaaaaggggatagggcgtatcttaagttagagcggggtaatctcatgggaggatggaagtactctacattttctgggttcctggtgtttcccctgtag

SEQ ID NO: 145526 - DNA, 582 bp, Artificial Sequence
  derived and/or modified sequence
atgctgggcgtgctggagctgctgctgctgggcgccgcctggctggccggccccgccagaggccagaacgagaccgagcccatcgtgctggagggcaagtgcctggtggtgtgcgacagcaaccccaccagcgaccccaccggcaccgccctgggcatcagcgtgagaagcggcagcgccaaggtggccttcagcgccatcagaagcaccaaccacgagcccagcgagatgagcaacagaaccatgatcatctacttcgaccaggtgctggtgaacatcggcaacaacttcgacagcgagagaagcaccttcatcgcccccagaaagggcatctacagcttcaacttccacgtggtgaaggtgtacaacagacagaccatccaggtgagcctgatgctgaacggctggcccgtgatcagcgccttcgccggcgaccaggacgtgaccagagaggccgccagcaacggcgtgctgatccagatggagaagggcgacagagcctacctgaagctggagagaggcaacctgatgggcggctggaagtacagcaccttcagcggcttcctggtgttccccctgtag

SEQ ID NO: 145527 - DNA, 582 bp, Artificial Sequence
  derived and/or modified sequence
atgctgggcgtgctcgaactgctactgctgggggctgcctggttggccggacccgcacgtggccagaacgagacggaaccaattgtgctggaagggaagtgcctggtcgtgtgtgactcgaaccctacctcagacccgaccggcacagccttgggaatttcagtgcgatcggggagcgctaaagtggccttctcagccatccgctccacaaaccacgagccatccgagatgtccaacagaactatgatcatatactttgaccaggttctagtgaatatcggtaataatttcgactccgagagatcaaccttcattgccccacgaaagggaatttatagctttaacttccacgtggtgaaggtctacaatcgacagacaatccaggtgagtctcatgcttaacggctggcccgtaatttctgctttcgcaggagaccaggacgtcacacgcgaagccgctagcaacggcgtcctcatccagatggagaaaggagatcgtgcttacctgaagctcgagaggggaaaccttatgggaggttggaagtatagtacattttctggcttcctggtgtttcccctgtag

SEQ ID NO: 145528 - DNA, 582 bp, Artificial Sequence
  derived and/or modified sequence
atgctgggtgttttggagctgctattacttggagctgcctggctcgccggtcctgcaagagggcagaatgaaacggaaccaatagtgttagaggggaaatgtctcgtggtatgcgattccaatccaacaagcgaccctaccggtaccgctctaggcattagtgtgagaagtgggagtgcaaaggtcgctttctccgcgattcgctccacaaaccacgaacctagcgagatgtctaaccggacgatgattatttactttgaccaagtgctggtgaacatcgggaataacttcgatagtgagaggtcgaccttcattgctcctcgcaagggcatatactcattcaatttccatgtggtgaaagtctacaacaggcaaactattcaagtctccctgatgctaaacggctggcctgtgatcagcgctttcgctggcgaccaggacgttacccgagaagctgcttctaacggagtgttgatacaaatggagaagggagatagggcttatttgaaactcgaacgcggcaacctcatgggggggtggaagtactcaactttcagcgggtttctagtgttccccctgtag

SEQ ID NO: 145529 - DNA, 582 bp, Artificial Sequence
  derived and/or modified sequence
atgttaggagttctcgaactgctgctgctcggagcggcctggctggccggacctgctaggggacagaatgagacagagccaatcgtgctagaagggaaatgcttagtggtgtgtgattctaaccccacctccgaccccacaggcaccgcccttggcatcagcgttagaagtggttcagccaaagtggcattctccgcaattcgatctacaaatcacgagcccagcgaaatgagcaaccgaacaatgatcatctatttcgaccaggttttagtcaatatcggtaacaattttgactcggagcgaagtacttttattgcgccaaggaaaggcatctattcatttaacttccatgttgtaaaagtatataatcgccagacaattcaggtttccctgatgttaaatggatggcctgtgatctcggccttcgcaggcgaccaagacgtgacccgtgaagcagcaagtaacggtgtgttgatacaaatggagaaaggagaccgagcatatctgaaactggaaagaggcaacttgatgggagggtggaaatactccacctttagtgggttcctggtattccccctatag

SEQ ID NO: 145530 - DNA, 718 bp, Artificial Sequence
  derived and/or modified sequence
gagctgaggagggggcttcggagcgggactgggacggcggcgcgatgctgggcgtcctggagctgctgctgctgggggctgcgtggctggcgggcccggcccgcgggcagaatgagacggagcccatcgtgctggagggcaagtgcctggtggtgtgcgactccaaccccacgtccgaccccacgggcactgccctgggcatctctgtgcgctctggcagcgccaaggtggctttctctgccatcaggagcaccaaccacgagccgtccgagatgagtaatcgcaccatgatcatctacttcgaccaggtactagtgaacattgggaacaactttgattcagaacgcagcactttcatcgccccgcgcaaagggatctacagttttaacttccacgtggtaaaagtctacaacagacaaaccatacaggtgagcctcatgctaaacgggtggccggtgatttcagccttcgctggtgaccaggacgtgacccgggaggccgccagcaacggagtcctaatccaaatggagaaaggcgaccgagcatacctcaagctggagcggggaaacttgatggggggctggaagtactcgaccttctccggattcctggtgtttcctctctgactggctcgtagccggaagggaggcagggagagggcgaaggcaggaaggggagtgagaaagaggctgaaattaagagggcgagaaagcagcac

SEQ ID NO: 145531 - DNA, 1828 bp, Artificial Sequence
  derived and/or modified sequence
cgctccggctgcagcgccggctgcatcaataattcagagcggcggcggcggcggcagcggcgggtgcgggcaggaggcggcggcagcagcgggaccgagcagcagcggctatgcatccaagtgcggctgggcagccgcggcacccctgaggcccgggaggggctccgggaacacagcgcggaggggacgctagtcgcggaggggacgctagtcccggagtgcgaggaagaggtgtagtgtccagagcggcggcggcggagctgcgcacggagctgaggagggggcttcggagcgggactgggacggggggggcggctggcgcgagcagccctgggggtggggggcggggtgggcgccggcggcgcgatgctgggcgtcctggagctgctgctgctgggggctgcgtggctggcgggcccggcccgcgggcagaatgagacggagcccatcgtgctggagggcaagtgcctggtggtgtgcgactccaaccccacgtccgaccccacgggcactgccctgggcatctctgtgcgctctggcagcgccaaggtggctttctctgccatcaggagcaccaaccacgagccgtccgagatgagtaatcgcaccatgatcatctacttcgaccaggtactagtgaacattgggaacaactttgattcagaacgcagcactttcatcgccccgcgcaaagggatctacagttttaacttccacgtggtaaaagtctacaacagacaaaccatacaggtgagcctcatgctaaacgggtggccggtgatttcagccttcgctggtgaccaggacgtgacccgggaggccgccagcaacggagtcctaatccaaatggagaaaggcgaccgagcatacctcaagctggagcggggaaacttgatggggggctggaagtactcgaccttctccggattcctggtgtttcctctctgactggctcgtagccggaagggaggcagggagagggcgaaggcaggaaggggagtgagaaagaggctgaaattaagagggcgagaaagcagcacgacttgaaacttcctacatgttctctaactgtatctgggtaaaaaggtgcgcgccagctgtgggacaactttgtccatttccttattaggagaaataaatttcgcttagctctgcgcactcccatttccaaaaataaactcgcctcccccattccagttgcagtaatcaagaaagagactgccttgtcattgtttcttatcccccaacttcatgttccctgcaatttatttaaagaaactttgtatttcactacataatctgaaatctttctccctagccccctctgaatccttctgcctactgaaatctgatatattacacacccccaaccttttttttttcagtttggaaaggggtaaagttttgttgttgttgttgttttgttttggatggggaaggtagttttaatttggcaagtgttgctcttcttaaaacactgctcaaattaattagctgaagatacttagtatcctcggctgcttgttagcagagaaaggactcaccttagtggtgactggtttaaaaaatataaatatatatcatttgtatacgaagaactcttcccagtggaaactggctgtgtttccgtatttctatgttctattcggagtgatcgtgaaatctaaggctgcttgatgttctgatgcttgtcaatgccgtcgtgctctgtgactccacgaaacgccaaggagcttcttccggacgcctcctcttcctctgtaacatacgtgtgaatagtcaaggtttaattttgctttaatctaataaagtcgaagtgggactttta

SEQ ID NO: 145532 - DNA, 582 bp, Artificial Sequence
  derived and/or modified sequence
atgctcggcgtgctggagctgctcctactcggagctgcctggcttgcaggccctgcgcgaggtcaaaatgagactgaacccattgtgctggagggcaagtgtctggttgtgtgcgacagcaacccgacaagcgatcctaccggcaccgctctcgggataagcgttcgctccggatcggctaaggttgccttctctgcaattagatctaccaaccacgagccaagcgaaatgagtaaccgaacaatgatcatatattttgaccaggttttggtgaacataggaaacaatttcgattccgaaaggtccactttcatagccccaaggaaaggaatctacagcttcaatttccacgtagtcaaagtatataaccgccagaccatacaggtctctctcatgcttaacggatggccggtaatttctgcctttgcaggagaccaggacgtcacacgtgaagctgcctcaaacggggttctgattcaaatggagaagggagatcgggcttaccttaaactcgagagggggaatttgatggggggctggaaatactcaaccttcagtgggttccttgtattccccctttag

SEQ ID NO: 145533 - DNA, 582 bp, Artificial Sequence
  derived and/or modified sequence
atgctgggcgtgctggagctgctgctgctgggcgccgcctggctggccggtcctgcaaggggccaaaacgagacagaacccattgtcctcgaggggaagtgcctggtcgtttgcgactcgaatccaacgtccgatccaaccggaacagcccttggaatcagcgttcgatctggatccgcaaaggttgctttctccgccattaggagtactaatcatgaaccaagcgagatgagtaatagaacaatgattatttacttcgaccaggtccttgtgaacatcgggaataattttgactctgaacgttcaaccttcatcgcgccaaggaaggggatctacagcttcaactttcacgtggtgaaggtctacaatcgccagacgatacaggtaagtctgatgctgaacgggtggccggttatcagcgccttcgctggtgatcaagacgtcacccgggaagccgcttccaatggcgtactgatccaaatggaaaaaggcgaccgcgcttatctcaaactggaacgggggaatttgatgggcgggtggaaatacagtacttttagcggttttctagtattcccactgtag

SEQ ID NO: 145534 - RNA, 582 nt, Artificial Sequence
  derived and/or modified sequence
augcucggagugcuugagcuauugcuccucggugcagccuggcuggcaggcccagcaaggggacagaacgaaacugaaccaauaguccuggagggaaagugccuaguggugugcgauuccaauccaaccucagacccaacgggcacugcucuuggaaucucagugaggucagggucugcaaagguugcauuuucagcgauccggucaaccaaccaugagcccucagaaaugucaaaccggacaaugaucauauacuuugaccagguucuggugaauauugggaacaauuucgacagcgaaagauccacguuuauugcuccaagaaaagguauuuacagcuucaauuuccacguuguuaagguguacaauaggcaaacuauucaaguaagccugaugcugaauggauggcccgugauuuccgcguuugccggugaucaggacgugacgagagaggcugccagcaacggcguacucauacaaauggaaaaaggggaccgggcuuaccugaaauuggaacgcggcaaccugauggggggguggaaauacucaacguucagcggauuccugguauucccacuguag

SEQ ID NO: 145535 - RNA, 582 nt, Artificial Sequence
  derived and/or modified sequence
augcucggaguguuagaacuacugcuccuuggugcggccuggcuggccggaccugcucgaggccaaaaugagacagaaccaauugugcuggaggggaagugucucguggugugcgacuccaauccuaccagugauccaaccggcacagcacuuggcaucaguguccggucgggcucagcuaaaguggcuuuuagcgccaucagaagcacuaaucaugaaccuucugaaaugucuaacagaacaaugauaaucuauuuugaucaaguacucguaaauauuggcaauaacuucgacucggagcgcaguacauucaucgcuccgcguaaagggauauacuccuuuaacuuucacguggucaagguguauaauaggcaaacaauccaggucucacuaaugcuuaacggauggccgguuauaagcgcuuucgcuggcgaucaggacgugaccagagaagcagcauccaacggcgugcuuauucaaauggaaaaaggggauagggcguaucuuaaguuagagcgggguaaucucaugggaggauggaaguacucuacauuuucuggguuccugguguuuccccuguag

SEQ ID NO: 145536 - RNA, 582 nt, Artificial Sequence
  derived and/or modified sequence
augcuggguguuuuggagcugcuauuacuuggagcugccuggcucgccgguccugcaagagggcagaaugaaacggaaccaauaguguuagaggggaaaugucucgugguaugcgauuccaauccaacaagcgacccuaccgguaccgcucuaggcauuagugugagaagugggagugcaaaggucgcuuucuccgcgauucgcuccacaaaccacgaaccuagcgagaugucuaaccggacgaugauuauuuacuuugaccaagugcuggugaacaucgggaauaacuucgauagugagaggucgaccuucauugcuccucgcaagggcauauacucauucaauuuccauguggugaaagucuacaacaggcaaacuauucaagucucccugaugcuaaacggcuggccugugaucagcgcuuucgcuggcgaccaggacguuacccgagaagcugcuucuaacggaguguugauacaaauggagaagggagauagggcuuauuugaaacucgaacgcggcaaccucauggggggguggaaguacucaacuuucagcggguuucuaguguucccccuguag

SEQ ID NO: 145537 - RNA, 582 nt, Artificial Sequence
  derived and/or modified sequence
auguuaggaguucucgaacugcugcugcucggagcggccuggcuggccggaccugcuaggggacagaaugagacagagccaaucgugcuagaagggaaaugcuuaguggugugugauucuaaccccaccuccgaccccacaggcaccgcccuuggcaucagcguuagaagugguucagccaaaguggcauucuccgcaauucgaucuacaaaucacgagcccagcgaaaugagcaaccgaacaaugaucaucuauuucgaccagguuuuagucaauaucgguaacaauuuugacucggagcgaaguacuuuuauugcgccaaggaaaggcaucuauucauuuaacuuccauguuguaaaaguauauaaucgccagacaauucagguuucccugauguuaaauggauggccugugaucucggccuucgcaggcgaccaagacgugacccgugaagcagcaaguaacgguguguugauacaaauggagaaaggagaccgagcauaucugaaacuggaaagaggcaacuugaugggaggguggaaauacuccaccuuuaguggguuccugguauucccccuauag

SEQ ID NO: 145538 - protein, 232 aa, Artificial Sequence
  derived and/or modified sequence
MHRRRSRSCREDQKPVMDDQRDLISNNEQLPMLGRRPGAPESKCSRGALYTGFSILVTLLLAGQATTAYFLYQQQGRLDKLTVTSQNLQLENLRMKLPKPPKPVSKMRMATPLLMQALPMGALPQGPMQNATKYGNMTEDHVMHLLQNADPLKVYPPLKGSFPENLRHLKNTMETIDWKVFESWMHHWLLFEMSRHSLEQKPTDAPPKESLELEDPSSGLGVTKQDLGPVPM

SEQ ID NO: 145539 - protein, 122 aa, Artificial Sequence
  derived and/or modified sequence
MHRRRSRSCREDQKPVMDDQRDLISNNEQLPMLGRRPGAPESKCSRGALYTGFSILVTLLLAGQATTAYFLYQQQGRLDKLTVTSQNLQLENLRMKLPKPHAECHQVWQHDRGPCDAPAPEC

SEQ ID NO: 145540 - protein, 152 aa, Artificial Sequence [sequence omitted]

SEQ ID NO: 145541 - DNA, 699 bp, Artificial Sequence
  derived and/or modified sequence
atgcacagaagacggtcacgaagctgccgggaagaccagaaacctgtcatggatgaccagcgtgatctgatcagtaataacgagcagttgcccatgctcggccggaggccaggagctccagagtcaaaatgctctagaggcgctctgtataccggtttcagtattctcgtgacgttgcttttagccggtcaggccaccaccgcctattttctgtaccaacagcagggacggctggataaactcaccgtgacctctcagaacctccagttagagaatcttagaatgaagctgcctaagccaccaaagccagttagtaagatgaggatggcaacccccctactgatgcaagccctgccaatgggagctctcccgcaaggacctatgcaaaacgctaccaaatacggcaatatgaccgaggatcatgtgatgcatttgctccagaacgcagatcccctgaaggtgtaccccccactgaaagggtcattcccagagaatttacgtcacttgaagaacaccatggagacaattgactggaaagtgttcgaaagttggatgcaccactggctgctgttcgagatgtcacgccatagcttggaacaaaaacctacggacgccccacccaaagagtctcttgaactggaggacccaagcagtggactgggcgttaccaagcaagatttaggccctgtgcctatgtag

SEQ ID NO: 145542 - DNA, 699 bp, Artificial Sequence
  derived and/or modified sequence
atgcacagaagaagaagccgcagctgccgggaggaccagaagcctgtgatggatgaccagagggacctgatcagcaacaatgagcagctgcccatgctgggcagaagacctggggcccctgagagcaagtgcagcagaggagccctgtacacaggcttcagcatcctggtgaccctgctgctggccggccaggccaccacagcctacttcctgtaccagcagcagggccgcctggacaagctgactgtgaccagccagaacctgcagctggagaacctgaggatgaagctgcccaagccacccaagcctgtgtccaagatgaggatggccacccccctgctgatgcaggccctgcccatgggcgccctgccccagggccccatgcagaatgccaccaagtatggcaacatgacagaagatcatgtgatgcacctgctgcagaatgctgaccccctgaaggtgtacccacccctgaagggcagcttccctgagaacctgcggcacctgaagaacaccatggagaccatcgactggaaggtgtttgagagctggatgcaccactggctgctgtttgagatgagccgccacagcctggagcagaagcccacagatgccccacccaaggagagcctggagctggaggaccccagcagcggcctgggcgtgaccaagcaggacctgggccctgtgcccatgtag

SEQ ID NO: 145543 - DNA, 699 bp, Artificial Sequence
  derived and/or modified sequence
atgcaccggcggcggagccggagctgccgggaggaccagaagcccgttatggacgaccagcgcgacttgatttccaacaacgagcagcttcctatgttaggcaggcgcccaggagctcccgagtcaaaatgctcacgtggtgccttgtacacagggtttagcatcctcgtgactctactactggcaggacaggccaccaccgcctactttctctatcagcagcagggcaggctggataaactgaccgtcacctctcagaatcttcagcttgagaaccttagaatgaagctgcccaagccacctaagcccgttagtaaaatgagaatggcaaccccacttctaatgcaggccctgcccatgggggccctcccccagggacctatgcaaaatgcaacgaaatacggcaacatgacggaggatcacgtaatgcatcttttacaaaatgcggatcctttaaaagtctacccgcccttaaaagggagtttcccagagaatctgaggcaccttaagaatacaatggaaacgatcgattggaaagtgttcgagagttggatgcaccactggttactgtttgagatgtccaggcactccctggagcagaagcctaccgacgcccctccgaaggaatccctggagctggaagacccttcttcaggtctcggcgtgacaaagcaggatttggggcccgtgcccatgtag

SEQ ID NO: 145544 - DNA, 699 bp, Artificial Sequence
  derived and/or modified sequence
atgcatagaaggcggtcgcgaagctgcagagaggatcaaaaaccagtgatggatgaccagagggatctcatatctaacaatgagcagctccctatgctgggccgtaggcccggagcccctgaatcaaagtgttctcggggagccctgtatacaggcttctcaattctcgtgaccctgttgctggctggccaggctaccacagcttactttctctatcagcaacaaggcagactcgacaagctgacagtgacgagccagaacctgcagctggaaaatttacgtatgaaactgccaaagccgcctaagcccgtctccaaaatgcggatggcgaccccactgttaatgcaagcactgcccatgggggcactgccgcaaggaccaatgcagaacgcaacaaaatacgggaatatgacagaagatcacgtgatgcatctgcttcaaaatgctgatcccctgaaggtttacccccctctcaaagggtcttttcccgagaatcttcggcatctgaaaaacaccatggagaccattgactggaaggtcttcgaaagctggatgcatcactggctgttgtttgagatgagtcggcattcccttgaacagaaacccactgacgccccacctaaagagtcgctggagttggaggatcctagcagtggcctgggcgtcaccaagcaggacctaggcccagtacccatgtag

SEQ ID NO: 145545 - DNA, 1449 bp, Artificial Sequence
  derived and/or modified sequence
gggagcccccccgccccacatcctgccccgcaaaaggcagcttcaccaaagtggggtatttccagcctttgtagctttcacttccacatctaccaagtgggcggagtggccttctgtggacgaatcagattcctctccagcaccgactttaagaggcgagccggggggtcagggtcccagatgcacaggaggagaagcaggagctgtcgggaagatcagaagccagtcatggatgaccagcgcgaccttatctccaacaatgagcaactgcccatgctgggccggcgccctggggccccggagagcaagtgcagccgcggagccctgtacacaggcttttccatcctggtgactctgctcctcgctggccaggccaccaccgcctacttcctgtaccagcagcagggccggctggacaaactgacagtcacctcccagaacctgcagctggagaacctgcgcatgaagcttcccaagcctcccaagcctgtgagcaagatgcgcatggccaccccgctgctgatgcaggcgctgcccatgggagccctgccccaggggcccatgcagaatgccaccaagtatggcaacatgacagaggaccatgtgatgcacctgctccagaatgctgaccccctgaaggtgtacccgccactgaaggggagcttcccggagaacctgagacaccttaagaacaccatggagaccatagactggaaggtctttgagagctggatgcaccattggctcctgtttgaaatgagcaggcactccttggagcaaaagcccactgacgctccaccgaaagagtcactggaactggaggacccgtcttctgggctgggtgtgaccaagcaggatctgggcccagtccccatgtgagagcagcagaggcggtcttcaacatcctgccagccccacacagctacagctttcttgctcccttcagcccccagcccctcccccatctcccaccctgtacctcatcccatgagaccctggtgcctggctctttcgtcacccttggacaagacaaaccaagtcggaacagcagataacaatgcagcaaggccctgctgcccaatctccatctgtcaacaggggcgtgaggtcccaggaagtggccaaaagctagacagatccccgttcctgacatcacagcagcctccaacacaaggctccaagacctaggctcatggacgagatgggaaggcacagggagaagggataaccctacacccagaccccaggctggacatgctgactgtcctctcccctccagcctttggccttggcttttctagcctatttacctgcaggctgagccactctcttccctttccccagcatcactccccaaggaagagccaatgttttccacccataatcctttctgccgacccctagttccctctgctcagccaagcttgttatcagctttcagggccatgg

SEQ ID NO: 145546 - DNA, 699 bp, Artificial Sequence
  derived and/or modified sequence
atgcacagaagaagaagcagaagctgcagagaggaccagaagcccgtgatggacgaccagagagacctgatcagcaacaacgagcagctgcccatgctgggcagaagacccggcgcccccgagagcaagtgcagcagaggcgccctgtacaccggcttcagcatcctggtgaccctgctgctggccggccaggccaccaccgcctacttcctgtaccagcagcagggcagactggacaagctgaccgtgaccagccagaacctgcagctggagaacctgagaatgaagctgcccaagccccccaagcccgtgagcaagatgagaatggccacccccctgctgatgcaggccctgcccatgggcgccctgccccagggccccatgcagaacgccaccaagtacggcaacatgaccgaggaccacgtgatgcacctgctgcagaacgccgaccccctgaaggtgtacccccccctgaagggcagcttccccgagaacctgagacacctgaagaacaccatggagaccatcgactggaaggtgttcgagagctggatgcaccactggctgctgttcgagatgagcagacacagcctggagcagaagcccaccgacgccccccccaaggagagcctggagctggaggaccccagcagcggcctgggcgtgaccaagcaggacctgggccccgtgcccatgtag

SEQ ID NO: 145547 - protein, 236 aa, Artificial Sequence
  derived and/or modified sequence
MGVEGCTKCIKYLLFVFNFVFWLAGGVILGVALWLRHDPQTTNLLYLELGDKPAPNTFYVGIYILIAVGAVMMFVGFLGCYGAIQESQCLLGTFFTCLVILFACEVAAGIWGFVNKDQIAKDVKQFYDQALQQAVVDDDANNAKAVVKTFHETLDCCGSSTLTALTTSVLKNNLCPSGSNIISNLFKEDCHQKIDDLFSGKLYLIGIAAIVVAVIMIFEMILSMVLCCGIRNSSVY

SEQ ID NO: 145548 - DNA, 711 bp, Artificial Sequence
  derived and/or modified sequence
atgggagtggagggatgcacaaagtgcatcaaatacctgctcttcgtgttcaactttgtcttctggctcgcaggtggagtgattctgggcgtggcattgtggcttcgtcacgatccacagactacaaatctgctatacttggagctgggagacaaaccggcaccaaacacattctacgtgggtatctatattctcattgccgtaggggccgtaatgatgtttgtgggcttcctcgggtgttatggagccatccaagagtcacagtgtttgctcggcacattcttcacttgcttggtgatcttgtttgcttgcgaagttgcagctggcatttggggattcgtgaataaggatcagatagctaaagacgtaaagcaattctacgaccaggccttgcagcaggccgtagtggacgatgacgcgaataacgccaaagcagtggttaagacattccacgagaccttggattgctgcggcagcagtaccttgaccgccctcacgactagcgtgctgaaaaacaacctgtgtccttcagggagtaacattatttcaaatcttttcaaggaggattgccaccagaagatcgatgacttgtttagcggcaaactgtatctgatcggtatagctgccattgtggtggcagtcataatgatattcgaaatgattctttcgatggttctgtgttgcggaatcaggaatagttcagtttattag

SEQ ID NO: 145549 - DNA, 711 bp, Artificial Sequence
  derived and/or modified sequence
atgggcgtggagggctgcaccaagtgcatcaagtacctgctgtttgtgttcaactttgtgttctggctggccggcggcgtcatcctgggcgtggccctgtggctgcggcatgacccccagaccaccaacctgctgtacctggagctgggggacaagccagcccccaacaccttctacgtgggcatctacatcctgattgctgtgggcgctgtgatgatgtttgtgggcttcctgggctgctatggagccatccaggagagccagtgcctgctgggcaccttcttcacctgcctggtgatcctgtttgcctgtgaggtggccgccggcatctggggctttgtgaacaaggaccagatcgccaaggatgtgaagcagttctatgaccaggccctgcagcaggccgtggtggatgatgatgccaacaatgccaaggctgtggtgaagaccttccacgagaccctggactgctgcggcagcagcaccctgacagccctgaccacctctgtgctgaagaacaacctgtgccccagcggcagcaacatcatcagcaacctcttcaaggaggactgccaccagaagattgatgacctcttcagcggcaagctgtacctgattggaattgctgccatcgtggtggccgtcatcatgatctttgagatgatcctgtccatggtgctgtgctgcggcatccggaacagctctgtgtactag

SEQ ID NO: 145550 - DNA, 711 bp, Artificial Sequence
  derived and/or modified sequence
atgggcgtggagggctgcaccaagtgcatcaagtacctgctgttcgtattcaatttcgtattctggctagctggcggggtgattctaggtgtggccctttggctcagacacgatcctcaaaccacaaacctactgtatctagaactgggtgataagcccgctcctaacaccttttatgtaggcatctacattctcattgccgtgggtgcagtgatgatgtttgtgggcttcctcggctgttacggtgccatccaggagtcacagtgtctcttggggaccttcttcacatgcctggtgattctcttcgcatgtgaagtggccgcgggaatttggggtttcgtaaataaagaccagattgcaaaggacgtgaaacagttctacgatcaagcccttcagcaggccgtggtagacgatgatgcaaataacgcaaaggccgttgtgaaaacctttcacgagacactggattgttgtggcagcagtacattgaccgccttgacaacaagcgtccttaaaaacaatctgtgcccctcaggatcgaacatcatttcaaacctgtttaaggaagactgtcatcagaaaattgacgatctcttttccgggaaactgtatctgatcgggatagctgccatagtagtggctgtgattatgatttttgagatgattctcagtatggtgctgtgctgtggcattcgcaatagctctgtgtactag

SEQ ID NO: 145551 - DNA, 711 bp, Artificial Sequence
  derived and/or modified sequence
atgggggtggaggggtgtactaagtgcatcaagtatctcttgttcgtctttaacttcgtcttctggctggccggaggggtgatcctgggcgttgccctttggctcaggcacgatccccagaccacaaaccttctttatctagagctgggcgacaaaccagcccctaacacgttctacgtgggcatatatatcctgatcgctgttggcgctgtgatgatgtttgtgggctttttagggtgctacggcgctatccaggaaagccaatgcttactcggcactttctttacatgtctggtcatcttgttcgcgtgtgaagtagccgcaggaatctgggggttcgtcaataaggaccagattgcaaaagacgtcaagcagttctacgaccaggccctacagcaggctgtagtcgatgacgatgcaaataacgccaaagccgtggtgaagacgtttcacgaaactctcgattgctgcggttcttctacacttacagccctaacaacatctgtcctgaagaacaacctgtgccctagcggatcgaatatcatcagtaacctgtttaaggaagactgtcatcagaagatcgatgatctgttcagcgggaagctgtatctaatagggatcgccgcaatcgtggtggctgtgattatgatctttgagatgattcttagtatggtgttgtgctgtggcatccgaaattcatcagtatactag

SEQ ID NO: 145552 - DNA, 1498 bp, Artificial Sequence
  derived and/or modified sequence
agcgaggcgcgcgcccggccagagagcgagcgcgcaacggcggcgacggcggcgaccccaccgcgcatcctgccaggcctccggcgcccagcgccccacgcgcccccgcgcccccgcgcccccgcgcccctttcttcgcgcccccgcccctcggcccgccaggcccccttgccggccacccgccaggccccgcgccggcccgcccgccgcccaggaccggcccgcgccccgcaggccgcccgccgcccgcgccgccatgggagtggagggctgcaccaagtgcatcaagtacctgctcttcgtcttcaatttcgtcttctggctggctggaggcgtgatcctgggtgtggccctgtggctccgccatgacccgcagaccaccaacctcctgtatctggagctgggagacaagcccgcgcccaacaccttctatgtaggcatctacatcctcatcgctgtgggcgctgtcatgatgttcgttggcttcctgggctgctacggggccatccaggaatcccagtgcctgctggggacgttcttcacctgcctggtcatcctgtttgcctgtgaggtggccgccggcatctggggctttgtcaacaaggaccagatcgccaaggatgtgaagcagttctatgaccaggccctacagcaggccgtggtggatgatgacgccaacaacgccaaggctgtggtgaagaccttccacgagacgcttgactgctgtggctccagcacactgactgctttgaccacctcagtgctcaagaacaatttgtgtccctcgggcagcaacatcatcagcaacctcttcaaggaggactgccaccagaagatcgatgacctcttctccgggaagctgtacctcatcggcattgctgccatcgtggtcgctgtgatcatgatcttcgagatgatcctgagcatggtgctgtgctgtggcatccggaacagctccgtgtactgaggccccgcagctctggccacagggacctctgcagtgccccctaagtgacccggacacttccgagggggccatcaccgcctgtgtatataacgtttccggtattactctgctacacgtagcctttttacttttggggttttgtttttgttctgaactttcctgttaccttttcagggctgacgtcacatgtaggtggcgtgtatgagtggagacgggcctgggtcttggggactggagggcaggggtccttctgccctggggtcccagggtgctctgcctgctcagccaggcctctcctgggagccactcgcccagagactcagcttggccaacttggggggctgtgtccacccagcccgcccgtcctgtgggctgcacagctcaccttgttccctcctgccccggttcgagagccgagtctgtgggcactctctgccttcatgcacctgtcctttctaacacgtcgccttcaactgtaatcacaacatcctgactccgtcatttaataaagaaggaacatcaggcatgcta

SEQ ID NO: 145553 - DNA, 711 bp, Artificial Sequence
  derived and/or modified sequence
atgggcgtggagggctgcaccaagtgcatcaagtacctgctgttcgtgttcaacttcgtgttctggctggccggcggcgtgatcctgggcgtggccctgtggctgagacacgacccccagaccaccaacctgctgtacctggagctgggcgacaagcccgcccccaacaccttctacgtgggcatctacatcctgatcgccgtgggcgccgtgatgatgttcgtgggcttcctgggctgctacggcgccatccaggagagccagtgcctgctgggcaccttcttcacctgcctggtgatcctgttcgcctgcgaggtggccgccggcatctggggcttcgtgaacaaggaccagatcgccaaggacgtgaagcagttctacgaccaggccctgcagcaggccgtggtggacgacgacgccaacaacgccaaggccgtggtgaagaccttccacgagaccctggactgctgcggcagcagcaccctgaccgccctgaccaccagcgtgctgaagaacaacctgtgccccagcggcagcaacatcatcagcaacctgttcaaggaggactgccaccagaagatcgacgacctgttcagcggcaagctgtacctgatcggcatcgccgccatcgtggtggccgtgatcatgatcttcgagatgatcctgagcatggtgctgtgctgcggcatcagaaacagcagcgtgtactag

SEQ ID NO: 145554 - protein, 566 aa, Artificial Sequence
  derived and/or modified sequence
MEVPQPEPAPGSALSPAGVCGGAQRPGHLPGLLLGSHGLLGSPVRAAASSPVTTLTQTMHDLAGLGSRSRLTHLSLSRRASESSLSSESSESSDAGLCMDSPSPMDPHMAEQTFEQAIQAASRIIRNEQFAIRRFQSMPVRLLGHSPVLRNITNSQAPDGRRKSEAGSGAASSSGEDKENDGFVFKMPWKPTHPSSTHALAEWASRREAFAQRPSSAPDLMCLSPDRKMEVEELSPLALGRFSLTPAEGDTEEDDGFVDILESDLKDDDAVPPGMESLISAPLVKTLEKEEEKDLVMYSKCQRLFRSPSMPCSVIRPILKRLERPQDRDTPVQNKRRRSVTPPEEQQEAEEPKARVLRSKSLCHDEIENLLDSDHRELIGDYSKAFLLQTVDGKHQDLKYISPETMVALLTGKFSNIVDKFVIVDCRYPYEYEGGHIKTAVNLPLERDAESFLLKSPIAPCSLDKRVILIFHCEFSSERGPRMCRFIRERDRAVNDYPSLYYPEMYILKGGYKEFFPQHPNFCEPQDYRPMNHEAFKDELKTFRLKTRSWAGERSRRELCSRLQDQ

SEQ ID NO: 145555 - DNA, 1701 bp, Artificial Sequence
  derived and/or modified sequence
atggaagtaccacagcccgagcctgctccaggttccgcccttagcccggccggggtgtgcggtggcgcccagcgccccggtcaccttccaggtctccttctcgggagtcatggtctgttggggtcccctgtgcgagccgctgcatcaagccctgtgactaccctcacacagaccatgcatgacctcgcaggactaggaagtaggagtaggctgacacatctgtcactatctcggcgagcaagtgaatcatctctctcctcagagtcatcagagtcttcagacgctgggctgtgcatggacagcccaagccccatggacccgcacatggctgaacagacattcgaacaggcgatccaggcagcctccaggatcataagaaacgagcaatttgccattaggcggtttcagtcaatgccggtcaggctcctcgggcattcaccggtcctgagaaatataaccaattcccaggctccagacggccgccggaaaagcgaagcaggaagcggggcagccagctcatctggggaggataaggagaacgacggttttgtgttcaagatgccatggaagcccactcatccttcttctacgcacgcgctagccgaatgggcctccagacgtgaggccttcgcacagagaccatcaagcgcaccagacctgatgtgtctatctcctgatcgaaaaatggaagttgaagagttatcccccctcgcgttggggagattttctctcacacctgctgagggcgatacggaagaggatgacggcttcgtcgacatacttgagagcgatctcaaagacgatgacgctgtgcctccgggaatggagagcctcatttccgccccgctcgtgaaaacccttgagaaagaagaggaaaaagacctggtgatgtacagtaagtgccagagactgtttcgttcccccagcatgccatgttccgtgatcagaccaatccttaaacggctcgagagaccacaggatagagatactccggttcaaaataagcgccgcaggtccgtcacgccgccagaggaacaacaggaggctgaggagccaaaggcccgggtgctgagatctaagtccttgtgccatgatgagatcgaaaacttgctggattccgaccatcgcgagttgatcggtgattactcgaaggccttcctcctgcagaccgttgacggcaagcaccaagatcttaagtacatttcacctgaaactatggtggccctccttacagggaagttcagtaacatagtggataagtttgtgatcgtggactgcaggtacccgtacgagtacgaaggtggccatattaaaaccgcagtgaacctccctctggagcgcgacgcagaaagctttcttctcaagtctccgatagccccgtgtagtctcgataagagggtgattctgatttttcactgtgaattttctagcgaacgcggaccacgcatgtgtcggttcatccgcgagcgcgatagggccgtgaatgattacccttcactgtattaccccgagatgtacattctaaaaggcggatacaaagagtttttcccccaacatcccaacttttgtgagccgcaggattatcgccccatgaatcacgaggcctttaaggatgaacttaagaccttcaggttgaagacaaggagctgggcaggagagcgctcaaggcgcgaattgtgttcaaggctccaggaccagtag

SEQ ID NO: 145556 - DNA, 1701 bp, Artificial Sequence
  derived and/or modified sequence
atggaggtgccccagcctgagcccgcccctggcagcgccctgagccctgctggggtgtgtggcggggcccagaggcctggccacctgcccggcctgctgctgggcagccacggcctgctgggcagccctgtgcgggctgctgccagcagccctgtgaccaccctgacccagaccatgcatgacctggccggcctgggcagccgcagccggctgacccacctgagcctgagccggcgggccagcgagagcagcctgagcagcgagagcagcgagagcagtgatgctggcctgtgcatggacagccccagccccatggacccccacatggccgagcagacctttgagcaggccatccaggccgccagccgcatcatcagaaatgagcagtttgccatccgccgcttccagagcatgcctgtgcggctgctgggccacagccctgtgctgaggaacatcaccaacagccaggccccagatggaagaaggaagtctgaggccggcagcggggccgccagcagcagcggggaggacaaggaaaatgatggctttgtgttcaagatgccctggaagcccacccaccccagcagcacccacgccctggccgagtgggccagccggcgggaggcctttgcccagaggcccagcagcgccccagacctgatgtgcctgagcccagacaggaagatggaggtggaggagctgagccccctggccctgggccgcttcagcctgaccccagctgagggggacacagaagaagatgatggctttgtggacatcctggagagtgacctgaaggatgatgatgctgtgcccccaggcatggagagcctcatcagcgcccccctggtgaagaccctggagaaggaggaggagaaggacctggtgatgtacagcaagtgccagaggctcttccgcagccccagcatgccctgcagcgtcatccggcccatcctgaagaggctggagcggccccaggaccgggacacccctgtgcagaacaagagaagaagatctgtgaccccacctgaggagcagcaggaggccgaggagcccaaggcccgggtgctgcggagcaagagcctgtgccatgatgaaattgagaacctgctggacagcgaccaccgggagctgattggagactacagcaaggccttcctgctgcagacagtggatggcaagcaccaggacctgaagtacatcagccctgagaccatggtggccctgctgaccgggaagttcagcaacatcgtggacaagtttgtgattgtggactgccgctacccctatgaatatgagggcggccacatcaagacagctgtgaacctgcccctggagagagatgctgagagcttcctgctgaagagccccatcgccccctgcagcctggacaagagggtcatcctgatcttccactgtgagttcagcagcgagcggggccccaggatgtgccgcttcatccgggagcgggacagagctgtgaatgactaccccagcctgtactacccagagatgtacatcctgaagggcggctacaaggagttcttcccccagcaccccaacttctgtgagccccaggactaccggcccatgaaccacgaggccttcaaggatgagctgaagaccttccggctgaagaccaggtcctgggccggggagaggagccggcgggagctgtgcagccggctgcaggaccagtag

SEQ ID NO: 145557 - DNA, 1701 bp, Artificial Sequence
  derived and/or modified sequence
atggaggtgccccagcccgagcccgcccccggcagcgccctgagcccggccggggtgtgtgggggcgcccagcgccccgggcacttgccaggcctgttactgggttcgcacggactccttggcagcccagtgagggccgctgcatcatcccccgttaccactctgacacagaccatgcacgacctcgccggccttgggtcccgctcccgtctgactcacctttcactgtcaaggagagcgtctgaatcctccctgtcatctgagtctagtgagagcagcgatgctggcctctgcatggactctcctagcccaatggatcctcatatggccgaacagaccttcgaacaggctattcaggcggcctcacggattattaggaatgagcaatttgcaatccgccgctttcagtctatgccagtccggctattaggccacagcccggtcctccggaatatcactaactcgcaggcacccgacgggcgcagaaaatccgaagctggatccggagccgcaagctcatccggtgaagacaaggaaaatgatggattcgttttcaagatgccatggaagcccacccacccaagtagcacacacgcccttgcggaatgggccagtagacgagaggcattcgcccagcgcccgtcttcagcaccagacctgatgtgcctgtcccctgacagaaagatggaggttgaagaactgtcaccacttgcacttggccggttctccctgaccccagctgaaggagatactgaggaagacgatggctttgtggatatactagagagtgatttgaaggacgatgatgctgtgccccctggcatggagagccttatcagcgcccctctggtgaaaaccctggaaaaggaagaagaaaaggaccttgttatgtacagtaaatgccaacggttgttccgcagtccaagcatgccttgctccgtcattaggcctatcctgaaacgcctcgaacggcctcaggatcgggatactcctgtacagaacaaacgaaggaggtccgtgactcctcccgaggagcagcaggaagcagaggagcccaaggcaagagttctgaggagcaagtcattgtgccacgatgagatcgagaatctgcttgactcggaccacagagaactgattggggattattccaaagccttcctacttcagaccgtagatggcaagcaccaggacctgaagtacataagtcccgagaccatggtggctttgctaactggcaaattctcaaacatcgtggataaattcgtaattgttgactgtaggtatccatacgaatatgagggcggtcacataaagaccgcggttaacctccccttagaacgagacgccgagtctttcttgctaaagagcccaatcgccccctgttccttggacaagcgcgtcatcttgattttccattgcgagttctcctcagagcgaggtccccgcatgtgtagattcattagagagcgcgaccgggcggttaacgactaccctagcttgtattatcccgagatgtacatcctgaaggggggatacaaagaatttttccctcagcaccccaacttttgcgagccacaggattaccgccccatgaaccatgaagcttttaaagatgaactgaagacctttcgcctgaaaacaagatcatgggcaggcgagcgaagtcgccgcgaactgtgttctcgtctgcaagaccagtag

SEQ ID NO: 145558 - DNA, 1701 bp, Artificial Sequence
  derived and/or modified sequence
atggaagtcccccagcctgagcctgccccagggtctgccctctcacccgctggcgtttgcgggggagcccaaaggcctggtcacctgcccggactgctgctaggcagccacggattgctgggttcacctgtgcgtgctgccgcttcttcccccgtgaccactcttacacaaactatgcatgatcttgccggattaggttctagatcaaggctgacccatctgagtctctctaggagggcaagtgaaagcagtctctcctccgagagttctgaaagctccgacgccggtctgtgtatggactccccgagccctatggatccccatatggctgaacaaacctttgaacaggccatacaagcagcatctaggataattcgtaacgagcagtttgctatacggagattccagtcgatgccagttcggctgcttggacactccccggtgctgcgtaacattacgaatagccaagctccagacggaagacgtaagtctgaggcaggaagcggcgctgcaagttcttcaggggaagacaaggagaatgacggatttgtgttcaagatgccttggaagcccactcacccctcttccacacatgcactcgcggagtgggccagtcggagagaggcattcgcccagcgtccatcgtccgccccagatctgatgtgccttagccccgaccgaaaaatggaggtcgaggagctgagtcctctggcactgggcagatttagccttacacctgccgaaggagacacagaggaggacgatggttttgttgacatcctggaatctgatctgaaggatgacgacgcagtgccacccggaatggaatccctgatttccgcccctctcgtcaaaaccttagagaaggaggaagagaaagatctggtgatgtactctaagtgtcaaaggctgttccgtagccccagcatgccatgcagcgtgattagacccattctgaaaagactggagcgtcctcaggacagagacacgcctgtgcagaacaagcgccgacgcagtgtaactccaccagaggagcagcaagaagcagaggagccaaaagcccgagttcttcggagcaagtctctttgccacgacgagatcgagaacctgttagattctgatcatcgagagctgattggcgattactccaaggcctttctactgcagaccgtcgacggcaagcatcaggatttaaaatacatcagccctgagacaatggttgctctgctgactgggaaattttccaatattgtggataaattcgtgatagtggactgccggtatccctacgagtacgaaggcggtcacattaagacagcagttaacttgcctcttgagagagacgctgagtccttcctgctgaagtcacccatagccccatgctctcttgacaagagggtcatactaatattccattgtgagttctcttcagaaagaggtcctagaatgtgtagatttatccgtgaacgtgacagggcagtcaacgactatccaagtctatactaccccgagatgtatatcctgaagggaggctacaaggagttttttcctcagcaccccaatttttgcgaacctcaggattaccgcccaatgaaccatgaggcttttaaggacgaactgaagacttttcgtctgaaaacgaggagttgggccggagaaagaagccgtcgcgaactctgcagtcggctgcaggaccaatag

SEQ ID NO: 145559 - DNA, 3096 bp, Artificial Sequence
  derived and/or modified sequence
ggaagtggcagctgcaactagaggcttccctggctggtgcctgagcccggcgtccctcgccccccgccctccccgcatccctctcctccctcgcgcctggccctgtggctcttcctccctccctccttccccccccccccacccctcgcccgctgcctccctcggcccagccagctgtgccggcgtttgttggctgccctgcgcccggccctccagccagccttctgccggccccgccgcgatggaggtgccccagccggagcccgcgccaggctcggctctcagtccagcaggcgtgtgcggtggcgcccagcgtccgggccacctcccgggcctcctgctgggatctcatggcctcctggggtccccggtgcgggcggccgcttcctcgccggtcaccaccctcacccagaccatgcacgacctcgccgggctcggcagccgcagccgcctgacgcacctatccctgtctcgacgggcatccgaatcctccctgtcgtctgaatcctccgaatcttctgatgcaggtctctgcatggattcccccagccctatggacccccacatggcggagcagacgtttgaacaggccatccaggcagccagccggatcattcgaaacgagcagtttgccatcagacgcttccagtctatgccggtgaggctgctgggccacagccccgtgcttcggaacatcaccaactcccaggcgcccgacggccggaggaagagcgaggcgggcagtggagctgccagcagctctggggaagacaaggagaatgatggatttgtcttcaagatgccatggaagcccacacatcccagctccacccatgctctggcagagtgggccagccgcagggaagcctttgcccagagacccagctcggcccccgacctgatgtgtctcagtcctgaccggaagatggaagtggaggagctcagccccctggccctaggtcgcttctctctgacccctgcagagggggatactgaggaagatgatggatttgtggacatcctagagagtgacttaaaggatgatgatgcagttcccccaggcatggagagtctcattagtgccccactggtcaagaccttggaaaaggaagaggaaaaggacctcgtcatgtacagcaagtgccagcggctcttccgctctccgtccatgccctgcagcgtgatccggcccatcctcaagaggctggagcggccccaggacagggacacgcccgtgcagaataagcggaggcggagcgtgacccctcctgaggagcagcaggaggctgaggaacctaaagcccgcgtcctccgctcaaaatcactgtgtcacgatgagatcgagaacctcctggacagtgaccaccgagagctgattggagattactctaaggccttcctcctacagacagtagacggaaagcaccaagacctcaagtacatctcaccagaaacgatggtggccctattgacgggcaagttcagcaacatcgtggataagtttgtgattgtagactgcagatacccctatgaatatgaaggcgggcacatcaagactgcggtgaacttgcccctggaacgcgacgccgagagcttcctactgaagagccccatcgcgccctgtagcctggacaagagagtcatcctcattttccactgtgaattctcatctgagcgtgggccccgcatgtgccgtttcatcagggaacgagaccgtgctgtcaacgactaccccagcctctactaccctgagatgtatatcctgaaaggcggctacaaggagttcttccctcagcacccgaacttctgtgaaccccaggactaccggcccatgaaccacgaggccttcaaggatgagctaaagaccttccgcctcaagactcgcagctgggctggggagcggagccggcgggagctctgtagccggctgcaggaccagtgaggggcctgcgccagtcctgctacctcccttgcctttcgaggcctgaagccagctgccctatgggcctgccgggctgagggcctgctggaggcctcaggtgctgtccatgggaaagatggtgtgggtgtcctgcctgtctgccccagcccagattcccctgtgtcatcccatcattttccatatcctggtgccccccacccctggaagagcccagtctgttgagttagttaagttgggttaataccagcttaaaggcagtattttgtgtcctccaggagcttcttgtttccttgttagggttaacccttcatcttcctgtgtcctgaaacgctcctttgtgtgtgtgtcagctgaggctgggggagagccgtggtccctgaggatgggtcagagctaaactccttcctggcctgagagtcagctctctgccctgtgtacttcccgggccagggctgcccctaatctctgtaggaaccgtggtatgtctgccatgttgcccctttctcttttcccctttcctgtcccaccatacgagcacctccagcctgaacagaagctcttactctttcctatttcagtgttacctgtgtgcttggtctgtttgactttacgcccatctcaggacacttccgtagactgtttaggttcccctgtcaaatatcagttacccactcggtcccagttttgttgccccagaaagggatgttattatccttgggggctcccagggcaagggttaaggcctgaatcatgagcctgctggaagcccagcccctactgctgtgaaccctggggcctgactgctcagaacttgctgctgtcttgttgcggatggatggaaggttggatggatgggtggatggccgtggatggccgtggatgcgcagtgccttgcatacccaaaccaggtgggagcgttttgttgagcatgacagcctgcagcaggaatatatgtgtgcctatttgtgtggacaaaaatatttacacttagggtttggagctattcaagaggaaatgtcacagaagcagctaaaccaaggactgagcaccctctggattctgaatctcaagatgggggcagggctgtgcttgaaggccctgctgagtcatctgttagggccttggttcaataaagcactgagcaagttgagaaa

SEQ ID NO: 145560 - DNA, 1701 bp, Artificial Sequence
  derived and/or modified sequence
atggaggtgccccagcccgagcccgcccccggcagcgccctgagccccgccggcgtgtgcggcggcgcccagagacccggccacctgcccggcctgctgctgggcagccacggcctgctgggcagccccgtgagagccgccgccagcagccccgtgaccaccctgacccagaccatgcacgacctggccggcctgggcagcagaagcagactgacccacctgagcctgagcagaagagccagcgagagcagcctgagcagcgagagcagcgagagcagcgacgccggcctgtgcatggacagccccagccccatggacccccacatggccgagcagaccttcgagcaggccatccaggccgccagcagaatcatcagaaacgagcagttcgccatcagaagattccagagcatgcccgtgagactgctgggccacagccccgtgctgagaaacatcaccaacagccaggcccccgacggcagaagaaagagcgaggccggcagcggcgccgccagcagcagcggcgaggacaaggagaacgacggcttcgtgttcaagatgccctggaagcccacccaccccagcagcacccacgccctggccgagtgggccagcagaagagaggccttcgcccagagacccagcagcgcccccgacctgatgtgcctgagccccgacagaaagatggaggtggaggagctgagccccctggccctgggcagattcagcctgacccccgccgagggcgacaccgaggaggacgacggcttcgtggacatcctggagagcgacctgaaggacgacgacgccgtgccccccggcatggagagcctgatcagcgcccccctggtgaagaccctggagaaggaggaggagaaggacctggtgatgtacagcaagtgccagagactgttcagaagccccagcatgccctgcagcgtgatcagacccatcctgaagagactggagagaccccaggacagagacacccccgtgcagaacaagagaagaagaagcgtgaccccccccgaggagcagcaggaggccgaggagcccaaggccagagtgctgagaagcaagagcctgtgccacgacgagatcgagaacctgctggacagcgaccacagagagctgatcggcgactacagcaaggccttcctgctgcagaccgtggacggcaagcaccaggacctgaagtacatcagccccgagaccatggtggccctgctgaccggcaagttcagcaacatcgtggacaagttcgtgatcgtggactgcagatacccctacgagtacgagggcggccacatcaagaccgccgtgaacctgcccctggagagagacgccgagagcttcctgctgaagagccccatcgccccctgcagcctggacaagagagtgatcctgatcttccactgcgagttcagcagcgagagaggccccagaatgtgcagattcatcagagagagagacagagccgtgaacgactaccccagcctgtactaccccgagatgtacatcctgaagggcggctacaaggagttcttcccccagcaccccaacttctgcgagccccaggactacagacccatgaaccacgaggccttcaaggacgagctgaagaccttcagactgaagaccagaagctgggccggcgagagaagcagaagagagctgtgcagcagactgcaggaccagtag

SEQ ID NO: 145561 - protein, 236 aa, Artificial Sequence
  derived and/or modified sequence
MARPLVPSSQKALLLELKGLQEEPVEGFRVTLVDEGDLYNWEVAIFGPPNTYYEGGYFKARLKFPIDYPYSPPAFRFLTKMWHPNIYETGDVCISILHPPVDDPQSGELPSERWNPTQNVRTILLSVISLLNEPNTFSPANVDASVMYRKWKESKGKDREYTDIIRKQVLGTKVDAERDGVKVPTTLAEYCVKTKAPAPDEGSDLFYDDYYEDGEVEEEADSCFGDDEDDSGTEES

SEQ ID NO: 145562 - DNA, 1442 bp, Artificial Sequence
  derived and/or modified sequence
ggcaagcgccggtggggcggcggcgccagagctgctggagcgctcggggtccccgggcggcggcggcggcgcagaggaggaggcaggcggcggccccggtggctcccccccggacggtgcgcggcccggcccgtctcgcgaactcgcggtggtcgcgcggccccgcgctgctccgaccccgggcccctccgccgccgccatggctcggccgctagtgcccagctcgcagaaggcgctgctgctggagctcaaggggctgcaggaagagccggtcgagggattccgcgtgacactggtggacgagggcgatctatacaactgggaggtggccatcttcgggccccccaacacctactacgagggcggctacttcaaggcgcgcctcaagttccccatcgactacccatactctccaccagcctttcggttcctgaccaagatgtggcaccctaacatctacgagacgggggacgtgtgtatctccatcctccacccgccggtggacgacccccagagcggggagctgccctcagagaggtggaaccccacgcagaacgtcaggaccattctcctgagtgtgatctccctcctgaacgagcccaacaccttctcgcccgcaaacgtggacgcctccgtgatgtacaggaagtggaaagagagcaaggggaaggatcgggagtacacagacatcatccggaagcaggtcctggggaccaaggtggacgcggagcgtgacggcgtgaaggtgcccaccacgctggccgagtactgcgtgaagaccaaggcgccggcgcccgacgagggctcagacctcttctacgacgactactacgaggacggcgaggtggaggaggaggccgacagctgcttcggggacgatgaggatgactctggcacggaggagtcctgacaccaccagaataaacttgccgagtttacctcactagggccggacccgtggctccttagacgacagactacctcacggaggttttgtgctggtccccgtctcctctggttgtttcgttttggctttttctccctccccatgtctgttctgggttttcacgtgcttcagagaagaggggctgccccaccgccactcacgtcactcggggctcggtggacgggcccagggtgggagcggccggcccacctgtcccctcgggaggggagctgagcccgacttctaccggggtcccccagcttccggactggccgcaccccggaggagccacgggggcgctgctgggaacgtgggcggggggccgtttcctgacactaccagcctgggaggcccaggtgtagcggtccgaggggcccggtcctgcctgtcagctccaggtcctggagccacgtccagcacagagtggacggattcaccgtggccgactcttttccctgctttggtttgtttgaaatctaaataaaactactttatg

SEQ ID NO: 145563 - DNA, 711 bp, Artificial Sequence
  derived and/or modified sequence
atggccagacccctggtgcccagcagccagaaggccctgctgctggagctgaagggcctgcaggaggagcccgtggagggcttcagagtgaccctggtggacgagggcgacctgtacaactgggaggtggccatcttcggcccccccaacacctactacgagggcggctacttcaaggccagactgaagttccccatcgactacccctacagcccccccgccttcagattcctgaccaagatgtggcaccccaacatctacgagaccggcgacgtgtgcatcagcatcctgcacccccccgtggacgacccccagagcggcgagctgcccagcgagagatggaaccccacccagaacgtgagaaccatcctgctgagcgtgatcagcctgctgaacgagcccaacaccttcagccccgccaacgtggacgccagcgtgatgtacagaaagtggaaggagagcaagggcaaggacagagagtacaccgacatcatcagaaagcaggtgctgggcaccaaggtggacgccgagagagacggcgtgaaggtgcccaccaccctggccgagtactgcgtgaagaccaaggcccccgcccccgacgagggcagcgacctgttctacgacgactactacgaggacggcgaggtggaggaggaggccgacagctgcttcggcgacgacgaggacgacagcggcaccgaggagagctag

SEQ ID NO: 145564 - DNA, 711 bp, Artificial Sequence
  derived and/or modified sequence
atggcacggccactggtaccaagcagccagaaagcactcctgctggaacttaagggtctgcaagaagagccagttgaaggcttccgagtgaccctcgttgacgaaggggacctttataactgggaagtggccatctttggtccaccaaacacatactacgagggtggttactttaaggcacggctcaaattcccaatcgattatccttatagccctcccgcgttcaggtttttaacaaaaatgtggcaccctaatatttacgagaccggcgatgtttgcattagcattctccacccccccgtcgatgatccacagtctggagaattaccttctgaaagatggaacccgactcagaacgtcaggacaatactgttgagcgtgatctccctcctgaacgagcccaacaccttctcgcctgcaaacgtagacgcctccgtaatgtacaggaagtggaaggaatctaagggcaaagatcgagagtatacggacatcatccgtaaacaggtgctggggacaaaagtagatgccgagcgtgatggtgtgaaagtgcccacaaccttagccgagtattgcgtcaagaccaaggccccagccccagatgagggtagcgatctgttctatgatgattactatgaagacggggaagtcgaggaagaagctgacagttgcttcggcgatgacgaggacgactcagggacagaggagtcttag

SEQ ID NO: 145565 - DNA, 711 bp, Artificial Sequence
  derived and/or modified sequence
atggcccggcccctggtgcccagcagccagaaggccctgctgctggagctgaagggcctgcaggaggagcctgtggagggcttccgggtgaccctggtggatgaaggagacctgtacaactgggaggtggccatcttcggcccccccaacacctactatgaaggaggctacttcaaggcccggctgaagttccccatcgactacccctacagccccccagccttccgcttcctgaccaagatgtggcaccccaacatctatgaaacaggagatgtgtgcatcagcatcctgcacccccctgtggatgacccccagagcggggagctgcccagcgagcgctggaaccccacccagaatgtgaggaccatcctgctgagcgtcatcagcctgctgaatgagcccaacaccttctccccagccaacgtggatgcctctgtgatgtacaggaagtggaaggagagcaagggcaaggaccgggagtacacagacatcatcaggaagcaggtgctgggcaccaaggtggatgctgagagagatggagtgaaggtgcccaccaccctggccgagtactgtgtgaagaccaaggccccagccccagatgagggcagtgacctcttctatgatgactactatgaagatggagaggtggaggaggaggccgacagctgctttggagatgatgaagatgattctggaacagaggagagctag

SEQ ID NO: 145566 - DNA, 711 bp, Artificial Sequence
  derived and/or modified sequence
atggcccggcccctggtgcccagcagccagaaggccctgctgctggaactcaaggggctgcaagaggaacctgtagaggggttcagggttactctggtggacgaaggggacctgtataactgggaggttgctatctttggcccaccgaacacgtactatgagggtgggtacttcaaggcaagacttaaatttcctatcgattatccttattcccctcccgctttccgctttcttacgaagatgtggcatcctaacatctatgaaacgggagatgtatgcatatccattctgcatccacctgtcgacgacccgcagtctggggagctgccatccgagaggtggaatcccactcagaatgtgagaacaattttactatccgtcatctctctcctgaatgagcctaacacatttagtccagccaacgttgacgcaagcgtgatgtatcgcaagtggaaggaatctaaaggcaaagatagagaatacaccgacattattcgtaaacaagtactgggcacaaaggtagacgcagaaagagatggggtaaaagtgcctacaacgctggcggaatattgcgtcaaaacaaaggcaccggcaccggatgaaggtagcgatctcttttacgatgattactacgaggacggggaagtggaggaagaggctgactcgtgtttcggcgatgatgaagatgatagtggtacggaagagtcttag

SEQ ID NO: 145567 - DNA, 711 bp, Artificial Sequence
  derived and/or modified sequence
atggccaggccactggtgccatcttctcagaaggcccttctcttagaactgaagggacttcaagaggaacccgtcgagggattcagggtgacattagtggatgagggcgatctatacaactgggaggtcgcaatatttggtccaccaaacacatattacgagggaggttatttcaaggcacgtttaaaattcccaatagactacccctacagtcctcccgcttttcgctttttgactaagatgtggcaccccaatatctatgaaactggcgacgtgtgtatttctatactgcacccccctgttgacgatccccagtcaggcgagcttccttctgagagatggaatccaactcaaaatgtgcgcaccatcttgcttagtgtcatttccctgctgaatgagcccaacaccttctcccctgctaacgtggacgcctcagtgatgtaccgaaagtggaaggagtccaagggcaaagaccgtgaatacaccgatatcatcaggaagcaggtcctggggacgaaggtagatgccgaacgggacggtgttaaggttccaacaactctcgcagaatactgcgttaagacaaaggcacccgcacccgatgagggtagtgacctcttttacgacgactactacgaggacggcgaggtcgaagaagaggcggattcttgcttcggcgacgatgaagacgactccggcaccgaggagtcatag

SEQ ID NO: 145568 - protein, 882 aa, Artificial Sequence
  derived and/or modified sequence
MGPWSRSLSALLLLLQVSSWLCQEPEPCHPGFDAESYTFTVPRRHLERGRVLGRVNFEDCTGRQRTAYFSLDTRFKVGTDGVITVKRPLRFHNPQIHFLVYAWDSTYRKFSTKVTLNTVGHHHRPPPHQASVSGIQAELLTFPNSSPGLRRQKRDWVIPPISCPENEKGPFPKNLVQIKSNKDKEGKVFYSITGQGADTPPVGVFIIERETGWLKVTEPLDRERIATYTLFSHAVSSNGNAVEDPMEILITVTDQNDNKPEFTQEVFKGSVMEGALPGTSVMEVTATDADDDVNTYNAAIAYTILSQDPELPDKNMFTINRNTGVISVVTTGLDRESFPTYTLVVQAADLQGEGLSTTATAVITVTDTNDNPPIFNPTTYKGQVPENEANVVITTLKVTDADAPNTPAWEAVYTILNDDGGQFVVTTNPVNNDGILKTAKGLDFEAKQQYILHVAVTNVVPFEVSLTTSTATVTVDVLDVNEAPIFVPPEKRVEVSEDFGVGQEITSYTAQEPDTFMEQKITYRIWRDTANWLEINPDTGAISTRAELDREDFEHVKNSTYTALIIATDNGSPVATGTGTLLLILSDVNDNAPIPEPRTIFFCERNPKPQVINIIDADLPPNTSPFTAELTHGASANWTIQYNDPTQESIILKPKMALEVGDYKINLKLMDNQNKDQVTTLEVSVCDCEGAAGVCRKAQPVEAGLQIPAILGILGGILALLILILLLLLFLRRRAVVKEPLLPPEDDTRDNVYYYDEEGGGEEDQDFDLSQLHRGLDARPEVTRNDVAPTLMSVPRYLPRPANPDEIGNFIDENLKAADTDPTAPPYDSLLVFDYEGSGSEAASLSSLNSSESDKDQDYDYLNEWGNRFKKLADMYGGGEDD

SEQ ID NO: 145569 - protein, 647 aa, Artificial Sequence
  derived and/or modified sequence
MGPWSRSLSALLLLLQVSSWLCQEPEPCHPGFDAESYTFTVPRRHLERGRVLGRVNFEDCTGRQRTAYFSLDTRFKVGTDGVITVKRPLRFHNPQIHFLVYAWDSTYRKFSTKVTLNTVGHHHRPPPHQASVSGIQAELLTFPNSSPGLRRQKRDWVIPPISCPENEKGPFPKNLVQIKSNKDKEGKVFYSITGQGADTPPVGVFIIERETGWLKVTEPLDRERIATYTLFSHAVSSNGNAVEDPMEILITVTDQNDNKPEFTQEVFKGSVMEGALPGTSVMEVTATDADDDVNTYNAAIAYTILSQDPELPDKNMFTINRNTGVISVVTTGLDRESFPTYTLVVQAADLQGEGLSTTATAVITVTDTNDNPPIFNPTTYKGQVPENEANVVITTLKVTDADAPNTPAWEAVYTILNDDGGQFVVTTNPVNNDGILKTAKGLDFEAKQQYILHVAVTNVVPFEVSLTTSTATVTVDVLDVNEAPIFVPPEKRVEVSEDFGVGQEITSYTAQEPDTFMEQKITYRIWRDTANWLEINPDTGAISTRAELDREDFEHVKNSTYTALIIATDNGSPVATGTGTLLLILSDVNDNAPIPEPRTIFFCERNPKPQVINIIDADLPPNLASQSIGITDMSHCTCPAPQLPAIF

SEQ ID NO: 145570 - protein, 900 aa, Artificial Sequence
  derived and/or modified sequence
MGPWSRSLSALLLLLQVSSWLCQEPEPCHPGFDAESYTFTVPRRHLERGRVLGRVNFEDCTGRQRTAYFSLDTRFKVGTDGVITVKRPLRFHNPQIHFLVYAWDSTYRKFSTKVTLNTVGHHHRPPPHQASVSGIQAELLTFPNSSPGLRRQKRDWVIPPISCPENEKGPFPKNLVQIKSNKDKEGKVFYSITGQGADTPPVGVFIIERETGWLKVTEPLDRERIATYTLFSHAVSSNGNAVEDPMEILITVTDQNDNKPEFTQEVFKGSVMEGALPGTSVMEVTATDADDDVNTYNAAIAYTILSQDPELPDKNMFTINRNTGVISVVTTGLDRESFPTYTLVVQAADLQGEGLSTTATAVITVTDTNDNPPIFNPTTYKGQVPENEANVVITTLKVTDADAPNTPAWEAVYTILNDDGGQFVVTTNPVNNDGILKTAKLARCRNWHPHSCSYPCPLGLDFEAKQQYILHVAVTNVVPFEVSLTTSTATVTVDVLDVNEAPIFVPPEKRVEVSEDFGVGQEITSYTAQEPDTFMEQKITYRIWRDTANWLEINPDTGAISTRAELDREDFEHVKNSTYTALIIATDNGSPVATGTGTLLLILSDVNDNAPIPEPRTIFFCERNPKPQVINIIDADLPPNTSPFTAELTHGASANWTIQYNDPTQESIILKPKMALEVGDYKINLKLMDNQNKDQVTTLEVSVCDCEGAAGVCRKAQPVEAGLQIPAILGILGGILALLILILLLLLFLRRRAVVKEPLLPPEDDTRDNVYYYDEEGGGEEDQDFDLSQLHRGLDARPEVTRNDVAPTLMSVPRYLPRPANPDEIGNFIDENLKAADTDPTAPPYDSLLVFDYEGSGSEAASLSSLNSSESDKDQDYDYLNEWGNRFKKLADMYGGGEDD

SEQ ID NO: 145571 - DNA, 2649 bp, Artificial Sequence
  derived and/or modified sequence
atgggcccctggagtcggtctctatccgcccttctgctcttattacaggtgtcgtcatggctctgccaggaacctgagccttgtcaccccgggtttgatgctgagtcatacacatttactgttcccaggaggcacctcgagcgggggagggtgctgggacgtgtgaatttcgaggattgcacgggtcgccagagaactgcgtattttagtctcgacactcggttcaaggtaggtaccgacggagtcattaccgtgaaacgcccacttaggttccacaacccacagatccacttcctcgtctacgcatgggactcgacatacaggaagtttagtactaaggtaacactgaacaccgtgggtcatcaccatcgaccccctcctcaccaagcctctgtctcagggatccaagcggagctgctcacctttccaaatagtagccccggccttagacgccaaaaaagagattgggttatcccccctatctcatgccctgagaatgagaagggaccgttccccaaaaacttggtgcagatcaaaagtaacaaagataaagaagggaaagtgttctactcaataaccggtcagggggctgacaccccacccgtgggagttttcatcatcgagcgcgagaccgggtggctgaaggtgacggagcccctggatcgcgagagaatagctacgtacacactcttctcccatgctgtgtcgtccaacggaaatgctgtggaagacccaatggagatccttattactgtaaccgatcagaacgataataagcctgaatttacccaggaagtgtttaaggggtcagtgatggagggagcccttcccggtacaagtgttatggaggttacagctacagacgcagacgatgatgtaaatacctataatgccgccatagcatacacgatcctctcacaggatcctgaattgccagacaagaatatgtttactattaaccggaacaccggggttatctcggtggttactactggcttggaccgcgagtcatttcctacatacactctcgtggtgcaagccgcagatttacagggggagggcctaagcactacagcaacagccgtaatcaccgttactgacaccaacgacaaccctcccatcttcaatcccaccacttacaaggggcaggtgccagaaaacgaagccaacgtagtgatcactacacttaaggtgaccgacgcagacgctccaaacactccagcttgggaagcggtctacaccattctgaacgacgatggaggccagttcgtggttacaacaaatcctgttaacaacgatggaatattaaaaactgctaaagggctggatttcgaggcaaagcagcagtacatattacacgtggcagtgaccaatgtggtgccgttcgaggtgagcctgacgacctcaactgcaactgtgaccgttgacgtgttagatgttaacgaggctccaatcttcgtcccgccagagaagagggtggaagtctccgaggacttcggcgtgggccaggaaatcactagttacacagctcaggagcccgatacctttatggagcaaaagatcacctatagaatctggcgcgacaccgcaaactggttggagatcaatcctgatactggggccatttcaacccgcgcggagctggaccgcgaggacttcgagcatgtgaagaactcaacttacacagcattgattatcgccactgacaatggctctcccgtcgcaaccgggaccgggacactgctgttgattctctcagacgtcaatgataacgcccccattccagaacctcgtactatctttttttgtgaacgtaacccgaagccacaggtcatcaacattattgacgccgacctgccccctaataccagcccatttacggccgaactgactcacggggctagtgccaactggacgatacaatacaacgatcctactcaggaatccatcatcctaaaacccaaaatggctttggaggttggtgattataagatcaatttaaagttgatggacaatcagaacaaggaccaagtgaccactcttgaggtctctgtctgcgactgtgagggtgctgccggggtgtgcaggaaggcgcagccggtggaagccggactgcagatccccgctattttgggcatcctggggggaatcttagcgctgctcattttaatacttcttctgctgctgttcttgcgccgccgggcggttgtaaaagagccactcctgccgcctgaagacgatacccgcgataatgtctactattacgatgaagagggcggtggcgaggaagatcaggactttgatctatcccagctgcaccggggcctcgatgcacgccccgaggttacccgcaatgacgttgcacccactctgatgtccgtccctcggtacctccccagacctgccaatcccgacgagatcgggaacttcatagacgagaatctgaaggcggctgatacggaccccaccgcccccccttatgatagtctactggtgtttgactacgaaggaagtggctcggaggccgcatcgctgtcctccttaaacagctccgaatccgataaggaccaggattacgattacctgaatgaatggggtaatagatttaaaaaattggccgatatgtatggcggcggcgaggatgattag

SEQ ID NO: 145572 - DNA, 1944 bp, Artificial Sequence
  derived and/or modified sequence
atgggcccatggtcaagatctctcagtgccttattgctgttgcttcaagttagctcttggctctgccaggagcctgaaccttgccatcctggattcgacgccgagagctacactttcactgttccccgcaggcatctggagagaggccgggtgttaggccgggtaaattttgaggattgcaccggacggcagcgaactgcctatttcagcctcgatacacggtttaaagtgggaacagatggagtgataaccgtgaaacgacctctgcgattccacaaccctcagatccattttttagtctatgcatgggattccacctaccggaaattctcgaccaaggtgaccctcaatacggtgggccaccaccatcggccacctccacatcaagcaagcgtgtccggaattcaagccgaactattaactttccctaatagctccccgggtctgcgaaggcagaaaagggactgggtgatccctccaatatcctgtccggaaaatgaaaagggtccgtttcctaaaaatcttgtccagataaagtccaataaagataaagagggaaaagttttctacagcataaccgggcagggcgcagatactcccccagtaggtgtatttatcattgaacgagagactggttggctaaaagtgacagaacctttggaccgagagaggatcgctacctatactttgttctcccatgctgtaagctcaaatgggaatgccgtggaggatcctatggaaatcctaattactgtgaccgaccagaacgacaataagcccgagtttacgcaggaagtgtttaagggaagcgtgatggaaggcgcactgcctggtacttcagtgatggaggtaacagcaacggacgctgatgatgatgtgaacacctataacgccgcaatcgcgtatacaatcctgtctcaagatcccgaactgcccgataagaatatgtttaccatcaacaggaatacaggtgtaatttctgtcgtgacaacgggtctggacagggaaagcttcccgacatacaccctcgtggtgcaggccgcagatctgcagggggaagggctgagcaccaccgccacagcagtgatcactgtaacagacaccaacgataaccctccaatatttaacccgaccacctataaaggccaagtaccagaaaatgaagccaacgttgtcatcacaactttaaaagtgacagacgccgatgctcccaatacacctgcgtgggaggccgtatataccatcctgaatgacgacgggggacagttcgtggttacgactaatcctgttaataatgatgggatcttgaagaccgccaaaggcttggactttgaggctaagcagcagtacatcctccacgtggctgttacaaatgtcgtgccatttgaggtgagtctgaccaccagtacggcaacagtgaccgtcgacgttcttgacgtcaatgaagctccaatcttcgtccccccagaaaagagagttgaggtgtcagaagactttggagtgggacaagagatcacgagctacaccgcccaggaacctgacacattcatggaacagaagatcacctacagaatttggcgggatacagcaaactggttggaaattaaccccgataccggagccattagtacgcgagccgaattggatagggaggacttcgagcacgtcaaaaacagcacttataccgcactgatcatcgccacagataacgggagcccagtggctaccggtactggcaccctgctgctgattctgagtgatgtcaatgacaatgcccccatacctgagcctcgcacaatcttcttttgcgaacggaatccaaagcctcaagtcatcaacattattgatgcggatttgccccctaacctcgctagccagtctattgggattacagatatgtcccactgtacttgccctgcaccgcagctgccagctattttctag

SEQ ID NO: 145573 - DNA, 2703 bp, Artificial Sequence
  derived and/or modified sequence
atgggcccttggagtcgatccctgtccgctttgcttctcctgctgcaggtttcttcttggctgtgtcaggagccagagccctgccacccaggcttcgatgcagagagctacactttcacagtgcctcggaggcacctggagcgtgggcgggtactcgggcgtgtcaacttcgaagactgtaccggcagacaaagaacggcttatttctctctcgatactcgcttcaaggtgggcacagacggagtgatcaccgtgaagaggcctctcagattccacaatcctcaaatacattttctggtatacgcttgggattcaacctatcgaaaatttagcacaaaggtgactctcaatacagtgggtcatcaccaccggcctcccccccaccaggcctctgttagtggcatccaggctgagctgctgaccttccccaacagtagtccaggactccggagacagaaaagggactgggttatcccaccgatttcctgtccagaaaatgagaaaggtccattcccgaagaacctggtacagataaagagcaataaagataaagaggggaaggtgttctatagcattacaggacagggcgcagatactcctccagtgggagttttcatcattgagcgggaaactgggtggcttaaggttaccgaaccgcttgatcgcgagaggatagctacttatacccttttctcccatgctgttagctctaacggcaatgcagtagaggaccccatggagatcttgatcaccgtgaccgatcagaatgataataaacctgagtttacgcaggaagtctttaagggctccgtgatggaaggggccctgcccggaacaagcgtgatggaggtgacagctactgatgcagacgacgacgtgaatacctataatgcggcaatagcatacaccatactttcccaggatccagaactccccgataaaaatatgtttactatcaacaggaacacgggagtcataagtgtggtcacaacgggattagaccgggagagttttcccacatacacgttggttgttcaggctgccgaccttcaaggcgaaggattgagcaccacagcgactgcggttattaccgtaacagacacaaacgataacccgccaattttcaatccaactacctacaaaggccaggtcccagagaatgaggccaacgtggttatcaccaccctgaaagtgacggatgcagacgccccaaatacgcctgcatgggaggcggtttacactattctcaacgatgacggcgggcagttcgttgtaactactaatccagtgaataatgacggaatcttgaaaaccgccaaattggcacgttgtaggaactggcacccacactcgtgtagttacccatgtcctctcggactggacttcgaggcaaagcagcagtatatactccacgtggccgtaaccaatgtcgttccgttcgaggtgagcctgacaactagcaccgccaccgttacggtcgacgtgttagatgtgaacgaagcccccattttcgttcctccagagaagagagtggaggtgtcggaggacttcggagttggacaggaaattacctcctacacggctcaagaacctgatacattcatggagcagaaaattacatacagaatctggcgggacacagccaattggctggaaatcaacccagatacaggtgccatttcaacccgcgccgaactggatcgtgaagatttcgaacacgtgaagaactcgacttatacggcattgattatagccacggacaatggttcgcccgtcgctacgggaacaggtaccttgctcctcattctgagcgatgtcaatgataatgcccccatcccagagccccggactatttttttttgcgagagaaatccaaaaccacaggtgatcaacataattgacgccgatttgccccctaatacctctcctttcaccgccgaactcacccacggggcctcagcaaactggacgatccaatacaacgacccaacccaggagagcatcattctaaaaccaaaaatggccctggaggtgggtgattataaaataaatctcaagttgatggataatcagaataaggaccaggtgaccacattagaagtgagcgtgtgcgactgtgagggcgcagccggcgtctgccggaaggcccagcccgtggaagcgggtctgcaaattcccgccatcctgggaatactgggtgggatactcgccctgctgatcctcatactgctgctgctcctctttctgagacgaagggctgtggtcaaggaaccacttctgccgcccgaagacgacactcgcgataatgtgtattactatgacgaggaggggggtggtgaggaggatcaggacttcgacctgtcacagctgcatcgcgggctagatgctagaccagaagtgacgagaaatgacgtggctccaactttgatgtctgtcccgcggtaccttcctcgtccagcgaatcccgacgagatcggcaactttattgatgagaatctcaaggcagcagatacagatccaacagctccaccgtatgattctctgctcgtgttcgactacgaaggctctggaagtgaggctgcttccctctcctcgttaaactcctcagagtcagacaaagatcaggactacgattatctgaatgaatggggaaacaggttcaaaaagctggcagacatgtacggggggggcgaagatgactag

SEQ ID NO: 145574 - DNA, 2649 bp, Artificial Sequence
  derived and/or modified sequence
atgggcccctggagccgcagcctgagcgccctgctgctgctgctgcaggtgtcctcctggctgtgccaggagcctgagccctgccaccctggctttgatgctgagagctacaccttcaccgtgcccaggaggcacctggagcggggccgggtgctgggccgggtgaactttgaggactgcaccggccggcagaggacagcctacttcagcctggacacccgcttcaaggtgggcacagatggagtcatcaccgtgaagaggcccctgcgcttccacaacccccagatccacttcctggtgtatgcctgggacagcacctacaggaagttcagcaccaaggtgaccctgaacacagtgggccaccaccaccggcccccaccccaccaggcctctgtgtctggcatccaggccgagctgctgaccttccccaacagcagccctggcctgcggcggcagaagagggactgggtgattcctcccatcagctgcccagaaaatgagaagggccccttccccaagaacctggtgcagatcaagagcaacaaggacaaggagggcaaggtgttctacagcatcaccggccagggcgctgacaccccacctgtgggcgtcttcatcatcgagcgggagaccggctggctgaaggtgacagagcccctggaccgggagagaattgccacctacaccctcttcagccatgctgtgagcagcaatggaaatgctgtggaggaccccatggagatcctgatcaccgtgacagaccagaatgacaacaagccagagttcacccaggaggtgttcaagggctctgtgatggagggcgccctgcccggcacctctgtgatggaggtgacagccacagatgctgatgatgatgtgaacacctacaatgctgccatcgcctacaccatcctgagccaggaccctgagctgcctgacaagaacatgttcaccatcaacagaaatactggagtcatctctgtggtgaccaccggcctggaccgggagagcttccccacctacaccctggtggtgcaggccgctgacctgcagggcgagggcctgagcaccacagccacagctgtgatcaccgtgacagacaccaatgacaacccccccatcttcaaccccaccacctacaagggccaggtgcctgaaaatgaggccaacgtggtgatcaccaccctgaaggtgacagatgctgatgcccccaacaccccagcctgggaggccgtgtacaccatcctgaatgatgatggcggccagtttgtggtgaccaccaaccctgtgaacaatgatggcatcctgaagacagccaagggcctggactttgaggccaagcagcagtacatcctgcacgtggccgtgaccaacgtggtgccctttgaggtgtccctgaccaccagcacagccaccgtgacagtggatgtgctggatgtgaatgaggcccccatctttgtgcccccagagaagagggtggaggtgtctgaagattttggagtgggccaggagatcaccagctacacagcccaggagccagacaccttcatggagcagaagatcacctaccgcatctggagggacacagccaactggctggagatcaacccagacacaggagccatcagcaccagggctgagctggacagagaagattttgaacatgtgaagaacagcacctacacagccctgatcatcgccacagacaatggcagccctgtggccaccggcaccggcaccctgctgctgatcctgagtgatgtgaatgacaatgcccccatccctgagcccaggaccatcttcttctgtgaaagaaaccccaagccccaggtgatcaacatcattgatgctgacctgccccccaacaccagccccttcaccgctgagctgacccacggggccagcgccaactggaccatccagtacaatgaccccacccaggagagcatcatcctgaagcccaagatggccctggaggtgggggactacaagatcaacctgaagctgatggacaaccagaacaaggaccaggtgaccaccctggaggtgtctgtgtgtgactgtgagggcgccgccggcgtgtgcaggaaggcccagcctgtggaggccggcctgcagatcccagccatcctgggcatcctgggcggcatcctggccctgctgatcctgatcctgctgctgctgctcttcctgcggaggagagctgtggtgaaggagcccctgctgcccccagaagatgacacccgggacaacgtgtactactatgatgaggagggcggcggggaggaggaccaggactttgacctgagccagctgcaccggggcctggatgcccggcctgaggtgaccagaaatgatgtggcccccaccctgatgtctgtgccccgctacctgcccaggcctgccaacccagatgaaattggcaacttcattgatgagaacctgaaggctgctgacacagaccccacagccccaccctatgacagcctgctggtgtttgattatgagggcagcggcagcgaggccgccagcctgagcagcctgaacagcagcgagagtgacaaggaccaggactatgactacctgaatgagtggggcaaccgcttcaagaagctggccgacatgtatggaggaggagaagatgactag

SEQ ID NO: 145575 - DNA, 1944 bp, Artificial Sequence
  derived and/or modified sequence
atgggcccctggagccgcagcctgagcgccctgctgctgctgctgcaggtgtcctcctggctgtgccaggagcctgagccctgccaccctggctttgatgctgagagctacaccttcaccgtgcccaggaggcacctggagcggggccgggtgctgggccgggtgaactttgaggactgcaccggccggcagaggacagcctacttcagcctggacacccgcttcaaggtgggcacagatggagtcatcaccgtgaagaggcccctgcgcttccacaacccccagatccacttcctggtgtatgcctgggacagcacctacaggaagttcagcaccaaggtgaccctgaacacagtgggccaccaccaccggcccccaccccaccaggcctctgtgtctggcatccaggccgagctgctgaccttccccaacagcagccctggcctgcggcggcagaagagggactgggtgattcctcccatcagctgcccagaaaatgagaagggccccttccccaagaacctggtgcagatcaagagcaacaaggacaaggagggcaaggtgttctacagcatcaccggccagggcgctgacaccccacctgtgggcgtcttcatcatcgagcgggagaccggctggctgaaggtgacagagcccctggaccgggagagaattgccacctacaccctcttcagccatgctgtgagcagcaatggaaatgctgtggaggaccccatggagatcctgatcaccgtgacagaccagaatgacaacaagccagagttcacccaggaggtgttcaagggctctgtgatggagggcgccctgcccggcacctctgtgatggaggtgacagccacagatgctgatgatgatgtgaacacctacaatgctgccatcgcctacaccatcctgagccaggaccctgagctgcctgacaagaacatgttcaccatcaacagaaatactggagtcatctctgtggtgaccaccggcctggaccgggagagcttccccacctacaccctggtggtgcaggccgctgacctgcagggcgagggcctgagcaccacagccacagctgtgatcaccgtgacagacaccaatgacaacccccccatcttcaaccccaccacctacaagggccaggtgcctgaaaatgaggccaacgtggtgatcaccaccctgaaggtgacagatgctgatgcccccaacaccccagcctgggaggccgtgtacaccatcctgaatgatgatggcggccagtttgtggtgaccaccaaccctgtgaacaatgatggcatcctgaagacagccaagggcctggactttgaggccaagcagcagtacatcctgcacgtggccgtgaccaacgtggtgccctttgaggtgtccctgaccaccagcacagccaccgtgacagtggatgtgctggatgtgaatgaggcccccatctttgtgcccccagagaagagggtggaggtgtctgaagattttggagtgggccaggagatcaccagctacacagcccaggagccagacaccttcatggagcagaagatcacctaccgcatctggagggacacagccaactggctggagatcaacccagacacaggagccatcagcaccagggctgagctggacagagaagattttgaacatgtgaagaacagcacctacacagccctgatcatcgccacagacaatggcagccctgtggccaccggcaccggcaccctgctgctgatcctgagtgatgtgaatgacaatgcccccatccctgagcccaggaccatcttcttctgtgaaagaaaccccaagccccaggtgatcaacatcattgatgctgacctgccccccaacctggccagccagagcatcggcatcacagacatgagccactgcacctgcccagccccccagctgcctgccatcttctag

SEQ ID NO: 145576 - DNA, 2703 bp, Artificial Sequence
  derived and/or modified sequence
atgggcccctggagccgcagcctgagcgccctgctgctgctgctgcaggtgtcctcctggctgtgccaggagcctgagccctgccaccctggctttgatgctgagagctacaccttcaccgtgcccaggaggcacctggagcggggccgggtgctgggccgggtgaactttgaggactgcaccggccggcagaggacagcctacttcagcctggacacccgcttcaaggtgggcacagatggagtcatcaccgtgaagaggcccctgcgcttccacaacccccagatccacttcctggtgtatgcctgggacagcacctacaggaagttcagcaccaaggtgaccctgaacacagtgggccaccaccaccggcccccaccccaccaggcctctgtgtctggcatccaggccgagctgctgaccttccccaacagcagccctggcctgcggcggcagaagagggactgggtgattcctcccatcagctgcccagaaaatgagaagggccccttccccaagaacctggtgcagatcaagagcaacaaggacaaggagggcaaggtgttctacagcatcaccggccagggcgctgacaccccacctgtgggcgtcttcatcatcgagcgggagaccggctggctgaaggtgacagagcccctggaccgggagagaattgccacctacaccctcttcagccatgctgtgagcagcaatggaaatgctgtggaggaccccatggagatcctgatcaccgtgacagaccagaatgacaacaagccagagttcacccaggaggtgttcaagggctctgtgatggagggcgccctgcccggcacctctgtgatggaggtgacagccacagatgctgatgatgatgtgaacacctacaatgctgccatcgcctacaccatcctgagccaggaccctgagctgcctgacaagaacatgttcaccatcaacagaaatactggagtcatctctgtggtgaccaccggcctggaccgggagagcttccccacctacaccctggtggtgcaggccgctgacctgcagggcgagggcctgagcaccacagccacagctgtgatcaccgtgacagacaccaatgacaacccccccatcttcaaccccaccacctacaagggccaggtgcctgaaaatgaggccaacgtggtgatcaccaccctgaaggtgacagatgctgatgcccccaacaccccagcctgggaggccgtgtacaccatcctgaatgatgatggcggccagtttgtggtgaccaccaaccctgtgaacaatgatggcatcctgaagacagccaagctggcccgctgcaggaactggcacccccacagctgcagctacccctgccccctgggcctggactttgaggccaagcagcagtacatcctgcacgtggccgtgaccaacgtggtgccctttgaggtgtccctgaccaccagcacagccaccgtgacagtggatgtgctggatgtgaatgaggcccccatctttgtgcccccagagaagagggtggaggtgtctgaagattttggagtgggccaggagatcaccagctacacagcccaggagccagacaccttcatggagcagaagatcacctaccgcatctggagggacacagccaactggctggagatcaacccagacacaggagccatcagcaccagggctgagctggacagagaagattttgaacatgtgaagaacagcacctacacagccctgatcatcgccacagacaatggcagccctgtggccaccggcaccggcaccctgctgctgatcctgagtgatgtgaatgacaatgcccccatccctgagcccaggaccatcttcttctgtgaaagaaaccccaagccccaggtgatcaacatcattgatgctgacctgccccccaacaccagccccttcaccgctgagctgacccacggggccagcgccaactggaccatccagtacaatgaccccacccaggagagcatcatcctgaagcccaagatggccctggaggtgggggactacaagatcaacctgaagctgatggacaaccagaacaaggaccaggtgaccaccctggaggtgtctgtgtgtgactgtgagggcgccgccggcgtgtgcaggaaggcccagcctgtggaggccggcctgcagatcccagccatcctgggcatcctgggcggcatcctggccctgctgatcctgatcctgctgctgctgctcttcctgcggaggagagctgtggtgaaggagcccctgctgcccccagaagatgacacccgggacaacgtgtactactatgatgaggagggcggcggggaggaggaccaggactttgacctgagccagctgcaccggggcctggatgcccggcctgaggtgaccagaaatgatgtggcccccaccctgatgtctgtgccccgctacctgcccaggcctgccaacccagatgaaattggcaacttcattgatgagaacctgaaggctgctgacacagaccccacagccccaccctatgacagcctgctggtgtttgattatgagggcagcggcagcgaggccgccagcctgagcagcctgaacagcagcgagagtgacaaggaccaggactatgactacctgaatgagtggggcaaccgcttcaagaagctggccgacatgtatggaggaggagaagatgactag

SEQ ID NO: 145577 - DNA, 2649 bp, Artificial Sequence
  derived and/or modified sequence
atgggcccctggagccggagcctgagcgccctgctgctgctgctgcaggtgtcatcttggctctgtcaggagccagagccatgtcaccccggatttgacgcagagtcttataccttcaccgtcccccgcaggcacctggaacgagggagagtcctcggcagagtgaatttcgaagactgcacaggacgtcagagaactgcttatttcagcttggacacaagattcaaagtcggcacggacggtgtgattactgtgaagaggcctctccgattccacaacccccagatccactttctcgtctatgcttgggatagcacctatcgaaaattttcgaccaaagtgactttgaacaccgtggggcatcatcaccggccgcccccacaccaagcctccgtgtctgggatccaagctgagctcctgacttttcctaattcctccccagggttgaggcgccagaagagagactgggttattcctcctatctcgtgtcctgaaaatgaaaaggggccttttcctaagaacttagtgcagataaaatccaacaaggataaagagggaaaggtgttttactcgattactgggcagggagcagacaccccacctgtgggagtctttataatcgaaagagagaccggttggttgaaggtgacagaaccacttgatagagaaagaattgcgacatatacactattcagccatgctgtgagctctaatggtaacgccgtagaagacccaatggagattctgatcacagtgactgaccaaaacgacaataaaccagaattcacacaggaggttttcaaggggtcggtgatggaaggcgccctcccaggcactagtgttatggaggtgacggccacagacgccgatgatgacgtgaatacgtataatgctgcaatagcttacaccatcctgagccaagacccagagctccctgacaagaatatgtttactattaatagaaatacaggcgtcatttctgtcgtgaccactggcctcgacagagaaagcttccccacttacacgcttgtggtgcaggccgccgaccttcagggggagggtttgagcactaccgctaccgcagtaatcaccgtgacagataccaatgataacccacccatctttaatcccaccacttataaagggcaggtgccggaaaacgaagccaatgtggtgatcacaactctcaaggtgacagacgcagacgctccaaacacaccagcgtgggaggccgtttacacaattcttaacgacgatggagggcagttcgtggttaccacaaacccagtcaataacgatgggatacttaagaccgctaagggcctcgacttcgaggcaaagcagcagtacatcctccacgtggctgtgacaaacgtggttccattcgaagtgtcgcttaccacttctacagccacggtgaccgtggatgtactggacgtgaatgaggcacccatctttgttcccccggaaaaaagagttgaggtgagcgaggactttggtgttgggcaggaaattactagttacaccgcacaggagcccgacacattcatggaacagaaaataacttataggatatggagagatacagctaactggctagaaattaaccccgacacgggcgccatatcaacacgggcggagctagaccgggaagatttcgagcacgttaagaatagcacatatactgccttaatcatcgccaccgataatggaagcccagtcgccaccggtaccgggaccctgctgttgatactctccgatgttaacgacaacgcccctatacctgagccgcggaccatattcttctgtgagcggaatcccaagccgcaagttatcaacatcatcgacgcggacctgcccccaaatacatctcctttcactgcagagttgacccacggtgcatcagctaactggacaattcagtacaacgaccctacccaggagtccattatccttaagcctaagatggcacttgaagtcggtgattataagatcaacctcaagctcatggataaccaaaataaagaccaagtgacaaccctcgaggtgagcgtttgcgattgcgagggcgccgctggagtctgcagaaaagcccagccggtcgaggcagggctgcagatccccgctatcttgggtatcctcggcggcatcctggccttactgatccttatacttctgcttctcctattcctgagaagaagggccgtggtgaaggaacctcttctcccaccagaggacgatactagagataatgtgtattactatgatgaggaagggggtggcgaggaagatcaggactttgacctgtcccagctgcataggggactggacgctaggcctgaagtcacaaggaacgacgtcgccccaacactgatgagcgtgcccagataccttccacgacccgcaaatcccgacgaaatcggaaacttcatagacgagaatttgaaggctgccgacacagatccaactgcacctccttacgactccctgctggtcttcgactacgaggggtccgggtctgaggccgcatcactgtcatcacttaactcctcagagagcgacaaagatcaggattacgattacctgaatgaatgggggaatcgtttcaaaaaactcgcagacatgtacggaggtggggaggacgattag

SEQ ID NO: 145578 - DNA, 1944 bp, Artificial Sequence
  derived and/or modified sequence
atgggcccctggagccggagcctgagcgccctgctgctgctgctgcaggtttctagctggctttgtcaggagcccgagccgtgtcaccccggatttgatgctgaatcctatacctttaccgtgcctaggagacacctggaacgtggaagggtactcggccgtgtgaatttcgaggactgcactggtaggcagaggacagcttacttctccctggacacgcgcttcaaggtaggcaccgatggcgtgattacagtgaagagacctctgagattccacaatccgcagatacactttttagtgtacgcgtgggattccacttaccgtaaattctctaccaaggtgactctcaacactgtcggccaccatcatagaccccctccccaccaggctagtgtgtcaggcattcaggccgaactgctcacctttccaaactcctcgccagggctgcgacggcaaaaacgcgactgggtgataccgccaatctcctgccccgagaacgaaaaaggcccttttcctaaaaacttggtgcaaattaagtcaaacaaagataaggagggcaaggtattttacagtattactggacagggggcagacactccacctgtcggggtgttcatcatcgaaagagagacgggctggttgaaggtcaccgagcctttggatcgcgagaggattgctacctataccttattcagccacgctgtgagtagcaatggtaatgccgtcgaggatcccatggaaatactgatcactgttacggaccagaacgacaacaaaccagagttcacgcaagaggtatttaagggctctgtaatggagggcgcactgccagggaccagcgtgatggaggtcacggctactgacgccgatgacgacgtcaacacctataacgccgccatagcttataccatcctgagtcaggatccagagctccccgacaaaaatatgttcacaataaatcggaacacaggggtgattagcgttgtaactacgggactcgaccgcgaaagtttccctacctacactctggtggtccaggcagccgaccttcagggtgaaggactgagcaccactgcgactgccgtgatcaccgtcacagacaccaatgacaatccacctattttcaaccccaccacctataagggccaggtcccagaaaatgaggccaacgtggtgatcacaaccctcaaagtgacagatgccgacgctcctaatacccctgcttgggaggcagtgtacacaatacttaacgacgatgggggacagttcgtcgtgacgacgaaccctgtcaataatgacgggatcctcaaaacagctaagggactggattttgaggcaaaacaacaatacatactgcacgtggccgtgaccaacgtggtcccttttgaagtctcattgaccacgtccaccgccacggtgacagtagacgtgcttgacgtaaatgaggccccaatcttcgttcctccagagaaaagagtggaggtatctgaggacttcggggtagggcaagagattacctcatataccgcccaagagccagataccttcatggagcaaaaaatcacatacaggatctggcgggacacagctaattggttggagattaatccagataccggggccatatctactcgcgccgagttggaccgcgaagacttcgaacatgtgaaaaattccacttataccgcgctgattattgctacagataatggttcccccgtcgctacgggtactggcaccctgctgcttattctgtcagatgtgaacgataacgcacccatccccgagccgagaacaatctttttttgcgagaggaatccaaaaccacaggtcattaatattatcgacgctgatctgcctccaaatctcgcctctcagtctatcgggataacagacatgtctcattgtacttgcccggccccccaactgcccgcaattttttag

SEQ ID NO: 145579 - DNA, 2703 bp, Artificial Sequence
  derived and/or modified sequence
atgggcccctggagccggagcctgagcgccctgctgctgctgctgcaggtcagctcatggctgtgtcaagagccagaaccatgccaccccgggttcgacgccgaatcctacaccttcactgtcccccgacgccacctcgagcgcggcagagtcctgggccgggtgaacttcgaggactgcacaggtcggcagaggaccgcctatttttcgttggataccagatttaaagtcgggaccgatggagtcatcaccgtcaaaaggccgctgcgatttcacaatccccaaatccacttcctggtgtacgcctgggattccacatatagaaagttctcaactaaggtgaccttaaacacggtgggacatcaccacagaccgcccccccaccaagcttctgtttcagggatccaagcagaactcctcaccttccccaactcatctccagggctccggaggcaaaagagggactgggtgattcctcctattagttgtccggagaacgagaagggcccattccccaagaatctagtgcagattaagtcaaacaaagacaaggaaggcaaagtgttctattccataaccggccagggggctgataccccacccgtgggagtttttatcatcgagagagagaccggttggctcaaagttactgagcccctggaccgcgagcgtattgcaacttacacccttttcagccatgctgtttcctcgaacgggaacgctgtggaagaccctatggagattctcatcacagtcactgaccaaaacgataacaaaccagagtttacacaggaggtctttaaaggaagcgtgatggaaggggctctcccaggcaccagcgtgatggaagtaactgctaccgacgctgacgatgacgttaatacatataacgccgccatcgcctatacaatcttatctcaggaccccgagttgccagataaaaacatgtttaccattaaccgaaatactggagtgatttccgtcgtgactaccggtctcgatcgcgagagtttccctacgtatacgctagtcgtgcaggccgctgatctacagggggaggggctgtccactactgcaacagccgtcatcacagtcactgacacgaatgataaccccccaatatttaatccaacgacctacaaagggcaggtccctgagaacgaggccaacgtggtgatcactacattgaaggtgactgacgctgatgctcctaacacccctgcgtgggaagctgtttacacgatcctgaatgacgatggcgggcaatttgtagtgactaccaatcctgtgaataatgatggaattttgaagacggccaagctcgccagatgccgcaactggcacccccattcgtgttcctacccttgtcccctgggtctggactttgaggccaagcaacagtacattctgcacgtagcagtgacaaatgtcgtcccttttgaagtctcactgacaaccagcactgccaccgtcacagtggatgtgctggatgtgaacgaagcccctattttcgtgccacctgaaaaacgtgtggaggtgagtgaagacttcggcgttgggcaggagattactagttatacagctcaggagcccgacacctttatggagcaaaagataacctatcgtatttggcgcgatactgcgaactggcttgaaatcaacccagacaccggcgctatctctactagagccgaattggaccgggaagacttcgagcacgtcaaaaattctacctataccgcactcattattgccactgacaacggaagccccgtggctaccgggacaggaacgttgcttctcatcttgtccgatgtaaacgacaacgccccaattcctgaacctcggacgattttcttttgtgagcgtaacccaaagcctcaggtaatcaatataatagatgccgacttacccccaaatactagcccattcaccgcagagcttacacacggggccagcgccaactggactatccagtataacgatcctacacaggagtccatcatcctaaagcccaagatggcacttgaggtgggtgactacaaaataaacttgaaacttatggataaccagaataaagatcaagttaccactctcgaggtttccgtttgtgactgcgaaggagccgccggtgtttgtagaaaggcgcagccggtagaggccggtctccaaatccccgcgatattaggaatcctcgggggcattctcgccctgctgatcctcatcctcttattgttattgttccttcgccgcagagctgtcgtgaaggaacccctgcttcccccagaagacgacacaagggacaacgtgtactattatgacgaagaaggaggaggagaagaggaccaggattttgacttgtctcaattgcacaggggcctcgacgcgcgtcccgaagtgactcggaacgacgtggccccaacactcatgtccgtcccacgctacctgcctaggccagccaatcctgacgagatcggcaatttcattgatgaaaacctgaaagccgcagacactgacccgacagcacccccctacgacagcctgctagttttcgattacgaggggtctggaagcgaggccgcttcactctcctcactgaattccagtgaatccgacaaggatcaggactacgattatctgaatgagtggggaaatcggttcaaaaagctcgcggacatgtacggagggggcgaagacgattag

SEQ ID NO: 145580 - DNA, 2649 bp, Artificial Sequence
  derived and/or modified sequence
atgggcccatggtctaggagtctatctgcattgctgcttctgcttcaagtgagctcttggctctgccaggaacctgagccatgccatcccggtttcgacgcagaatcctacacattcaccgttccacgtcggcacctggagagagggagagtcctgggaagggtgaactttgaggattgtacagggcgacagcggactgcgtattttagccttgacacaaggttcaaggtcggaacagacggggtgattaccgttaagcggccacttagatttcataatcctcagatccactttctcgtctatgcctgggattctacatacaggaagttttctacaaaagtcacactgaatacagttggccaccatcacagaccgcctccacatcaggcaagtgtcagcggaatccaagccgaactgctgacctttcccaacagcagccctggcctgcgcagacagaagcgggactgggttattccacccatctcttgtcctgagaacgagaaggggccattccccaaaaacctggtgcagataaagtctaacaaagataaggagggcaaggtgttttattcgatcacagggcagggagccgacaccccccctgtaggagtgtttatcatcgagagagagaccgggtggctgaaggtgaccgaacctctcgacagggaaagaatagccacctacaccctctttagccatgctgtctccagcaacggcaatgccgtggaggacccaatggaaattctcatcaccgtaaccgaccagaatgacaacaaacctgagttcactcaagaagtgtttaagggctccgtaatggaaggtgcccttccaggtacgtccgtgatggaggtcactgccactgatgccgatgatgacgtgaacacttacaatgcagcaatcgcttacacgattctatcccaggaccccgagctccccgacaaaaacatgttcacaattaaccgcaatacaggcgtgatctccgtcgtgaccacaggcctggatcgcgagagcttcccaacatatacgctagtcgtgcaggctgcagaccttcagggggaaggactatccactacggcaaccgcagttattactgtgacggacacaaacgacaatccgccaattttcaatcctaccacctacaaagggcaggtgcctgagaatgaggcaaacgtcgtgattaccactttaaaagtcactgacgccgatgccccaaatacacccgcttgggaagctgtctatactatcctgaacgacgacggtgggcagtttgttgtaaccactaatcccgtgaacaatgatgggatcctgaagaccgcgaaaggcttggattttgaagccaagcagcagtatattctccacgttgctgttacaaacgttgtgcccttcgaggtgagtttgacaaccagcaccgccacagtgacggtggacgttctggacgtgaatgaagctccgatctttgtccctccagagaaaagggtggaagtttccgaagatttcggtgtgggccaggaaattacgtcctatacagcacaggaacccgatactttcatggagcagaagattacttatcgcatctggcgcgataccgctaattggctggaaataaatcccgatacaggagccatctctacacgagctgagctggaccgagaggattttgagcatgtaaagaactctacatacactgcactcatcatcgccactgataacgggtctccggtcgctactgggactggcaccctcctgctgattctgtctgacgtgaacgacaatgccccaattcccgaacccaggaccatcttcttctgtgagaggaaccccaagccccaggttatcaacatcattgatgccgatcttcctccaaatactagtcctttcaccgccgaattgactcatggtgctagcgcgaactggaccatccagtataatgaccccacccaggaatcaatcatacttaaacccaagatggccctggaggtgggagactataaaatcaatctcaaacttatggacaaccagaacaaggatcaggtgacgactctggaagtctccgtatgcgactgcgagggcgcagccggtgtctgcagaaaagctcagccagtggaggcgggattgcagatccctgccatactcgggatcctgggcggaatcctggccttactgatccttattttactcctcctcctgttcctgaggagaagggccgtggtgaaggaacccttgttacccccagaggatgacacacgggataatgtgtattactatgacgaagaggggggtggggaagaggatcaggattttgatctgtcacagttacacaggggactggacgctcgcccagaagtgacccgcaacgacgtcgcaccgaccctgatgtcggttccacggtacctcccccgtcctgcaaacccagacgaaataggcaattttatcgatgaaaatttgaaagcagccgatactgaccccaccgcaccaccgtacgacagcctccttgttttcgattacgagggaagtggaagcgaggcagcctctctgtcttccctcaattcctcagagtcagacaaagaccaagattatgattatttgaacgaatggggcaataggttcaagaaattagcagatatgtacgggggtggcgaagatgattag

SEQ ID NO: 145581 - DNA, 1944 bp, Artificial Sequence
  derived and/or modified sequence
atgggaccttggtcccgctcccttagcgccctgctgctccttttgcaggtgagttcttggctctgtcaggagcctgagccttgccaccccggttttgatgctgagtcctacacatttacagtgcctcggaggcatctggagcgcggaagagtcctgggcagagttaacttcgaggattgtacaggccgtcagcgtactgcctattttagcctggacactcgctttaaggttgggacagacggcgtcattacagtgaagcgaccactgcgcttccataatccccagatccatttcttggtgtatgcctgggactccacctaccgaaaatttagtactaaggtcaccctcaacaccgtaggtcaccatcatcgcccaccccctcaccaagctagtgttagtggcattcaggcggaacttctgacttttcccaattccagccctggtctgaggcggcagaaacgtgattgggtgattcctcccataagctgcccggagaacgagaaaggtccgtttccaaagaacttagtacaaatcaagtcgaacaaagataaagagggaaaagtgttctacagcataactggtcagggtgcagatacccctcccgtcggcgtgttcatcatcgaacgggagacgggctggctcaaggtgactgaaccactggatagggagcgcatcgcaacatacaccctcttcagtcatgccgtgtccagcaatggcaacgccgtcgaggaccccatggaaattctcatcacagtgactgatcaaaatgataataagccagagtttacacaagaggtgttcaagggttcagtcatggagggggcactgccgggaacaagcgtcatggaggtgactgctacagacgccgacgacgacgtcaacacctacaacgctgctatcgcctacactatcttgtcacaagaccccgagctgccggacaagaacatgttcaccattaaccgaaacaccggggttatatcagtggtgactaccggtttggatagggaatccttcccaacctatacacttgtggtgcaggccgctgacctacaaggagagggactgtctactactgccactgccgtcataaccgtgactgatacgaatgacaatcctcccatcttcaacccaacaacgtacaaggggcaggttcccgagaacgaagccaatgtggtgatcaccactctaaaggtgactgacgcagacgcacccaacacaccagcctgggaggctgtgtataccatactaaatgacgacggtggccagttcgtggtgaccactaaccccgtgaacaacgacggcatcctgaaaaccgctaaggggctcgacttcgaggccaagcagcaatatattctgcatgtggccgtcactaatgtggtaccctttgaggtgagcctaactacttccaccgccacagtgacagtggatgtccttgacgtaaacgaggctccgatttttgtaccccctgaaaagagagtcgaagtgtcggaagacttcggggtgggccaggaaattactagctatacagcccaggaacctgatacgtttatggaacagaaaatcacttatcgaatttggcgcgataccgcaaactggttggagataaatcccgataccggcgcaattagcacgagggctgaattggaccgggaggactttgagcatgtgaaaaacagtacctacacagcgttgattattgccaccgacaatggttctcccgttgccaccggcaccggcactcttttgctgattctatcggatgtcaacgacaacgccccaataccagaaccacggaccatattcttttgtgagcgtaaccccaagcctcaggtgatcaatattatagacgccgatctcccccctaatcttgccagtcaatcaattggaataacggacatgagtcactgtacatgccccgcacctcagttacccgcaatcttttag

SEQ ID NO: 145582 - DNA, 2703 bp, Artificial Sequence
  derived and/or modified sequence
atggggccttggtcacgtagtctatcagctctgctgctgctcttgcaagtgagcagctggctgtgccaagaacctgaaccttgccacccaggcttcgatgcagagtcatacacatttactgtgccgcgacgccacctggagcggggaagagtcctcggtagagtgaatttcgaggattgcactgggagacagaggactgcttatttttcactcgataccaggttcaaggtgggaacggatggggttatcactgtgaaacgcccactgagatttcacaacccgcagatccactttctggtatatgcgtgggattctacctatcgaaagttctccacaaaggtgacgcttaataccgtgggacaccatcaccggccacctccccaccaagcttcagtatccggtattcaggcagagttgctgacgttccccaactcaagtcctggcctgcggagacaaaagcgggattgggtgatccctccaattagctgcccggaaaacgagaagggcccattccctaaaaacctggttcagatcaagtccaataaggacaaggaggggaaagtcttctattctattaccggccagggagccgatacgccaccggttggtgtgttcatcatcgagagagagactgggtggctcaaggtgaccgaaccactggaccgcgagcgtatcgcgacttacaccttgtttagtcacgcggtgtcaagtaacgggaatgccgtggaggatcccatggagatcttgattaccgtcactgatcagaatgacaataaaccagagttcactcaagaggtttttaaaggtagtgtcatggagggggctctcccaggcacaagtgtcatggaggtgactgctacggacgctgacgacgacgtgaatacctacaacgcagctattgcttacacaattctgtctcaggaccctgaactgcctgataagaatatgtttaccatcaaccgaaacacaggcgttataagcgtggtgacaaccggtctcgaccgcgagtccttcccgacctatacactcgtggtccaagccgcagacctgcagggcgagggcctgtcaactacagctaccgctgtcataactgttacagataccaacgataaccccccaatctttaacccaacaacttacaaaggccaggttcccgagaatgaagcaaacgttgtaattacgactctgaaggttactgatgctgatgcccctaatacccctgcttgggaggctgtttatacaatccttaacgacgacggtggacaatttgtcgtcacaaccaacccagttaacaatgacggaattttaaagaccgcaaaattggcccgttgcagaaactggcacccccatagttgctcctacccatgccctctcggtttggattttgaagcaaagcagcagtatattctgcacgtggcagtgacaaatgtcgtgccattcgaggtgtcgcttactacttccaccgcaaccgttaccgtagacgtgttagacgtcaatgaagcccctatctttgtgccaccggaaaagagggtggaggtttctgaagactttggcgtgggacaggagatcacgagttacacggcccaggagccagatacatttatggagcagaaaataacctataggatttggagagatacagccaactggttggaaatcaatccagatactggcgctatatccacacgcgctgagctcgacagagaagatttcgaacacgtgaagaattcaacttatacggcgctgatcatcgctacggataacggctccccggtcgccacgggaacaggcacattgctgctgatcctgagcgacgttaatgataatgcgccaattcctgaaccacgcaccattttcttctgtgagcgcaatcccaagccacaggtcatcaacattattgacgcagatttgccccctaataccagcccctttaccgccgagcttacgcacggagcctccgctaactggactatccagtacaacgatccaacacaagagagcataatcttgaagccaaagatggctttggaggttggggactacaagatcaacctcaaactcatggataaccaaaacaaagatcaggtgaccacactcgaagtgtctgtctgcgactgtgagggcgcagcgggagtgtgccggaaggcccagcccgttgaagccggtctccagatccccgcaatactaggtattttaggcggaattttagctctactgatcctgattcttttactgctgctcttcctgagaaggcgcgctgtcgtcaaggagcctctgctccctccggaggatgacactcgcgataacgtgtactattatgatgaggaggggggaggcgaggaggaccaggacttcgatttgtctcagctgcaccgagggctggacgctcgccctgaagttactagaaatgacgtcgctcctacgctcatgagcgtcccccgatatctccctagaccagccaatcctgatgagatcggaaacttcattgatgaaaatctgaaggctgccgataccgacccaaccgcgccaccatacgacagcctgctggtgtttgactacgagggctccggatcggaagctgccagcctctcctctttgaacagttccgagtccgacaaggatcaggattatgattacctcaatgagtggggaaatcgctttaaaaagcttgcagacatgtacggcggaggcgaagacgattag

SEQ ID NO: 145583 - DNA, 4875 bp, Artificial Sequence
  derived and/or modified sequence
agccaatcagcggtacggggggcggtgcctccggggctcacctggctgcagccacgcaccccctctcagtggcgtcggaactgcaaagcacctgtgagcttgcggaagtcagttcagactccagcccgctccagcccggcccgacccgaccgcacccggcgcctgccctcgctcggcgtccccggccagccatgggcccttggagccgcagcctctcggcgctgctgctgctgctgcaggtctcctcttggctctgccaggagccggagccctgccaccctggctttgacgccgagagctacacgttcacggtgccccggcgccacctggagagaggccgcgtcctgggcagagtgaattttgaagattgcaccggtcgacaaaggacagcctatttttccctcgacacccgattcaaagtgggcacagatggtgtgattacagtcaaaaggcctctacggtttcataacccacagatccatttcttggtctacgcctgggactccacctacagaaagttttccaccaaagtcacgctgaatacagtggggcaccaccaccgccccccgccccatcaggcctccgtttctggaatccaagcagaattgctcacatttcccaactcctctcctggcctcagaagacagaagagagactgggttattcctcccatcagctgcccagaaaatgaaaaaggcccatttcctaaaaacctggttcagatcaaatccaacaaagacaaagaaggcaaggttttctacagcatcactggccaaggagctgacacaccccctgttggtgtctttattattgaaagagaaacaggatggctgaaggtgacagagcctctggatagagaacgcattgccacatacactctcttctctcacgctgtgtcatccaacgggaatgcagttgaggatccaatggagattttgatcacggtaaccgatcagaatgacaacaagcccgaattcacccaggaggtctttaaggggtctgtcatggaaggtgctcttccaggaacctctgtgatggaggtcacagccacagacgcggacgatgatgtgaacacctacaatgccgccatcgcttacaccatcctcagccaagatcctgagctccctgacaaaaatatgttcaccattaacaggaacacaggagtcatcagtgtggtcaccactgggctggaccgagagagtttccctacgtataccctggtggttcaagctgctgaccttcaaggtgaggggttaagcacaacagcaacagctgtgatcacagtcactgacaccaacgataatcctccgatcttcaatcccaccacgtacaagggtcaggtgcctgagaacgaggctaacgtcgtaatcaccacactgaaagtgactgatgctgatgcccccaataccccagcgtgggaggctgtatacaccatattgaatgatgatggtggacaatttgtcgtcaccacaaatccagtgaacaacgatggcattttgaaaacagcaaagggcttggattttgaggccaagcagcagtacattctacacgtagcagtgacgaatgtggtaccttttgaggtctctctcaccacctccacagccaccgtcaccgtggatgtgctggatgtgaatgaagcccccatctttgtgcctcctgaaaagagagtggaagtgtccgaggactttggcgtgggccaggaaatcacatcctacactgcccaggagccagacacatttatggaacagaaaataacatatcggatttggagagacactgccaactggctggagattaatccggacactggtgccatttccactcgggctgagctggacagggaggattttgagcacgtgaagaacagcacgtacacagccctaatcatagctacagacaatggttctccagttgctactggaacagggacacttctgctgatcctgtctgatgtgaatgacaacgcccccataccagaacctcgaactatattcttctgtgagaggaatccaaagcctcaggtcataaacatcattgatgcagaccttcctcccaatacatctcccttcacagcagaactaacacacggggcgagtgccaactggaccattcagtacaacgacccaacccaagaatctatcattttgaagccaaagatggccttagaggtgggtgactacaaaatcaatctcaagctcatggataaccagaataaagaccaagtgaccaccttagaggtcagcgtgtgtgactgtgaaggggccgctggcgtctgtaggaaggcacagcctgtcgaagcaggattgcaaattcctgccattctggggattcttggaggaattcttgctttgctaattctgattctgctgctcttgctgtttcttcggaggagagcggtggtcaaagagcccttactgcccccagaggatgacacccgggacaacgtttattactatgatgaagaaggaggcggagaagaggaccaggactttgacttgagccagctgcacaggggcctggacgctcggcctgaagtgactcgtaacgacgttgcaccaaccctcatgagtgtcccccggtatcttccccgccctgccaatcccgatgaaattggaaattttattgatgaaaatctgaaagcggctgatactgaccccacagccccgccttatgattctctgctcgtgtttgactatgaaggaagcggttccgaagctgctagtctgagctccctgaactcctcagagtcagacaaagaccaggactatgactacttgaacgaatggggcaatcgcttcaagaagctggctgacatgtacggaggcggcgaggacgactaggggactcgagagaggcgggccccagacccatgtgctgggaaatgcagaaatcacgttgctggtggtttttcagctcccttcccttgagatgagtttctggggaaaaaaaagagactggttagtgatgcagttagtatagctttatactctctccactttatagctctaataagtttgtgttagaaaagtttcgacttatttcttaaagcttttttttttttcccatcactctttacatggtggtgatgtccaaaagatacccaaattttaatattccagaagaacaactttagcatcagaaggttcacccagcaccttgcagattttcttaaggaattttgtctcacttttaaaaagaaggggagaagtcagctactctagttctgttgttttgtgtatataattttttaaaaaaaatttgtgtgcttctgctcattactacactggtgtgtccctctgccttttttttttttttaagacagggtctcattctatcggccaggctggagtgcagtggtgcaatcacagctcactgcagccttgtcctcccaggctcaagctatccttgcacctcagcctcccaagtagctgggaccacaggcatgcaccactacgcatgactaattttttaaatatttgagacggggtctccctgtgttacccaggctggtctcaaactcctgggctcaagtgatcctcccatcttggcctcccagagtattgggattacagacatgagccactgcacctgcccagctccccaactccctgccattttttaagagacagtttcgctccatcgcccaggcctgggatgcagtgatgtgatcatagctcactgtaacctcaaactctggggctcaagcagttctcccaccagcctcctttttatttttttgtacagatggggtcttgctatgttgcccaagctggtcttaaactcctggcctcaagcaatccttctgccttggccccccaaagtgctgggattgtgggcatgagctgctgtgcccagcctccatgttttaatatcaactctcactcctgaattcagttgctttgcccaagataggagttctctgatgcagaaattattgggctcttttagggtaagaagtttgtgtctttgtctggccacatcttgactaggtattgtctactctgaagacctttaatggcttccctctttcatctcctgagtatgtaacttgcaatgggcagctatccagtgacttgttctgagtaagtgtgttcattaatgtttatttagctctgaagcaagagtgatatactccaggacttagaatagtgcctaaagtgctgcagccaaagacagagcggaactatgaaaagtgggcttggagatggcaggagagcttgtcattgagcctggcaatttagcaaactgatgctgaggatgattgaggtgggtctacctcatctctgaaaattctggaaggaatggaggagtctcaacatgtgtttctgacacaagatccgtggtttgtactcaaagcccagaatccccaagtgcctgcttttgatgatgtctacagaaaatgctggctgagctgaacacatttgcccaattccaggtgtgcacagaaaaccgagaatattcaaaattccaaatttttttcttaggagcaagaagaaaatgtggccctaaagggggttagttgaggggtagggggtagtgaggatcttgatttggatctctttttatttaaatgtgaatttcaacttttgacaatcaaagaaaagacttttgttgaaatagctttactgtttctcaagtgttttggagaaaaaaatcaaccctgcaatcactttttggaattgtcttgatttttcggcagttcaagctatatcgaatatagttctgtgtagagaatgtcactgtagttttgagtgtatacatgtgtgggtgctgataattgtgtattttctttgggggtggaaaaggaaaacaattcaagctgagaaaagtattctcaaagatgcatttttataaattttattaaacaattttgtt

SEQ ID NO: 145584 - DNA, 3304 bp, Artificial Sequence
  derived and/or modified sequence
aaagcacctgtgagcttgcggaagtcagttcagactccagcccgctccagcccggcccgacccgaccgcacccggcgcctgccctcgctcggcgtccccggccagccatgggcccttggagccgcagcctctcggcgctgctgctgctgctgcaggtctcctcttggctctgccaggagccggagccctgccaccctggctttgacgccgagagctacacgttcacggtgccccggcgccacctggagagaggccgcgtcctgggcagagtgaattttgaagattgcaccggtcgacaaaggacagcctatttttccctcgacacccgattcaaagtgggcacagatggtgtgattacagtcaaaaggcctctacggtttcataacccacagatccatttcttggtctacgcctgggactccacctacagaaagttttccaccaaagtcacgctgaatacagtggggcaccaccaccgccccccgccccatcaggcctccgtttctggaatccaagcagaattgctcacatttcccaactcctctcctggcctcagaagacagaagagagactgggttattcctcccatcagctgcccagaaaatgaaaaaggcccatttcctaaaaacctggttcagatcaaatccaacaaagacaaagaaggcaaggttttctacagcatcactggccaaggagctgacacaccccctgttggtgtctttattattgaaagagaaacaggatggctgaaggtgacagagcctctggatagagaacgcattgccacatacactctcttctctcacgctgtgtcatccaacgggaatgcagttgaggatccaatggagattttgatcacggtaaccgatcagaatgacaacaagcccgaattcacccaggaggtctttaaggggtctgtcatggaaggtgctcttccaggaacctctgtgatggaggtcacagccacagacgcggacgatgatgtgaacacctacaatgccgccatcgcttacaccatcctcagccaagatcctgagctccctgacaaaaatatgttcaccattaacaggaacacaggagtcatcagtgtggtcaccactgggctggaccgagagagtttccctacgtataccctggtggttcaagctgctgaccttcaaggtgaggggttaagcacaacagcaacagctgtgatcacagtcactgacaccaacgataatcctccgatcttcaatcccaccacgtacaagggtcaggtgcctgagaacgaggctaacgtcgtaatcaccacactgaaagtgactgatgctgatgcccccaataccccagcgtgggaggctgtatacaccatattgaatgatgatggtggacaatttgtcgtcaccacaaatccagtgaacaacgatggcattttgaaaacagcaaagggcttggattttgaggccaagcagcagtacattctacacgtagcagtgacgaatgtggtaccttttgaggtctctctcaccacctccacagccaccgtcaccgtggatgtgctggatgtgaatgaagcccccatctttgtgcctcctgaaaagagagtggaagtgtccgaggactttggcgtgggccaggaaatcacatcctacactgcccaggagccagacacatttatggaacagaaaataacatatcggatttggagagacactgccaactggctggagattaatccggacactggtgccatttccactcgggctgagctggacagggaggattttgagcacgtgaagaacagcacgtacacagccctaatcatagctacagacaatggttctccagttgctactggaacagggacacttctgctgatcctgtctgatgtgaatgacaacgcccccataccagaacctcgaactatattcttctgtgagaggaatccaaagcctcaggtcataaacatcattgatgcagaccttcctcccaacttggcctcccagagtattgggattacagacatgagccactgcacctgcccagctccccaactccctgccattttttaagagacagtttcgctccatcgcccaggcctgggatgcagtgatgtgatcatagctcactgtaacctcaaactctggggctcaagcagttctcccaccagcctcctttttatttttttgtacagatggggtcttgctatgttgcccaagctggtcttaaactcctggcctcaagcaatccttctgccttggccccccaaagtgctgggattgtgggcatgagctgctgtgcccagcctccatgttttaatatcaactctcactcctgaattcagttgctttgcccaagataggagttctctgatgcagaaattattgggctcttttagggtaagaagtttgtgtctttgtctggccacatcttgactaggtattgtctactctgaagacctttaatggcttccctctttcatctcctgagtatgtaacttgcaatgggcagctatccagtgacttgttctgagtaagtgtgttcattaatgtttatttagctctgaagcaagagtgatatactccaggacttagaatagtgcctaaagtgctgcagccaaagacagagcggaactatgaaaagtgggcttggagatggcaggagagcttgtcattgagcctggcaatttagcaaactgatgctgaggatgattgaggtgggtctacctcatctctgaaaattctggaaggaatggaggagtctcaacatgtgtttctgacacaagatccgtggtttgtactcaaagcccagaatccccaagtgcctgcttttgatgatgtctacagaaaatgctggctgagctgaacacatttgcccaattccaggtgtgcacagaaaaccgagaatattcaaaattccaaatttttttcttaggagcaagaagaaaatgtggccctaaagggggttagttgaggggtagggggtagtgaggatcttgatttggatctctttttatttaaatgtgaatttcaacttttgacaatcaaagaaaagacttttgttgaaatagctttactgtttctcaagtgttttggagaaaaaaatcaaccctgcaatcactttttggaattgtcttgatttttcggcagttcaagctatatcgaatatagttctgtgtagagaatgtcactgtagttttgagtgtatacatgtgtgggtgctgataattgtgtattttctttgggggtggaaaaggaaaacaattcaagctgagaaaagtattctcaaagatgcatttttataaattttattaaacaattttgtt

SEQ ID NO: 145585 - DNA, 4869 bp, Artificial Sequence
  derived and/or modified sequence
agtggcgtcggaactgcaaagcacctgtgagcttgcggaagtcagttcagactccagcccgctccagcccggcccgacccgaccgcacccggcgcctgccctcgctcggcgtccccggccagccatgggcccttggagccgcagcctctcggcgctgctgctgctgctgcaggtctcctcttggctctgccaggagccggagccctgccaccctggctttgacgccgagagctacacgttcacggtgccccggcgccacctggagagaggccgcgtcctgggcagagtgaattttgaagattgcaccggtcgacaaaggacagcctatttttccctcgacacccgattcaaagtgggcacagatggtgtgattacagtcaaaaggcctctacggtttcataacccacagatccatttcttggtctacgcctgggactccacctacagaaagttttccaccaaagtcacgctgaatacagtggggcaccaccaccgccccccgccccatcaggcctccgtttctggaatccaagcagaattgctcacatttcccaactcctctcctggcctcagaagacagaagagagactgggttattcctcccatcagctgcccagaaaatgaaaaaggcccatttcctaaaaacctggttcagatcaaatccaacaaagacaaagaaggcaaggttttctacagcatcactggccaaggagctgacacaccccctgttggtgtctttattattgaaagagaaacaggatggctgaaggtgacagagcctctggatagagaacgcattgccacatacactctcttctctcacgctgtgtcatccaacgggaatgcagttgaggatccaatggagattttgatcacggtaaccgatcagaatgacaacaagcccgaattcacccaggaggtctttaaggggtctgtcatggaaggtgctcttccaggaacctctgtgatggaggtcacagccacagacgcggacgatgatgtgaacacctacaatgccgccatcgcttacaccatcctcagccaagatcctgagctccctgacaaaaatatgttcaccattaacaggaacacaggagtcatcagtgtggtcaccactgggctggaccgagagagtttccctacgtataccctggtggttcaagctgctgaccttcaaggtgaggggttaagcacaacagcaacagctgtgatcacagtcactgacaccaacgataatcctccgatcttcaatcccaccacgtacaagggtcaggtgcctgagaacgaggctaacgtcgtaatcaccacactgaaagtgactgatgctgatgcccccaataccccagcgtgggaggctgtatacaccatattgaatgatgatggtggacaatttgtcgtcaccacaaatccagtgaacaacgatggcattttgaaaacagcaaagctggcaagatgcagaaactggcatcctcacagctgttcatacccttgtcccctgggcttggattttgaggccaagcagcagtacattctacacgtagcagtgacgaatgtggtaccttttgaggtctctctcaccacctccacagccaccgtcaccgtggatgtgctggatgtgaatgaagcccccatctttgtgcctcctgaaaagagagtggaagtgtccgaggactttggcgtgggccaggaaatcacatcctacactgcccaggagccagacacatttatggaacagaaaataacatatcggatttggagagacactgccaactggctggagattaatccggacactggtgccatttccactcgggctgagctggacagggaggattttgagcacgtgaagaacagcacgtacacagccctaatcatagctacagacaatggttctccagttgctactggaacagggacacttctgctgatcctgtctgatgtgaatgacaacgcccccataccagaacctcgaactatattcttctgtgagaggaatccaaagcctcaggtcataaacatcattgatgcagaccttcctcccaatacatctcccttcacagcagaactaacacacggggcgagtgccaactggaccattcagtacaacgacccaacccaagaatctatcattttgaagccaaagatggccttagaggtgggtgactacaaaatcaatctcaagctcatggataaccagaataaagaccaagtgaccaccttagaggtcagcgtgtgtgactgtgaaggggccgctggcgtctgtaggaaggcacagcctgtcgaagcaggattgcaaattcctgccattctggggattcttggaggaattcttgctttgctaattctgattctgctgctcttgctgtttcttcggaggagagcggtggtcaaagagcccttactgcccccagaggatgacacccgggacaacgtttattactatgatgaagaaggaggcggagaagaggaccaggactttgacttgagccagctgcacaggggcctggacgctcggcctgaagtgactcgtaacgacgttgcaccaaccctcatgagtgtcccccggtatcttccccgccctgccaatcccgatgaaattggaaattttattgatgaaaatctgaaagcggctgatactgaccccacagccccgccttatgattctctgctcgtgtttgactatgaaggaagcggttccgaagctgctagtctgagctccctgaactcctcagagtcagacaaagaccaggactatgactacttgaacgaatggggcaatcgcttcaagaagctggctgacatgtacggaggcggcgaggacgactaggggactcgagagaggcgggccccagacccatgtgctgggaaatgcagaaatcacgttgctggtggtttttcagctcccttcccttgagatgagtttctggggaaaaaaaagagactggttagtgatgcagttagtatagctttatactctctccactttatagctctaataagtttgtgttagaaaagtttcgacttatttcttaaagcttttttttttttcccatcactctttacatggtggtgatgtccaaaagatacccaaattttaatattccagaagaacaactttagcatcagaaggttcacccagcaccttgcagattttcttaaggaattttgtctcacttttaaaaagaaggggagaagtcagctactctagttctgttgttttgtgtatataattttttaaaaaaaatttgtgtgcttctgctcattactacactggtgtgtccctctgccttttttttttttttaagacagggtctcattctatcggccaggctggagtgcagtggtgcaatcacagctcactgcagccttgtcctcccaggctcaagctatccttgcacctcagcctcccaagtagctgggaccacaggcatgcaccactacgcatgactaattttttaaatatttgagacggggtctccctgtgttacccaggctggtctcaaactcctgggctcaagtgatcctcccatcttggcctcccagagtattgggattacagacatgagccactgcacctgcccagctccccaactccctgccattttttaagagacagtttcgctccatcgcccaggcctgggatgcagtgatgtgatcatagctcactgtaacctcaaactctggggctcaagcagttctcccaccagcctcctttttatttttttgtacagatggggtcttgctatgttgcccaagctggtcttaaactcctggcctcaagcaatccttctgccttggccccccaaagtgctgggattgtgggcatgagctgctgtgcccagcctccatgttttaatatcaactctcactcctgaattcagttgctttgcccaagataggagttctctgatgcagaaattattgggctcttttagggtaagaagtttgtgtctttgtctggccacatcttgactaggtattgtctactctgaagacctttaatggcttccctctttcatctcctgagtatgtaacttgcaatgggcagctatccagtgacttgttctgagtaagtgtgttcattaatgtttatttagctctgaagcaagagtgatatactccaggacttagaatagtgcctaaagtgctgcagccaaagacagagcggaactatgaaaagtgggcttggagatggcaggagagcttgtcattgagcctggcaatttagcaaactgatgctgaggatgattgaggtgggtctacctcatctctgaaaattctggaaggaatggaggagtctcaacatgtgtttctgacacaagatccgtggtttgtactcaaagcccagaatccccaagtgcctgcttttgatgatgtctacagaaaatgctggctgagctgaacacatttgcccaattccaggtgtgcacagaaaaccgagaatattcaaaattccaaatttttttcttaggagcaagaagaaaatgtggccctaaagggggttagttgaggggtagggggtagtgaggatcttgatttggatctctttttatttaaatgtgaatttcaacttttgacaatcaaagaaaagacttttgttgaaatagctttactgtttctcaagtgttttggagaaaaaaatcaaccctgcaatcactttttggaattgtcttgatttttcggcagttcaagctatatcgaatatagttctgtgtagagaatgtcactgtagttttgagtgtatacatgtgtgggtgctgataattgtgtattttctttgggggtggaaaaggaaaacaattcaagctgagaaaagtattctcaaagatgcatttttataaattttattaaacaattttgttaaaccat

SEQ ID NO: 145586 - DNA, 2649 bp, Artificial Sequence
  derived and/or modified sequence
atgggcccctggagcagaagcctgagcgccctgctgctgctgctgcaggtgagcagctggctgtgccaggagcccgagccctgccaccccggcttcgacgccgagagctacaccttcaccgtgcccagaagacacctggagagaggcagagtgctgggcagagtgaacttcgaggactgcaccggcagacagagaaccgcctacttcagcctggacaccagattcaaggtgggcaccgacggcgtgatcaccgtgaagagacccctgagattccacaacccccagatccacttcctggtgtacgcctgggacagcacctacagaaagttcagcaccaaggtgaccctgaacaccgtgggccaccaccacagaccccccccccaccaggccagcgtgagcggcatccaggccgagctgctgaccttccccaacagcagccccggcctgagaagacagaagagagactgggtgatcccccccatcagctgccccgagaacgagaagggccccttccccaagaacctggtgcagatcaagagcaacaaggacaaggagggcaaggtgttctacagcatcaccggccagggcgccgacaccccccccgtgggcgtgttcatcatcgagagagagaccggctggctgaaggtgaccgagcccctggacagagagagaatcgccacctacaccctgttcagccacgccgtgagcagcaacggcaacgccgtggaggaccccatggagatcctgatcaccgtgaccgaccagaacgacaacaagcccgagttcacccaggaggtgttcaagggcagcgtgatggagggcgccctgcccggcaccagcgtgatggaggtgaccgccaccgacgccgacgacgacgtgaacacctacaacgccgccatcgcctacaccatcctgagccaggaccccgagctgcccgacaagaacatgttcaccatcaacagaaacaccggcgtgatcagcgtggtgaccaccggcctggacagagagagcttccccacctacaccctggtggtgcaggccgccgacctgcagggcgagggcctgagcaccaccgccaccgccgtgatcaccgtgaccgacaccaacgacaacccccccatcttcaaccccaccacctacaagggccaggtgcccgagaacgaggccaacgtggtgatcaccaccctgaaggtgaccgacgccgacgcccccaacacccccgcctgggaggccgtgtacaccatcctgaacgacgacggcggccagttcgtggtgaccaccaaccccgtgaacaacgacggcatcctgaagaccgccaagggcctggacttcgaggccaagcagcagtacatcctgcacgtggccgtgaccaacgtggtgcccttcgaggtgagcctgaccaccagcaccgccaccgtgaccgtggacgtgctggacgtgaacgaggcccccatcttcgtgccccccgagaagagagtggaggtgagcgaggacttcggcgtgggccaggagatcaccagctacaccgcccaggagcccgacaccttcatggagcagaagatcacctacagaatctggagagacaccgccaactggctggagatcaaccccgacaccggcgccatcagcaccagagccgagctggacagagaggacttcgagcacgtgaagaacagcacctacaccgccctgatcatcgccaccgacaacggcagccccgtggccaccggcaccggcaccctgctgctgatcctgagcgacgtgaacgacaacgcccccatccccgagcccagaaccatcttcttctgcgagagaaaccccaagccccaggtgatcaacatcatcgacgccgacctgccccccaacaccagccccttcaccgccgagctgacccacggcgccagcgccaactggaccatccagtacaacgaccccacccaggagagcatcatcctgaagcccaagatggccctggaggtgggcgactacaagatcaacctgaagctgatggacaaccagaacaaggaccaggtgaccaccctggaggtgagcgtgtgcgactgcgagggcgccgccggcgtgtgcagaaaggcccagcccgtggaggccggcctgcagatccccgccatcctgggcatcctgggcggcatcctggccctgctgatcctgatcctgctgctgctgctgttcctgagaagaagagccgtggtgaaggagcccctgctgccccccgaggacgacaccagagacaacgtgtactactacgacgaggagggcggcggcgaggaggaccaggacttcgacctgagccagctgcacagaggcctggacgccagacccgaggtgaccagaaacgacgtggcccccaccctgatgagcgtgcccagatacctgcccagacccgccaaccccgacgagatcggcaacttcatcgacgagaacctgaaggccgccgacaccgaccccaccgcccccccctacgacagcctgctggtgttcgactacgagggcagcggcagcgaggccgccagcctgagcagcctgaacagcagcgagagcgacaaggaccaggactacgactacctgaacgagtggggcaacagattcaagaagctggccgacatgtacggcggcggcgaggacgactag

SEQ ID NO: 145587 - DNA, 1944 bp, Artificial Sequence
  derived and/or modified sequence
atgggcccctggagcagaagcctgagcgccctgctgctgctgctgcaggtgagcagctggctgtgccaggagcccgagccctgccaccccggcttcgacgccgagagctacaccttcaccgtgcccagaagacacctggagagaggcagagtgctgggcagagtgaacttcgaggactgcaccggcagacagagaaccgcctacttcagcctggacaccagattcaaggtgggcaccgacggcgtgatcaccgtgaagagacccctgagattccacaacccccagatccacttcctggtgtacgcctgggacagcacctacagaaagttcagcaccaaggtgaccctgaacaccgtgggccaccaccacagaccccccccccaccaggccagcgtgagcggcatccaggccgagctgctgaccttccccaacagcagccccggcctgagaagacagaagagagactgggtgatcccccccatcagctgccccgagaacgagaagggccccttccccaagaacctggtgcagatcaagagcaacaaggacaaggagggcaaggtgttctacagcatcaccggccagggcgccgacaccccccccgtgggcgtgttcatcatcgagagagagaccggctggctgaaggtgaccgagcccctggacagagagagaatcgccacctacaccctgttcagccacgccgtgagcagcaacggcaacgccgtggaggaccccatggagatcctgatcaccgtgaccgaccagaacgacaacaagcccgagttcacccaggaggtgttcaagggcagcgtgatggagggcgccctgcccggcaccagcgtgatggaggtgaccgccaccgacgccgacgacgacgtgaacacctacaacgccgccatcgcctacaccatcctgagccaggaccccgagctgcccgacaagaacatgttcaccatcaacagaaacaccggcgtgatcagcgtggtgaccaccggcctggacagagagagcttccccacctacaccctggtggtgcaggccgccgacctgcagggcgagggcctgagcaccaccgccaccgccgtgatcaccgtgaccgacaccaacgacaacccccccatcttcaaccccaccacctacaagggccaggtgcccgagaacgaggccaacgtggtgatcaccaccctgaaggtgaccgacgccgacgcccccaacacccccgcctgggaggccgtgtacaccatcctgaacgacgacggcggccagttcgtggtgaccaccaaccccgtgaacaacgacggcatcctgaagaccgccaagggcctggacttcgaggccaagcagcagtacatcctgcacgtggccgtgaccaacgtggtgcccttcgaggtgagcctgaccaccagcaccgccaccgtgaccgtggacgtgctggacgtgaacgaggcccccatcttcgtgccccccgagaagagagtggaggtgagcgaggacttcggcgtgggccaggagatcaccagctacaccgcccaggagcccgacaccttcatggagcagaagatcacctacagaatctggagagacaccgccaactggctggagatcaaccccgacaccggcgccatcagcaccagagccgagctggacagagaggacttcgagcacgtgaagaacagcacctacaccgccctgatcatcgccaccgacaacggcagccccgtggccaccggcaccggcaccctgctgctgatcctgagcgacgtgaacgacaacgcccccatccccgagcccagaaccatcttcttctgcgagagaaaccccaagccccaggtgatcaacatcatcgacgccgacctgccccccaacctggccagccagagcatcggcatcaccgacatgagccactgcacctgccccgccccccagctgcccgccatcttctag

SEQ ID NO: 145588 - DNA, 2703 bp, Artificial Sequence
  derived and/or modified sequence
atgggcccctggagcagaagcctgagcgccctgctgctgctgctgcaggtgagcagctggctgtgccaggagcccgagccctgccaccccggcttcgacgccgagagctacaccttcaccgtgcccagaagacacctggagagaggcagagtgctgggcagagtgaacttcgaggactgcaccggcagacagagaaccgcctacttcagcctggacaccagattcaaggtgggcaccgacggcgtgatcaccgtgaagagacccctgagattccacaacccccagatccacttcctggtgtacgcctgggacagcacctacagaaagttcagcaccaaggtgaccctgaacaccgtgggccaccaccacagaccccccccccaccaggccagcgtgagcggcatccaggccgagctgctgaccttccccaacagcagccccggcctgagaagacagaagagagactgggtgatcccccccatcagctgccccgagaacgagaagggccccttccccaagaacctggtgcagatcaagagcaacaaggacaaggagggcaaggtgttctacagcatcaccggccagggcgccgacaccccccccgtgggcgtgttcatcatcgagagagagaccggctggctgaaggtgaccgagcccctggacagagagagaatcgccacctacaccctgttcagccacgccgtgagcagcaacggcaacgccgtggaggaccccatggagatcctgatcaccgtgaccgaccagaacgacaacaagcccgagttcacccaggaggtgttcaagggcagcgtgatggagggcgccctgcccggcaccagcgtgatggaggtgaccgccaccgacgccgacgacgacgtgaacacctacaacgccgccatcgcctacaccatcctgagccaggaccccgagctgcccgacaagaacatgttcaccatcaacagaaacaccggcgtgatcagcgtggtgaccaccggcctggacagagagagcttccccacctacaccctggtggtgcaggccgccgacctgcagggcgagggcctgagcaccaccgccaccgccgtgatcaccgtgaccgacaccaacgacaacccccccatcttcaaccccaccacctacaagggccaggtgcccgagaacgaggccaacgtggtgatcaccaccctgaaggtgaccgacgccgacgcccccaacacccccgcctgggaggccgtgtacaccatcctgaacgacgacggcggccagttcgtggtgaccaccaaccccgtgaacaacgacggcatcctgaagaccgccaagctggccagatgcagaaactggcacccccacagctgcagctacccctgccccctgggcctggacttcgaggccaagcagcagtacatcctgcacgtggccgtgaccaacgtggtgcccttcgaggtgagcctgaccaccagcaccgccaccgtgaccgtggacgtgctggacgtgaacgaggcccccatcttcgtgccccccgagaagagagtggaggtgagcgaggacttcggcgtgggccaggagatcaccagctacaccgcccaggagcccgacaccttcatggagcagaagatcacctacagaatctggagagacaccgccaactggctggagatcaaccccgacaccggcgccatcagcaccagagccgagctggacagagaggacttcgagcacgtgaagaacagcacctacaccgccctgatcatcgccaccgacaacggcagccccgtggccaccggcaccggcaccctgctgctgatcctgagcgacgtgaacgacaacgcccccatccccgagcccagaaccatcttcttctgcgagagaaaccccaagccccaggtgatcaacatcatcgacgccgacctgccccccaacaccagccccttcaccgccgagctgacccacggcgccagcgccaactggaccatccagtacaacgaccccacccaggagagcatcatcctgaagcccaagatggccctggaggtgggcgactacaagatcaacctgaagctgatggacaaccagaacaaggaccaggtgaccaccctggaggtgagcgtgtgcgactgcgagggcgccgccggcgtgtgcagaaaggcccagcccgtggaggccggcctgcagatccccgccatcctgggcatcctgggcggcatcctggccctgctgatcctgatcctgctgctgctgctgttcctgagaagaagagccgtggtgaaggagcccctgctgccccccgaggacgacaccagagacaacgtgtactactacgacgaggagggcggcggcgaggaggaccaggacttcgacctgagccagctgcacagaggcctggacgccagacccgaggtgaccagaaacgacgtggcccccaccctgatgagcgtgcccagatacctgcccagacccgccaaccccgacgagatcggcaacttcatcgacgagaacctgaaggccgccgacaccgaccccaccgcccccccctacgacagcctgctggtgttcgactacgagggcagcggcagcgaggccgccagcctgagcagcctgaacagcagcgagagcgacaaggaccaggactacgactacctgaacgagtggggcaacagattcaagaagctggccgacatgtacggcggcggcgaggacgactag

SEQ ID NO: 145589 - protein, 610 aa, Artificial Sequence
  derived and/or modified sequence
MHFQAFWLCLGLLFISINAEFMDDDVETEDFEENSEEIDVNESELSSEIKYKTPQPIGEVYFAETFDSGRLAGWVLSKAKKDDMDEEISIYDGRWEIEELKENQVPGDRGLVLKSRAKHHAISAVLAKPFIFADKPLIVQYEVNFQDGIDCGGAYIKLLADTDDLILENFYDKTSYIIMFGPDKCGEDYKLHFIFRHKHPKTGVFEEKHAKPPDVDLKKFFTDRKTHLYTLVMNPDDTFEVLVDQTVVNKGSLLEDVVPPIKPPKEIEDPNDKKPEEWDERAKIPDPSAVKPEDWDESEPAQIEDSSVVKPAGWLDDEPKFIPDPNAEKPDDWNEDTDGEWEAPQILNPACRIGCGEWKPPMIDNPKYKGVWRPPLVDNPNYQGIWSPRKIPNPDYFEDDHPFLLTSFSALGLELWSMTSDIYFDNFIICSEKEVADHWAADGWRWKIMIANANKPGVLKQLMAAAEGHPWLWLIYLVTAGVPIALITSFCWPRKVKKKHKDTEYKKTDICIPQTKGVLEQEEKEEKAALEKPMDLEEEKKQNDGEMLEKEEESEPEEKSEEEIEIIEGQEESNQSNKSGSEDEMKEADESTGSGDGPIKSVRKRRVRKD

SEQ ID NO: 145590 - protein, 179 aa, Artificial Sequence
  derived and/or modified sequence
MHFQAFWLCLGLLFISINAEFMDDDVETEDFEENSEEIDVNESELSSEIKYKTPQPIGEVYFAETFDSGRLAGWVLSKAKKDDMDEEISIYDGRWEIEELKENQVPGDRGLVLKSRAKHHAISAVLAKPFIFADKPLIVQYEVNFQDGIDCGGAYIKLLADTDDLILENFYDKTSYIIM

SEQ ID NO: 145591 - protein, 527 aa, Artificial Sequence
  derived and/or modified sequence
MDEEISIYDGRWEIEELKENQVPGDRGLVLKSRAKHHAISAVLAKPFIFADKPLIVQYEVNFQDGIDCGGAYIKLLADTDDLILENFYDKTSYIIMFGPDKCGEDYKLHFIFRHKHPKTGVFEEKHAKPPDVDLKKFFTDRKTHLYTLVMNPDDTFEVLVDQTVVNKGSLLEDVVPPIKPPKEIEDPNDKKPEEWDERAKIPDPSAVKPEDWDESEPAQIEDSSVVKPAGWLDDEPKFIPDPNAEKPDDWNEDTDGEWEAPQILNPACRIGCGEWKPPMIDNPKYKGVWRPPLVDNPNYQGIWSPRKIPNPDYFEDDHPFLLTSFSALGLELWSMTSDIYFDNFIICSEKEVADHWAADGWRWKIMIANANKPGVLKQLMAAAEGHPWLWLIYLVTAGVPIALITSFCWPRKVKKKHKDTEYKKTDICIPQTKGVLEQEEKEEKAALEKPMDLEEEKKQNDGEMLEKEEESEPEEKSEEEIEIIEGQEESNQSNKSGSEDEMKEADESTGSGDGPIKSVRKRRVRKD

SEQ ID NO: 145592 - DNA, 1833 bp, Artificial Sequence
  derived and/or modified sequence
atgcacttccaggccttctggctgtgcctgggcctgctgttcatcagcatcaacgccgagttcatggacgacgacgtggagaccgaggacttcgaggagaacagcgaggagatcgacgtgaacgagagcgagctgagcagcgagatcaagtacaagaccccccagcccatcggcgaggtgtacttcgccgagaccttcgacagcggcagactggccggctgggtgctgagcaaggccaagaaggacgacatggacgaggagatcagcatctacgacggcagatgggagatcgaggagctgaaggagaaccaggtgcccggcgacagaggcctggtgctgaagagcagagccaagcaccacgccatcagcgccgtgctggccaagcccttcatcttcgccgacaagcccctgatcgtgcagtacgaggtgaacttccaggacggcatcgactgcggcggcgcctacatcaagctgctggccgacaccgacgacctgatcctggagaacttctacgacaagaccagctacatcatcatgttcggccccgacaagtgcggcgaggactacaagctgcacttcatcttcagacacaagcaccccaagaccggcgtgttcgaggagaagcacgccaagccccccgacgtggacctgaagaagttcttcaccgacagaaagacccacctgtacaccctggtgatgaaccccgacgacaccttcgaggtgctggtggaccagaccgtggtgaacaagggcagcctgctggaggacgtggtgccccccatcaagccccccaaggagatcgaggaccccaacgacaagaagcccgaggagtgggacgagagagccaagatccccgaccccagcgccgtgaagcccgaggactgggacgagagcgagcccgcccagatcgaggacagcagcgtggtgaagcccgccggctggctggacgacgagcccaagttcatccccgaccccaacgccgagaagcccgacgactggaacgaggacaccgacggcgagtgggaggccccccagatcctgaaccccgcctgcagaatcggctgcggcgagtggaagccccccatgatcgacaaccccaagtacaagggcgtgtggagaccccccctggtggacaaccccaactaccagggcatctggagccccagaaagatccccaaccccgactacttcgaggacgaccaccccttcctgctgaccagcttcagcgccctgggcctggagctgtggagcatgaccagcgacatctacttcgacaacttcatcatctgcagcgagaaggaggtggccgaccactgggccgccgacggctggagatggaagatcatgatcgccaacgccaacaagcccggcgtgctgaagcagctgatggccgccgccgagggccacccctggctgtggctgatctacctggtgaccgccggcgtgcccatcgccctgatcaccagcttctgctggcccagaaaggtgaagaagaagcacaaggacaccgagtacaagaagaccgacatctgcatcccccagaccaagggcgtgctggagcaggaggagaaggaggagaaggccgccctggagaagcccatggacctggaggaggagaagaagcagaacgacggcgagatgctggagaaggaggaggagagcgagcccgaggagaagagcgaggaggagatcgagatcatcgagggccaggaggagagcaaccagagcaacaagagcggcagcgaggacgagatgaaggaggccgacgagagcaccggcagcggcgacggccccatcaagagcgtgagaaagagaagagtgagaaaggactag

SEQ ID NO: 145593 - DNA, 540 bp, Artificial Sequence
  derived and/or modified sequence
atgcacttccaggccttctggctgtgcctgggcctgctgttcatcagcatcaacgccgagttcatggacgacgacgtggagaccgaggacttcgaggagaacagcgaggagatcgacgtgaacgagagcgagctgagcagcgagatcaagtacaagaccccccagcccatcggcgaggtgtacttcgccgagaccttcgacagcggcagactggccggctgggtgctgagcaaggccaagaaggacgacatggacgaggagatcagcatctacgacggcagatgggagatcgaggagctgaaggagaaccaggtgcccggcgacagaggcctggtgctgaagagcagagccaagcaccacgccatcagcgccgtgctggccaagcccttcatcttcgccgacaagcccctgatcgtgcagtacgaggtgaacttccaggacggcatcgactgcggcggcgcctacatcaagctgctggccgacaccgacgacctgatcctggagaacttctacgacaagaccagctacatcatcatgtag

SEQ ID NO: 145594 - DNA, 1584 bp, Artificial Sequence
  derived and/or modified sequence
atggacgaggagatcagcatctacgacggcagatgggagatcgaggagctgaaggagaaccaggtgcccggcgacagaggcctggtgctgaagagcagagccaagcaccacgccatcagcgccgtgctggccaagcccttcatcttcgccgacaagcccctgatcgtgcagtacgaggtgaacttccaggacggcatcgactgcggcggcgcctacatcaagctgctggccgacaccgacgacctgatcctggagaacttctacgacaagaccagctacatcatcatgttcggccccgacaagtgcggcgaggactacaagctgcacttcatcttcagacacaagcaccccaagaccggcgtgttcgaggagaagcacgccaagccccccgacgtggacctgaagaagttcttcaccgacagaaagacccacctgtacaccctggtgatgaaccccgacgacaccttcgaggtgctggtggaccagaccgtggtgaacaagggcagcctgctggaggacgtggtgccccccatcaagccccccaaggagatcgaggaccccaacgacaagaagcccgaggagtgggacgagagagccaagatccccgaccccagcgccgtgaagcccgaggactgggacgagagcgagcccgcccagatcgaggacagcagcgtggtgaagcccgccggctggctggacgacgagcccaagttcatccccgaccccaacgccgagaagcccgacgactggaacgaggacaccgacggcgagtgggaggccccccagatcctgaaccccgcctgcagaatcggctgcggcgagtggaagccccccatgatcgacaaccccaagtacaagggcgtgtggagaccccccctggtggacaaccccaactaccagggcatctggagccccagaaagatccccaaccccgactacttcgaggacgaccaccccttcctgctgaccagcttcagcgccctgggcctggagctgtggagcatgaccagcgacatctacttcgacaacttcatcatctgcagcgagaaggaggtggccgaccactgggccgccgacggctggagatggaagatcatgatcgccaacgccaacaagcccggcgtgctgaagcagctgatggccgccgccgagggccacccctggctgtggctgatctacctggtgaccgccggcgtgcccatcgccctgatcaccagcttctgctggcccagaaaggtgaagaagaagcacaaggacaccgagtacaagaagaccgacatctgcatcccccagaccaagggcgtgctggagcaggaggagaaggaggagaaggccgccctggagaagcccatggacctggaggaggagaagaagcagaacgacggcgagatgctggagaaggaggaggagagcgagcccgaggagaagagcgaggaggagatcgagatcatcgagggccaggaggagagcaaccagagcaacaagagcggcagcgaggacgagatgaaggaggccgacgagagcaccggcagcggcgacggccccatcaagagcgtgagaaagagaagagtgagaaaggactag

SEQ ID NO: 145595 - DNA, 1833 bp, Artificial Sequence
  derived and/or modified sequence
atgcacttccaggcgttctggctgtgcctaggtctcctatttatctccattaatgccgaatttatggatgatgatgtggagactgaagatttcgaagagaatagtgaagagattgacgtaaacgaatcggagttgagctcagagatcaaatacaaaacaccgcaacctattggtgaggtctacttcgccgaaacctttgactccgggcggttggcaggatgggtgttatccaaagcgaaaaaggacgacatggatgaagaaatctctatctacgacggacgttgggaaatcgaagaattgaaggagaaccaggttcccggcgacagaggcttagtacttaaatcgagggcgaaacaccacgccatctcagccgttttggccaaacctttcatattcgctgataaaccactgattgtccagtatgaagtcaattttcaagacggtattgattgtggcggagcgtacatcaagctgttagctgatacggatgatctcatcttagaaaatttctacgataaaacatcctatattattatgtttgggcccgacaaatgcggcgaggattacaagctgcacttcatcttccggcataagcatcctaaaaccggggtgtttgaggaaaaacacgctaagccccccgacgtggaccttaagaagtttttcacagataggaagactcatctctacactctggtgatgaacccagacgacacttttgaggtgcttgtagatcagacagtggtgaataaaggcagtctcttagaggacgtggtcccacctatcaagccacccaaagaaattgaagacccaaatgataaaaagccggaggaatgggatgagcgcgccaaaattcctgatccttccgccgtaaaacctgaggactgggacgagtcagagcctgcccaaatcgaggactcttccgttgtgaagcccgccggatggctcgacgacgaacccaagttcatacccgaccctaatgctgagaagccagacgactggaatgaggatacagacggagagtgggaggcgcctcagatcctaaatccagcgtgccggatcggctgtggcgagtggaaacctcctatgatcgacaaccctaagtacaaaggcgtttggcgcccaccacttgtggacaacccaaactaccaaggcatctggtctcctcggaaaattcctaatcccgattatttcgaagacgaccatcccttcttactgacttcctttagcgccctgggccttgagctgtggagtatgacttctgatatctactttgacaacttcattatttgcagcgagaaggaggtcgcagaccactgggctgcagatggttggaggtggaaaataatgatagccaatgctaacaaacctggggtgctgaagcagcttatggccgctgctgagggccacccttggctgtggctgatatacttggtcacagctggggtgcctatcgccctgatcacttcgttttgctggccaagaaaggtcaagaaaaagcacaaggataccgagtacaagaagacggatatttgcatcccacagaccaagggtgtgcttgagcaggaagaaaaagaagagaaggctgccctggagaagccaatggaccttgaagaagagaagaagcaaaacgacggggagatgcttgaaaaggaggaggaaagcgagcctgaagagaaatctgaagaggagatcgaaatcattgaaggacaggaagagagcaatcaatctaataaaagcggtagcgaggacgaaatgaaagaagcagacgaaagcacggggtcgggcgacggacctattaaaagcgtgcgcaagagacgtgtccggaaagactag

SEQ ID NO: 145596 - DNA, 1833 bp, Artificial Sequence
  derived and/or modified sequence
atgcacttccaggccttctggttatgcctgggtcttctgtttatatcaattaatgccgaattcatggatgacgacgtcgaaacagaggactttgaggaaaattcggaagaaattgatgtcaacgagtctgaactgtcgtccgagataaagtataaaacacctcagccaataggggaagtatattttgccgagactttcgactctgggcgtttagccggatgggtgctgtcaaaggcaaaaaaagacgatatggatgaggaaatttcgatttatgacgggaggtgggaaattgaggagctgaaagagaatcaggttcccggtgatcgcggtctcgtgctcaagagcagagctaagcaccatgccatttctgcagtactggcaaagcccttcatcttcgcagacaaacctctgatcgtccaatacgaagtgaacttccaagacggcatcgattgtggaggagcatatattaagcttctggcagacacagacgacctcattctggagaatttttacgataagacaagctacattatcatgttcggacccgataagtgcggagaagattacaaactgcattttatctttcgtcataagcatccaaagaccggcgtgttcgaggagaagcatgctaaacctcctgacgtggacctgaagaagttttttacggaccgcaagacccacctgtatacgctggttatgaaccccgatgacacattcgaagtgctggtggatcagacagttgtaaacaaaggatcactgctggaggacgtggtgcctcccatcaagcctcctaaggagattgaggacccaaacgacaagaaaccagaagaatgggatgaaagggcaaaaatcccggatccttctgcagtgaagccagaggattgggacgagtccgaacccgcacaaatcgaggattcctctgtggttaagccagcgggatggctggacgacgagcccaagtttattcctgatccaaacgctgagaagcccgatgactggaatgaagatacggacggtgaatgggaggccccgcagattctcaatccggcttgccggatcggatgtggagagtggaaacctcctatgatagataatccaaagtataagggggtgtggcggcctcctttggtagacaatcctaactaccagggaatctggtcccctagaaagatccccaacccagattatttcgaggacgatcacccattcctcctgacttctttctctgcccttgggctagagctctggtcaatgacctctgatatctactttgataacttcataatctgttcagagaaagaagtcgccgaccattgggccgccgacggatggagatggaaaataatgattgccaatgctaataagcccggagtgctgaagcagctaatggctgctgctgaaggtcacccctggctgtggttaatctacttagttaccgccggggttccaatcgcgctgattacatccttttgctggcccaggaaggtcaagaagaagcataaggatacagaatacaagaagaccgacatctgcataccccaaacgaagggagttctcgagcaggaggaaaaagaagaaaaggctgcccttgagaaaccaatggacctggaagaggagaagaagcagaatgacggggagatgttggaaaaggaagaggagagtgaacctgaggagaagtccgaggaggagatagagatcatcgagggacaggaagaatccaaccaatcaaataaatccggaagcgaagatgagatgaaggaagcagacgaatccacaggatcaggcgacggccccatcaaaagcgtgaggaaaaggcgggtgcgaaaggactag

SEQ ID NO: 145597 - DNA, 540 bp, Artificial Sequence
  derived and/or modified sequence
atgcattttcaggctttttggctgtgcctcgggctgctcttcatctccatcaacgcagagttcatggacgacgatgtggagacagaagactttgaagagaattctgaagagatcgacgttaacgagtccgagctgtcttcagaaatcaaatacaagacgccccagcccatcggtgaagtatacttcgcagagacctttgattccggcaggttagccggctgggtgctcagcaaggccaaaaaggatgacatggatgaagaaattagcatctatgacgggagatgggagatcgaagagctgaaggaaaatcaggttcccggagacagaggtctggtgctcaaatcacgggctaagcatcacgcgatcagcgctgtgcttgctaaaccattcatattcgccgacaagcccctcatcgtgcagtatgaagtgaacttccaggacgggattgattgcggcggggcctatattaagctactggcagataccgatgacctgattctggagaacttttacgataagacaagctacattattatgtag

SEQ ID NO: 145598 - DNA, 1833 bp, Artificial Sequence
  derived and/or modified sequence
atgcactttcaagcattctggctttgtttagggttgcttttcatttcaattaatgcagagttcatggatgatgacgtcgagactgaagatttcgaggagaattctgaggagattgacgttaacgagagcgaactgagctccgagatcaaatataagactccacagcccatcggagaagtgtacttcgccgaaaccttcgacagcggaagactggccggttgggtactatctaaggccaagaaagacgacatggatgaagagatttctatctatgacgggcggtgggagatcgaagaattgaaggagaaccaggtgcccggagaccgtggcctcgtgttaaagtcacgtgcaaaacaccacgcaatttccgctgtgctcgcaaaaccctttatcttcgctgacaagccgcttatcgttcagtacgaggtaaactttcaggacggtatcgactgcggcggcgcttatatcaagctgcttgctgacaccgacgatctcatcttagaaaatttttatgataagacatcttatattattatgtttggccctgacaagtgtggggaagattacaagctgcatttcatctttagacataagcacccaaaaaccggggtctttgaggagaaacacgctaagccccccgatgtggacctgaagaagtttttcacagaccggaagactcacttgtacactcttgtgatgaaccccgatgacacatttgaggtcctggtagatcagacagtggttaataagggaagtcttctggaagacgtggtgcctcccattaaacctcccaaggagatcgaggaccctaatgacaaaaaacctgaagagtgggacgagcgcgccaaaattccagacccaagtgcagtgaagccagaggattgggatgagagcgaacccgcccagattgaagactcgagtgtagtaaaacctgccggctggctcgacgacgagcccaagtttattcctgatcctaacgccgagaaacccgacgattggaacgaagatacagacggcgaatgggaagccccccagatcctgaaccctgcttgtaggatcggctgcggagagtggaaacctccaatgatcgacaaccccaagtacaagggagtgtggagaccgcccctggtggataatcctaactatcagggaatttggtcccctagaaaaatccccaaccccgattacttcgaggacgaccaccctttcctcctcaccagcttttcggcactggggctggagctttggagcatgacctctgacatatattttgataacttcattatatgttcagagaaggaggtcgcagatcactgggccgcagatgggtggcgatggaaaatcatgattgccaatgctaataaaccaggcgtccttaagcagctcatggcggccgccgaggggcacccatggctttggttaatatatctcgtcaccgccggcgtgcccatcgccctaatcacaagcttttgctggccccgcaaggtgaagaaaaaacataaggataccgaatacaagaagactgatatatgcatcccccagactaagggcgtactggaacaggaggaaaaggaggagaaggccgctctagagaagcctatggaccttgaagaagaaaagaaacagaatgacggtgagatgctggaaaaggaggaagaatccgagccagaggagaagagtgaggaagagatcgagatcattgagggccaggaggaatcaaaccagtcgaataaatccggcagcgaagatgaaatgaaagaggcagacgaaagcaccggctctggcgatgggcccatcaagagcgtgagaaagcgacgagtccggaaggactag

SEQ ID NO: 145599 - DNA, 1584 bp, Artificial Sequence
  derived and/or modified sequence
atggatgaagaaatcagcatttatgacggcagatgggagattgaggaactgaaagagaatcaagttccgggtgatcgcggcctggtgctaaaatctcgcgccaaacaccatgccatttctgccgtcctagctaagccatttatattcgctgataagcctcttattgtacaatatgaggtgaatttccaggacggaatcgactgtggaggcgcctacattaaactgctggccgatacagatgatttgatcctggaaaacttttatgacaagacaagttacatcataatgtttggcccagataagtgcggggaggactataagctacactttatcttccgccacaagcaccctaagactggcgtgtttgaagagaaacacgccaaacccccagatgtggacttgaagaagttcttcacagatcgcaaaacgcatctttacacactagtcatgaatcccgatgatacatttgaagttcttgtggaccagacagttgtgaacaagggatctttactcgaggatgtcgtgccccctataaaaccccccaaagagattgaggacccaaatgataagaaacccgaggaatgggatgagcgggcgaaaattccagatccctctgccgtgaaacctgaggattgggacgagagcgagcctgcccagatcgaagacagcagcgtggtgaaacccgctggctggttagatgatgagcctaagtttatacctgatccgaacgccgaaaagcccgatgattggaatgaggacaccgacggcgagtgggaagccccccagatactgaatccggcctgtagaattgggtgcggggaatggaagcccccaatgatcgataatcctaaatacaagggagtgtggagaccccctttggtagacaatccaaattaccaaggcatctggtccccaagaaaaatccccaatccagactacttcgaagacgatcaccctttcctcctgacatccttctccgcgttgggcctcgagctgtggtcaatgactagcgatatctacttcgacaactttatcatctgctcggagaaggaggtggccgatcactgggcagccgacggatggagatggaagatcatgatcgcgaacgcgaacaagcctggtgtactgaaacagttgatggcggcagccgagggccacccttggttgtggttgatatatcttgtgactgcaggggtgcctattgccctgatcacttcgttctgttggccccggaaggtgaagaaaaaacacaaagacacagaatacaagaagaccgacatatgtatcccccagaccaaaggggtcttggaacaggaggagaaggaagaaaaagctgcgcttgaaaagcccatggacctggaggaggagaagaagcaaaatgatggggaaatgctggaaaaagaggaggagtccgagccagaggaaaagtctgaggaggagatcgagatcatagaaggtcaagaggaaagtaaccagtccaataaaagcggaagcgaagacgagatgaaggaagctgacgagagtactggcagcggcgacgggcctattaaaagtgtgcggaagagacgagtgagaaaggattag

SEQ ID NO: 145600 - DNA, 1833 bp, Artificial Sequence
  derived and/or modified sequence
atgcacttccaggccttctggctgtgcctgggcctgctcttcatcagcatcaatgctgagttcatggatgatgatgtggagacagaagattttgaagaaaattctgaggagattgatgtgaatgaaagtgagctgagcagcgagatcaagtacaagaccccccagcccatcggggaggtgtactttgctgagacctttgacagcggccgcctggccggctgggtgctgagcaaggccaagaaggatgacatggatgaggagatcagcatctatgatggccgctgggagattgaggagctgaaggagaaccaggtgcctggggaccggggcctggtgctgaagagccgggccaagcaccacgccatctctgctgtgctggccaagcccttcatctttgctgacaagcccctcatcgtgcagtatgaggtgaacttccaggacggcatcgactgtggcggggcctacatcaagctgctggccgacacagatgacctgatcctggagaacttctatgacaagaccagctacatcatcatgtttggaccagacaagtgtggggaggactacaagctgcacttcatcttccgccacaagcaccccaagacaggagtgtttgaggagaagcacgccaagcccccagatgtggacctgaagaagttcttcacagacaggaagacccacctgtacaccctggtgatgaacccagatgacacctttgaggtgctggtggaccagacagtggtgaacaagggcagcctgctggaggatgtggtgccccccatcaagccacccaaggagattgaggaccccaatgacaagaagccagaggagtgggatgagcgggccaagatcccagaccccagcgctgtgaagccagaggactgggatgagagcgagcccgcccagatcgaggacagctctgtggtgaagccagctggctggctggatgatgagcccaagttcatcccagaccccaatgctgagaagccagatgactggaatgaagacacagatggagagtgggaggccccccagatcctgaacccagcctgcagaattggctgtggggagtggaagccacccatgattgacaaccccaagtacaagggcgtgtggaggcctcccctggtggacaaccccaactaccagggcatctggagccccaggaagatccccaacccagactactttgaagatgaccaccccttcctgctgaccagcttcagcgccctgggcctggagctgtggagcatgaccagtgacatctactttgacaacttcatcatctgcagcgagaaggaggtggccgaccactgggccgcagatggctggcgctggaagatcatgattgccaatgccaacaagccaggagtgctgaagcagctgatggctgctgctgagggccacccctggctgtggctgatctacctggtgacagctggggtgcccatcgccctgatcaccagcttctgctggcccaggaaggtgaagaagaagcacaaggacacagagtacaagaagacagacatctgcatcccccagaccaagggcgtgctggagcaggaggagaaggaggagaaggccgccctggagaagcccatggacctggaggaggagaagaagcagaatgatggagagatgctggagaaggaggaggagagcgagcctgaggagaagtctgaggaggagattgagatcatcgagggccaggaggagagcaaccagagcaacaagagcggctctgaagatgagatgaaggaggctgatgagagcacaggcagcggagatggccccatcaagtctgtgaggaagagaagagtgaggaaggactag

SEQ ID NO: 145601 - DNA, 540 bp, Artificial Sequence
  derived and/or modified sequence
atgcacttccaggccttctggctgtgcctgggcctgctcttcatcagcatcaatgctgagttcatggatgatgatgtggagacagaagattttgaagaaaattctgaggagattgatgtgaatgaaagtgagctgagcagcgagatcaagtacaagaccccccagcccatcggggaggtgtactttgctgagacctttgacagcggccgcctggccggctgggtgctgagcaaggccaagaaggatgacatggatgaggagatcagcatctatgatggccgctgggagattgaggagctgaaggagaaccaggtgcctggggaccggggcctggtgctgaagagccgggccaagcaccacgccatctctgctgtgctggccaagcccttcatctttgctgacaagcccctcatcgtgcagtatgaggtgaacttccaggacggcatcgactgtggcggggcctacatcaagctgctggccgacacagatgacctgatcctggagaacttctatgacaagaccagctacatcatcatgtag

SEQ ID NO: 145602 - DNA, 1584 bp, Artificial Sequence
  derived and/or modified sequence
atggatgaggagatcagcatctatgatggccgctgggagattgaggagctgaaggagaaccaggtgcctggggaccggggcctggtgctgaagagccgggccaagcaccacgccatctctgctgtgctggccaagcccttcatctttgctgacaagcccctgattgtgcagtatgaggtgaacttccaggacggcatcgactgtggcggggcctacatcaagctgctggccgacacagatgacctgatcctggagaacttctatgacaagaccagctacatcatcatgtttggaccagacaagtgtggggaggactacaagctgcacttcatcttccgccacaagcaccccaagacaggagtgtttgaggagaagcacgccaagcccccagatgtggacctgaagaagttcttcacagacaggaagacccacctgtacaccctggtgatgaacccagatgacacctttgaggtgctggtggaccagacagtggtgaacaagggcagcctgctggaggatgtggtgccccccatcaagccacccaaggagattgaggaccccaatgacaagaagccagaggagtgggatgagcgggccaagatcccagaccccagcgctgtgaagccagaggactgggatgaaagtgagcccgcccagatcgaggacagctctgtggtgaagccagctggctggctggatgatgagcccaagttcatcccagaccccaatgctgagaagccagatgactggaatgaagacacagatggagagtgggaggccccccagatcctgaacccagcctgccgcatcggctgtggggagtggaagccacccatgattgacaaccccaagtacaagggcgtgtggaggcctcccctggtggacaaccccaactaccagggcatctggagccccaggaagatccccaacccagactactttgaagatgaccaccccttcctgctgaccagcttcagcgccctgggcctggagctgtggagcatgaccagtgacatctactttgacaacttcatcatctgcagcgagaaggaggtggccgaccactgggccgcagatggctggcgctggaagatcatgattgccaatgccaacaagccaggagtgctgaagcagctgatggctgctgctgagggccacccctggctgtggctgatctacctggtgacagctggggtgcccatcgccctgatcaccagcttctgctggcccaggaaggtgaagaagaagcacaaggacacagagtacaagaagacagacatctgcatcccccagaccaagggcgtgctggagcaggaggagaaggaggagaaggccgccctggagaagcccatggacctggaggaggagaagaagcagaatgatggagagatgctggagaaggaggaggagagcgagcctgaggagaagtctgaggaggagattgagatcatcgagggccaggaggagagcaaccagagcaacaagagcggctctgaagatgagatgaaggaggctgatgagagcactggaagtggagatggccccatcaagtctgtgaggaagagaagagtgaggaaggactag

SEQ ID NO: 145603 - DNA, 1833 bp, Artificial Sequence
  derived and/or modified sequence
atgcacttccaggccttctggctgtgcctgggcctgctgttcatctcgatcaacgccgagttcatggatgatgatgtggagacagaggactttgaggagaattcagaggagatcgacgttaacgagagtgagctcagctctgaaattaagtacaaaaccccacagccaattggcgaggtgtactttgccgaaacctttgacagcgggcgactggccggttgggttcttagtaaggccaaaaaggatgatatggatgaggaaatttcgatctacgatgggcgctgggagatcgaggagctcaaggaaaaccaggtccctggcgaccgaggcttggtgttgaaatcaagagccaagcaccatgcgatcagcgccgtgctcgccaaaccattcatcttcgccgacaagcctcttattgtccagtacgaggtgaacttccaagacggtatcgattgcgggggcgcttacattaagctgttggccgatactgatgacctgatactcgaaaacttttatgataaaacgagttatattattatgttcggtccagacaaatgcggtgaagactacaagctccacttcatattccgacacaagcacccaaaaactggtgtcttcgaggaaaaacacgccaaaccccctgacgtggatctgaagaaatttttcaccgaccggaaaacccatctgtatacccttgtcatgaacccagacgatacctttgaggttctcgtggaccaaacggtagttaacaaaggcagtctgctggaagatgtagtgccacccattaagccccctaaagaaatcgaagatccaaatgacaaaaaacctgaagagtgggacgaaagggctaaaatacccgacccatcagccgtgaagcctgaggactgggacgaatctgagccagcccaaattgaggatagcagtgtggtgaaaccagccgggtggttagatgatgaaccaaagtttattcccgacccaaatgcagagaagcccgatgactggaatgaagatacagatggcgagtgggaggctccccaaatcctgaatcctgcgtgccggattggatgcggtgagtggaagccccccatgattgacaatccaaagtataagggggtgtggagacccccactggtggataatccaaactaccaggggatctggtccccaaggaagattcctaacccagactactttgaggatgaccacccttttctcctgacaagcttttccgctctgggattggagctgtggtccatgacctccgatatctacttcgataattttataatctgttctgaaaaagaggtagctgaccattgggccgcagacggatggaggtggaagatcatgatagcgaatgcaaataaacctggggttctgaaacagctcatggccgcagcagaagggcacccatggttgtggctgatatacctggtaactgccggcgtgccaatagccctgatcacctcattctgctggcctaggaaggtaaaaaaaaaacacaaggacacagaatataagaagacagacatatgcattcctcagaccaaaggcgtactggagcaagaggaaaaagaggagaaggcagctctcgagaaaccaatggacttagaagaggagaagaaacaaaatgacggggagatgttagagaaggaggaagaatccgagcccgaagagaaatccgaggaggagatcgagatcatcgagggtcaggaggagtccaatcagagtaacaagtccggaagtgaggatgaaatgaaagaggctgacgagtcaactggttccggggatggcccaattaagtctgtccgaaaacggcgagtgaggaaggactag

SEQ ID NO: 145604 - DNA, 1833 bp, Artificial Sequence
  derived and/or modified sequence
atgcacttccaggccttctggctgtgcctgggcctgctgttcatcagtataaacgccgaattcatggacgatgatgtggaaaccgaggacttcgaggagaactctgaggaaattgatgttaatgagagcgaacttagttccgaaatcaagtacaaaacgccacagcccatcggagaagtctactttgctgagacattcgacagcggaagactcgccgggtgggtgttgagcaaagcgaagaaagacgacatggacgaggaaatttctatctatgatggccgctgggagatagaagaactgaaggagaaccaggtgccaggagacagagggctagttcttaagtcaagggccaaacaccacgccatttcggctgtcctggccaagccgttcatctttgccgacaaacctctgattgtgcagtatgaagtcaactttcaggatggtatagactgtggaggtgcgtacattaagctactggccgatactgacgatcttatcctcgaaaatttttatgataagactagttacatcattatgtttgggccagataaatgcggagaggattacaaactgcactttatattcaggcacaaacaccctaaaacgggcgtgttcgaggagaaacatgctaaaccccccgatgtcgacctcaaaaaattttttaccgacaggaagactcatctgtatacgctggtgatgaatccagatgacacttttgaggtgctcgtggaccaaaccgtcgtgaacaaggggtccctactggaggacgtggtgccgccaataaaacccccgaaggagattgaagatcccaatgataaaaagcctgaagagtgggacgagagagcaaagatacctgacccttctgccgtgaagccagaggactgggacgagtctgagcccgctcagatagaagactcatccgtagttaaaccagccggatggcttgacgatgaacccaagtttattccagatccaaacgcagagaagccagacgactggaacgaagacacagatggagaatgggaggccccgcaaatcctgaatccagcatgtcgtatcgggtgtggagaatggaagccccccatgatagataatcctaaatacaaaggcgtatggaggccaccactagtggataaccccaattatcagggcatctggtctccacggaaaatacccaaccctgactactttgaagacgaccatccttttttgctgacatctttctctgctttgggcctcgaattgtggtccatgaccagtgatatctacttcgacaatttcattatttgtagcgagaaggaggtagctgaccattgggccgctgacggctggcggtggaagataatgatcgccaatgccaacaaaccaggagttttaaagcaactcatggcagctgcagagggccatccttggctttggttgatctacctagtcaccgccggtgttcccattgccctgattacaagcttttgctggcctaggaaggtgaagaaaaaacacaaagataccgagtacaaaaagaccgacatatgcatcccacagaccaagggcgtcctggaacaggaggagaaggaggagaaggccgcactggagaaaccaatggacctcgaagaggagaagaaacagaatgatggtgagatgctggagaaagaagaagaaagcgagccggaagaaaagtcagaggaggagatcgagattatcgaaggacaggaagagagtaaccagtctaacaagtccggttccgaggatgagatgaaagaagccgacgaaagtactgggagtggtgacggacctattaaatcagtacggaagaggcgcgtgcgcaaagactag

SEQ ID NO: 145605 - DNA, 540 bp, Artificial Sequence
  derived and/or modified sequence
atgcacttccaggccttctggctgtgcctgggcctgctgttcatctccatcaacgcagagttcatggatgatgacgtggaaacagaggatttcgaagagaactccgaggaaatcgatgtaaacgagtccgagttatcatccgaaataaaatacaagacaccacagcctatcggcgaggtgtatttcgccgagacctttgattctggccgactggcagggtgggtgctgagcaaggcaaaaaaagatgacatggacgaagaaattagtatctacgatggcaggtgggaaattgaggagctaaaggagaaccaggtcccgggcgaccgagggctggtgttaaagtctagagctaaacaccacgccatttccgctgtgctggcaaagccttttatcttcgcggacaaaccgcttattgtccaatacgaggtgaattttcaagacggaatcgattgtggcggggcgtatatcaagctacttgccgacacagacgatctgattttggagaatttctacgacaaaacctcatacatcattatgtag

SEQ ID NO: 145606 - DNA, 1833 bp, Artificial Sequence
  derived and/or modified sequence
atgcacttccaggccttctggctgtgcctgggcctgctgttcatctccatcaacgcagaattcatggatgacgacgttgagacggaagatttcgaggaaaatagcgaggaaatcgatgtgaatgagtccgagctcagtagcgagattaagtataaaaccccacagccaatcggcgaggtgtattttgctgaaaccttcgacagcggtcgcttggccggatgggtgttgtccaaggcaaagaaggacgacatggacgaagaaatcagtatctacgatggacgatgggaaatcgaagagctaaaggagaaccaagtgcccggcgaccgcggcttagtgttgaagagtagggctaagcatcatgcaatcagtgctgtactcgccaagccgttcatattcgctgacaaacccctaatcgtccagtacgaggtcaacttccaggacgggatagactgcgggggagcctatatcaagctcctggccgatactgacgatcttatcttggaaaacttctatgacaagacttcctacatcatcatgttcggcccagacaaatgtggggaagactataaactgcacttcatttttcgccataaacatccgaagaccggcgtgtttgaagaaaaacatgccaagcccccggatgtggatctgaagaagttctttaccgatcggaaaacccatctctatacccttgtcatgaacccggatgacacttttgaagtcctcgtggaccaaaccgttgtgaataaaggtagtttgctggaggacgtggtgcccccaataaagccaccaaaggagattgaagaccctaacgataagaaacccgaagagtgggacgagagggcaaagattcccgacccctctgcagtgaagcctgaagattgggatgagagcgagccagcccagatcgaagacagctccgtggtcaagccagcggggtggctggacgacgaaccaaaattcatccccgatccaaatgcagaaaagcccgatgattggaacgaggacactgacggcgaatgggaggctccccagattctgaaccccgcttgcagaattggctgtggtgaatggaaaccacccatgattgacaacccaaaatataaaggtgtctggaggccccccttggtcgacaatcctaattaccagggaatatggagtccccggaagatccccaatcccgactactttgaagacgaccacccttttctgcttaccagtttcagtgctctgggcctcgagctttggtctatgaccagcgatatttacttcgacaatttcatcatttgttcagagaaggaagtggcagatcattgggcggcagatggttggaggtggaagatcatgattgcaaatgctaataaacccggagtcttaaaacagctaatggctgcagctgaaggacacccttggttgtggctcatttatcttgttaccgccggggttcccattgcactgatcacaagcttttgttggcccagaaaagtgaagaaaaagcataaggacaccgagtacaagaaaacagacatctgtatcccccagaccaaaggcgtcctggagcaagaagaaaaggaggaaaaggccgcccttgagaagccgatggacctggaagaagaaaaaaagcagaatgatggcgaaatgttggagaaggaggaggaaagtgagccagaagagaagtctgaagaagagatcgagatcattgagggccaggaagagagtaaccagtctaacaagtcaggaagtgaagacgaaatgaaagaggccgacgaaagcaccggctctggtgacggaccaataaagagcgtgcgcaagcggagagtgcgcaaggactag

SEQ ID NO: 145607 - DNA, 1584 bp, Artificial Sequence
  derived and/or modified sequence
atggacgaggagatcagcatctacgacggccggtgggagatcgaggagttaaaagagaaccaggtccccggagatcggggtttggttctgaaatcaagagcgaagcaccacgccatcagtgcggtgttggccaaaccctttattttcgcggacaagccattaatagtgcagtacgaagtcaattttcaggatggcatagactgcggaggcgcttacatcaagcttcttgccgataccgatgacctaatattggagaacttttacgataaaacttcctatataatcatgttcggaccagacaaatgtggggaggattacaaactccattttatatttaggcacaaacaccctaaaaccggagtgtttgaggagaaacatgcgaaaccccccgacgtggatctgaagaagttctttacagatcgaaagacccatctgtatactctggtcatgaaccctgacgatacttttgaagtgcttgtcgatcaaaccgtcgtaaataaggggagcctcctggaggatgtggtgcctcctattaaacctccaaaggaaattgaagaccctaatgacaaaaagccagaggaatgggacgagcgcgctaagattcctgacccatccgccgtcaagcccgaggattgggacgagtcggaacctgcacagatcgaagatagctccgtggtgaagcccgctggttggcttgacgatgagcccaaattcataccagatcccaacgcagaaaaacccgacgactggaatgaagacaccgacggcgagtgggaagccccacagattctgaatcctgcctgcaggataggatgtggggagtggaagcctcccatgatcgataatccaaagtacaagggcgtgtggcgccccccactagtagacaacccaaactatcagggaatctggagcccaagaaagattcccaacccggattactttgaagatgaccatcctttcctcctcacttccttctcagccttgggcctggagctgtggagcatgacaagcgatatttatttcgataacttcatcatctgttccgagaaggaagttgcggaccactgggctgccgacggctggaggtggaaaatcatgatcgccaatgctaataaaccaggtgttctcaagcaacttatggccgccgctgaaggccatccctggctttggctcatctatctggtcaccgccggtgttccgatcgcgctgattacctcgttttgttggcctagaaaagtaaagaagaaacataaggatactgagtacaagaagacagacatttgtattccacaaacgaaaggcgtcctcgaacaagaggagaaggaggaaaaggcagcgcttgagaaaccaatggacctggaggaagagaagaaacaaaatgacggggagatgttagagaaagaggaggagtcagaaccggaagaaaaatcggaagaagaaattgagataatagaggggcaggaagaatcgaaccagagtaataagagcggaagtgaggatgagatgaaagaagctgacgagagtaccgggagcggggatggccctattaaatccgtgcgaaaaaggagagtcagaaaggactag

SEQ ID NO: 145608 - DNA, 1833 bp, Artificial Sequence
  derived and/or modified sequence
atgcatttccaagccttttggctgtgtctcggtctgctgttcatttcaataaatgccgagtttatggacgatgacgtggaaaccgaagattttgaggagaatagtgaagagatcgatgtgaatgaatcagagctctcaagtgagataaaatacaaaacccctcaaccaatcggcgaagtgtacttcgcagagacctttgactctggtaggctggctggatgggtcctgtccaaagctaaaaaggacgatatggatgaagaaatctcaatctacgatggaaggtgggagattgaagagctcaaagagaaccaagtgcctggtgataggggactcgtgctcaaatctagggcgaaacaccacgctatctcagccgtgctcgcaaagccatttatctttgccgacaaaccattaatcgtccagtatgaggttaacttccaggacgggatcgattgcggaggggcatatattaaactgctggctgataccgatgacctgattcttgagaatttctatgataaaacttcctacataattatgttcggacccgataagtgtggtgaggactataaactccactttatcttcaggcacaagcaccctaagacaggggtctttgaagagaagcacgctaagccccctgacgtggatctaaagaaattttttacagatcggaagacgcatctgtacactctggtaatgaaccccgacgacacttttgaagttctggtggaccagaccgttgtgaataagggttctttgctcgaggacgtagtgcctcccatcaagcctcccaaggagatagaggaccccaatgataagaagcccgaggagtgggacgagcgggcaaaaatacctgatccgtcagccgttaagccagaggactgggacgagagcgagcctgcccagatcgaggactcatcagtagtcaaacccgcagggtggctggatgacgaaccgaaattcattcccgatcccaatgctgaaaagccagatgactggaatgaggacacagatggcgagtgggaggctccccaaatactcaaccccgcttgtagaatcgggtgtggggagtggaaacccccaatgattgacaaccccaagtataaaggcgtctggagacctcctttggttgataaccctaactatcaggggatttggagccctcgaaaaattcccaaccctgactattttgaggacgaccaccccttcctgctgacgtcttttagtgccttggggctggagctgtggagcatgacaagcgacatctacttcgataacttcataatatgttcagagaaggaagtcgctgatcactgggcggctgatggttggaggtggaaaataatgattgctaacgcgaacaagccaggagttctgaagcaacttatggcggcagctgaaggacacccatggttatggctcatctaccttgtgaccgccggtgttcccatcgctctaattacgtctttttgctggccacgcaaggtaaaaaagaaacataaggacacggagtacaaaaagactgatatctgtattccgcaaaccaagggcgtgttggagcaggaggaaaaagaggaaaaagcagctctggaaaagccaatggatctggaggaggagaaaaaacagaacgacggggaaatgttggaaaaagaggaggaatcggagcctgaggaaaaaagcgaggaggagatcgagatcattgagggccaggaggaatccaaccaatccaataagtccgggagcgaggatgagatgaaagaagccgacgagtccaccgggtctggagatggtcccattaaaagtgtgagaaagagaagggttcgtaaagactag

SEQ ID NO: 145609 - DNA, 1833 bp, Artificial Sequence
  derived and/or modified sequence
atgcacttccaggcattctggctttgtctcgggctcctgttcatatcaataaacgcagagtttatggacgacgatgtggaaactgaagacttcgaggagaattctgaagaaatcgacgtaaatgagagcgaactgtcgagcgagattaaatacaagacccctcagcccataggtgaggtgtactttgcagaaacctttgacagcggcagactggccggatgggtactgtctaaggctaaaaaggacgatatggacgaggagatcagcatatacgacggccgatgggagattgaggagctgaaggagaaccaggtgcctggcgatagaggactagtgctgaagtctcgggcaaaacaccatgctatcagtgctgtcctggctaagccgttcatctttgctgataaacctctaatcgtgcaatatgaggtgaattttcaggacgggatagactgtggcggagcctatattaaactgctggccgacactgatgacttgatcctagagaacttctatgacaaaacttcctatatcataatgtttgggcctgacaagtgcggcgaggactacaagcttcatttcatctttaggcacaagcaccccaagaccggagttttcgaggagaagcacgccaaacctccggatgtagacttgaaaaagttttttacagatagaaagacgcacctgtataccctggtcatgaatccagacgacacctttgaggtcctggtggatcagaccgtggtgaacaaaggctcacttctagaggacgtcgtccccccaataaaacctccgaaagagatcgaggatccgaacgacaagaaacccgaagagtgggacgaacgtgccaaaatacccgacccttccgcagtgaaaccagaagattgggacgagagcgagccagctcagattgaagattcaagtgtagtaaagcctgccggatggctggacgacgagcccaagtttattcctgaccctaacgccgagaagcccgacgattggaatgaggataccgatggcgaatgggaggccccacagatcctgaacccggcatgcaggattggatgtggcgaatggaaacctcctatgattgataatcctaaatacaaaggggtctggagaccacccctggtcgacaatccaaactaccagggtatttggagcccacggaaaatcccgaatccagactatttcgaggacgaccacccctttctcctgactagtttttccgcactcggactggaattatggtctatgacctccgacatctactttgataatttcattatttgcagtgagaaagaagtcgcagatcattgggcagctgacggttggagatggaagataatgatagccaatgcaaacaaacctggcgttctgaaacaactgatggcggctgccgagggccatccttggctttggctgatctatcttgtgaccgcgggtgttccaatcgccctgattacttcattctgctggcccagaaaggtaaagaaaaagcacaaagacacggagtacaaaaaaactgatatttgtatcccacagaccaaaggggtgctggagcaggaagaaaaagaggaaaaagccgctctagaaaagccaatggatttggaggaggagaagaaacagaatgacggcgagatgctcgagaaagaggaagaaagtgaacccgaagaaaagtctgaagaggagatcgaaatcattgaggggcaggaggaaagtaaccagtcaaacaaatccggctccgaagatgagatgaaggaggccgacgaatcaactgggtctggagacgggcctattaagtctgtacggaaacgccgtgtgaggaaagattag

SEQ ID NO: 145610 - DNA, 540 bp, Artificial Sequence
  derived and/or modified sequence
atgcactttcaagcattttggctgtgtttaggccttctttttatcagcatcaatgccgagttcatggacgacgatgtggagaccgaagacttcgaagagaacagcgaagagattgacgtgaacgagtctgaattgtcctccgagataaagtacaaaacgcctcagccgatcggtgaggtctacttcgccgaaacttttgactcagggcgtctagccggatgggtgctctccaaagccaaaaaggacgatatggatgaggaaatatctatatatgatggcaggtgggagatcgaggagctgaaagaaaaccaggtccctggggataggggcctggtgctgaagagtagggctaaacatcacgcaatttccgctgtcctcgctaagccctttatttttgccgacaagcctctaatcgttcaatacgaagtgaacttccaggacggcattgactgcggtggagcctacatcaaactactggcagacactgacgacttaattctggagaatttctatgataagacctcctacatcatcatgtag

SEQ ID NO: 145611 - DNA, 1833 bp, Artificial Sequence
  derived and/or modified sequence
atgcactttcaggccttctggctttgtctcggcctacttttcattagtattaacgccgaattcatggacgatgacgtcgaaacagaggactttgaggagaattccgaggaaatcgatgtgaatgaatccgagctgtcctctgagataaaatataagaccccccaacctattggcgaagtctatttcgccgagacattcgacagcgggagactggctggctgggtgttatctaaggccaagaaagatgacatggacgaggagatctcaatttacgacgggcgatgggagattgaggagctgaaagaaaaccaggtacctggcgaccgtggacttgtccttaagagtcgcgctaagcatcacgctatctccgccgtgttggccaaacccttcattttcgcagacaagcctctgattgtccagtatgaagttaattttcaagacggaatagactgcgggggtgcatatatcaagcttcttgccgacacagatgacctgatcctggagaatttctacgacaagacatcctatattatcatgttcggcccagataagtgcggggaggattataaacttcactttatttttagacacaaacaccctaagactggagtgtttgaggaaaaacacgccaaaccgccagacgtggatttgaaaaagtttttcaccgatagaaaaacacatctttacacactggtcatgaatccagacgacacatttgaagtattagtggaccagacagtggtgaacaagggcagtttgttggaggacgtagttcctccaattaaacccccaaaggaaatagaggatcctaatgataaaaaacccgaagagtgggacgagcgcgcaaaaatccctgatccctctgcagtgaagccagaggattgggatgagagtgaacccgcacagattgaagactcttccgtagtgaagcctgcagggtggctggacgacgaacctaagtttattcccgacccaaacgcagaaaaaccagatgactggaacgaagatacagacggtgagtgggaggctccacaaattctgaatccagcctgccggattgggtgtggtgagtggaagccacccatgatcgacaatccaaagtataagggcgtatggaggcctcctctagttgacaatccaaactatcagggcatctggtcaccgagaaaaatccctaatccagattatttcgaggacgatcatccttttcttctcacctctttctcagcccttggcctggagctgtggtccatgacctcagacatttatttcgacaacttcatcatctgcagtgaaaaggaggtggccgatcattgggccgctgatgggtggagatggaaaattatgattgctaacgctaacaagccaggtgtgctgaagcagttaatggccgctgcggaaggccacccctggctctggctcatctaccttgtgaccgcaggcgtgccaatcgcacttataacgagcttttgttggcctcgtaaggttaaaaagaaacacaaggatacagagtacaagaagaccgatatttgtattccccagactaagggcgtattggagcaggaagaaaaagaggagaaagcagccttagagaagcctatggacttggaggaagagaagaaacagaacgatggcgagatgctcgaaaaagaagaggagtccgaaccggaggaaaaatctgaagaggaaatagagattattgaggggcaggaggagtcaaaccagagtaataagagtgggagcgaagacgaaatgaaggaagctgatgaatctaccgggagcggcgacgggcctattaaatccgtccgaaaaagaagagtgcgtaaggattag

SEQ ID NO: 145612 - DNA, 1584 bp, Artificial Sequence
  derived and/or modified sequence
atggatgaggagatttctatctacgatgggaggtgggagatcgaagaactgaaggagaaccaggtgccaggggatcgtggacttgttctgaaatcccgggcaaaacaccacgccatctcagctgtcctcgccaaaccttttatcttcgccgacaaaccattaatagttcaatatgaggtgaatttccaagatgggatcgactgcggaggagcatacattaagcttttagcagatacagatgatctcatacttgagaatttctacgacaagacaagttacattattatgttcgggcctgacaaatgcggggaagactacaagttgcacttcatatttcgtcataaacatcctaagactggggtgtttgaggaaaagcacgctaagcctcctgatgtggacctgaagaaatttttcaccgatcgaaagactcacttgtatacactggtcatgaatccagatgatacctttgaggttctggttgatcagacagtggtgaataaagggtccctccttgaagacgttgtcccaccgatcaaaccgccaaaggagatcgaggatcctaacgacaagaagccagaagaatgggatgagagagctaagatccctgatccttctgcagttaaacctgaagattgggacgaatctgagcctgcgcaaatcgaggacagctcggtggttaagccggctggctggctagacgacgagccgaagttcattccagaccccaacgctgaaaaacccgatgactggaacgaggacaccgacggggagtgggaggcccctcagattctgaacccggcatgtaggatcggctgcggagaatggaagccacctatgatcgacaatcccaagtacaagggggtgtggcggcctcccctcgtcgataacccaaattaccaagggatctggagcccacggaaaatcccaaacccagactactttgaagacgatcatccttttctgcttacatctttctccgcccttgggcttgagctgtggagtatgacaagtgacatctacttcgacaattttatcatctgtagtgagaaagaggtcgccgatcactgggcagccgacggctggcgttggaaaattatgattgccaatgccaacaaacccggagttctgaagcagttaatggccgctgctgaggggcatccctggctgtggttaatctacctagtgactgccggtgtccctattgccctgattacctcattttgttggccaagaaaggtgaaaaaaaagcacaaggatactgagtacaagaagactgacatctgtatcccacaaacaaaaggtgtgttagagcaggaagagaaagaggaaaaggcggcattagaaaagccgatggacctggaggaggaaaagaagcaaaacgatggagaaatgctcgaaaaggaagaagaatccgagcctgaagagaaatccgaagaagagatcgaaatcatcgaggggcaagaggagtccaaccagagtaataagtctggatctgaggatgagatgaaagaggccgatgagagcaccggatctggtgatgggcctattaaaagcgtgcgaaaacgcagagttcgtaaggactag

SEQ ID NO: 145613 - DNA, 3043 bp, Artificial Sequence
  derived and/or modified sequence
taatcttgctgcacttattactggacgttgttcataaatatgatttacataaaattcaggacccaatcattgcgcaacaggaggtagcacggtctgcagagagggcgggagctcagaggaggaaaagtcttcggacttgcagggggaattcctcctgggctaacccgggagcggggtccaggccacaaccggccggcggcggcacaggctccatgtgcggctccccctggaggcggttgagcccctcggagcaggagcgcgtagcacacacctcgggccgccaccgcctcccgcccgccaccgcacgcgcacgcgcggttagtagtcgctgctgcgcggccgccggcgggactggtctgaagagacgcggggaccaagtggcaacgacttggacatctgagctgtcactgccgaaaacaggccgcaagagagataatcaatatgcatttccaagccttttggctatgtttgggtcttctgttcatctcaattaatgcagaatttatggatgatgatgttgagacggaagactttgaagaaaattcagaagaaattgatgttaatgaaagtgaactttcctcagagattaaatataagacacctcaacctataggagaagtatattttgcagaaacttttgatagtggaaggttggctggatgggtcttatcaaaagcaaagaaagatgacatggatgaggaaatttcaatatacgatggaagatgggaaattgaagagttgaaagaaaaccaggtacctggtgacagaggactggtattaaaatctagagcaaagcatcatgcaatatctgctgtattagcaaaaccattcatttttgctgataaacccttgatagttcaatatgaagtaaattttcaagatggtattgattgtggaggtgcatacattaaactcctagcagacactgatgatttgattctggaaaacttttatgataaaacatcctatatcattatgtttggaccagataaatgtggagaagattataaacttcattttatcttcagacataaacatcccaaaactggagttttcgaagagaaacatgccaaacctccagatgtagaccttaaaaagttctttacagacaggaagactcatctttatacccttgtgatgaatccagatgacacatttgaggtgttagttgatcaaacagttgtaaacaaaggaagcctcctagaggatgtggttcctcctatcaaacctcccaaagaaattgaagatcccaatgataaaaaacctgaggaatgggatgaaagagcaaaaattcctgatccttctgccgtcaaaccagaagactgggatgaaagtgaacctgcccaaatagaagattcaagtgttgttaaacctgctggctggcttgatgatgaaccaaaatttatccctgatcctaatgctgaaaaacctgatgactggaatgaagacacggatggagaatgggaggcacctcagattcttaatccagcatgtcggattgggtgtggtgagtggaaacctcccatgatagataacccaaaatacaaaggagtatggagacctccactggtcgataatcctaactatcagggaatctggagtcctcgaaaaattcctaatccagattatttcgaagatgatcatccatttcttctgacttctttcagtgctcttggtttagagctttggtctatgacctctgatatctactttgataattttattatctgttcggaaaaggaagtagcagatcactgggctgcagatggttggagatggaaaataatgatagcaaatgctaataagcctggtgtattaaaacagttaatggcagctgctgaagggcacccatggctttggttgatttatcttgtgacagcaggagtgccaatagcattaattacttcattttgttggccaagaaaagtaaagaaaaaacataaagatacagagtataaaaaaaccgacatatgtataccacaaacaaaaggagtactagagcaagaagaaaaggaagagaaagcagccctggaaaaaccaatggacctggaagaggaaaaaaagcaaaatgatggtgaaatgcttgaaaaagaagaggaaagtgaacctgaggaaaagagtgaagaagaaattgaaatcatagaagggcaagaagaaagtaatcaatcaaataagtctgggtcagaggatgagatgaaagaagcagatgagagcacaggatctggagatgggccgataaagtcagtacgcaaaagaagagtacgaaaggactaaactagattgaaatatttttaattcccgagagggatgtttggcattgtaaaaatcagcatgccagacctgaactttaatcagtctgcacatcctgtttctaatatctagcaacattatattctttcagacatttattttagtccttcatttcagaggaaaaagaagcaactttgaagttacctcatctttgaatttagaataaaagtggcacattacatatcggatctaagagattaataccattagaagttacacagttttagttgtttggagatagttttggtttgtacagaacaaaataatatgtagcagcttcattgctattggaaaaatcagttattggaatttccacttaaatggctatacaacaatataactggtagttctataataaaaatgagcatatgttctgttgtgaagagctaaatgcaataaagtttctgtatggttgtttgattctatcaacaattgaaagtgttgtatatgacccacatttacctagtttgtgtcaaattatagttacagtgagttgtttgcttaaattatagattcctttaaggacatgccttgttcataaaatcactggattatattgcagcatattttacatttgaatacaaggataatgggttttatcaaaacaaaatgatgtacagattttttttcaagtttttatagttgctttatgccagagtggtttaccccattcacaaaatttcttatgcatacattgctattgaaaataaaatttaaatattttttcatcctg

SEQ ID NO: 145614 - DNA, 2820 bp, Artificial Sequence
  derived and/or modified sequence
cgcacgcgcggttagtagtcgctgctgcgcggccgccggcgggactggtctgaagagacgcggggaccaagtggcaacgacttggacatctgagctgtcactgccgaaaacaggccgcaagagagcatctgcccaagcaacaaagaggaggtgtttgcttgggagttaaaagcaaatggcaaccaaagctcaggactgggagagaaaagataatcaatatgcatttccaagccttttggctatgtttgggtcttctgttcatctcaattaatgcagaatttatggatgatgatgttgagacggaagactttgaagaaaattcagaagaaattgatgttaatgaaagtgaactttcctcagagattaaatataagacacctcaacctataggagaagtatattttgcagaaacttttgatagtggaaggttggctggatgggtcttatcaaaagcaaagaaagatgacatggatgaggaaatttcaatatacgatggaagatgggaaattgaagagttgaaagaaaaccaggtacctggtgacagaggactggtattaaaatctagagcaaagcatcatgcaatatctgctgtattagcaaaaccattcatttttgctgataaacccttgatagttcaatatgaagtaaattttcaagatggtattgattgtggaggtgcatacattaaactcctagcagacactgatgatttgattctggaaaacttttatgataaaacatcctatatcattatgtttggaccagataaatgtggagaagattataaacttcattttatcttcagacataaacatcccaaaactggagttttcgaagagaaacatgccaaacctccagatgtagaccttaaaaagttctttacagacaggaagactcatctttatacccttgtgatgaatccagatgacacatttgaggtgttagttgatcaaacagttgtaaacaaaggaagcctcctagaggatgtggttcctcctatcaaacctcccaaagaaattgaagatcccaatgataaaaaacctgaggaatgggatgaaagagcaaaaattcctgatccttctgccgtcaaaccagaagactgggatgaaagtgaacctgcccaaatagaagattcaagtgttgttaaacctgctggctggcttgatgatgaaccaaaatttatccctgatcctaatgctgaaaaacctgatgactggaatgaagacacggatggagaatgggaggcacctcagattcttaatccagcatgtcggattgggtgtggtgagtggaaacctcccatgatagataacccaaaatacaaaggagtatggagacctccactggtcgataatcctaactatcagggaatctggagtcctcgaaaaattcctaatccagattatttcgaagatgatcatccatttcttctgacttctttcagtgctcttggtttagagctttggtctatgacctctgatatctactttgataattttattatctgttcggaaaaggaagtagcagatcactgggctgcagatggttggagatggaaaataatgatagcaaatgctaataagcctggtgtattaaaacagttaatggcagctgctgaagggcacccatggctttggttgatttatcttgtgacagcaggagtgccaatagcattaattacttcattttgttggccaagaaaagtaaagaaaaaacataaagatacagagtataaaaaaaccgacatatgtataccacaaacaaaaggagtactagagcaagaagaaaaggaagagaaagcagccctggaaaaaccaatggacctggaagaggaaaaaaagcaaaatgatggtgaaatgcttgaaaaagaagaggaaagtgaacctgaggaaaagagtgaagaagaaattgaaatcatagaagggcaagaagaaagtaatcaatcaaataagtctgggtcagaggatgagatgaaagaagcagatgagagcacaggatctggagatgggccgataaagtcagtacgcaaaagaagagtacgaaaggactaaactagattgaaatatttttaattcccgagagggatgtttggcattgtaaaaatcagcatgccagacctgaactttaatcagtctgcacatcctgtttctaatatctagcaacattatattctttcagacatttattttagtccttcatttcagaggaaaaagaagcaactttgaagttacctcatctttgaatttagaataaaagtggcacattacatatcggatctaagagattaataccattagaagttacacagttttagttgtttggagatagttttggtttgtacagaacaaaataatatgtagcagcttcattgctattggaaaaatcagttattggaatttccacttaaatggctatacaacaatataactggtagttctataataaaaatgagcatatgttctgttgtgaagagctaaatgcaataaagtttctgtatggttgtttgattctatcaacaattgaaagtgttgtatatgacccacatttacctagtttgtgtcaaattatagttacagtgagttgtttgcttaaattatagattcctttaaggacatgccttgttcataaaatcactggattatattgcagcatattttacatttgaatacaaggataatgggttttatcaaaacaaaatgatgtacagattttttttcaagtttttatagttgctttatgccagagtggtttaccccattcacaaaatttcttatgcatacattgctattgaaaataaaatttaaatattttttcatcctg

SEQ ID NO: 145615 - DNA, 706 bp, Artificial Sequence
  derived and/or modified sequence
gaagagacgcggggaccaagtggcaacgacttggacatctgagctgtcactgccgaaaacaggccgcaagagagcatctgcccaagcaacaaagaggaggtgtttgcttgggagttaaaagcaaatggcaaccaaagctcaggactgggagagaaaagataatcaatatgcatttccaagccttttggctatgtttgggtcttctgttcatctcaattaatgcagaatttatggatgatgatgttgagacggaagactttgaagaaaattcagaagaaattgatgttaatgaaagtgaactttcctcagagattaaatataagacacctcaacctataggagaagtatattttgcagaaacttttgatagtggaaggttggctggatgggtcttatcaaaagcaaagaaagatgacatggatgaggaaatttcaatatacgatggaagatgggaaattgaagagttgaaagaaaaccaggtacctggtgacagaggactggtattaaaatctagagcaaagcatcatgcaatatctgctgtattagcaaaaccattcatttttgctgataaacccttgatagttcaatatgaagtaaattttcaagatggtattgattgtggaggtgcatacattaaactcctagcagacactgatgatttgattctggaaaacttttatgataaaacatcctatatcattatgtt

SEQ ID NO: 145616 - DNA, 2995 bp, Artificial Sequence
  derived and/or modified sequence
gatgttgagtctggcgatggggctgcagcgagctagggtcttgactgggctctggcggccccgtgggtggacgcaggaggtggtgccacctgggaccctttgtgtcttcagcaccgccgcatccacctgctgcgcccgggctggggcggacgagcacggggacagctaggtgcctagcccggccggcctcccctgcgggcttgaggagccaccgggagccgaggccgttattccagcggttgccattgcagccccgttccacgcttgagcccggggcgctctcccaatggttgtagagggggcccggggcgcgtctgggcgctgctcactctgctgactgctccttacagaaacccaaacgagatcaaaataggctcggctgtctcagtctccacctatgtggaagcgaagggaccccacttcacggcggtggggccagggactgttggccgctccctcgatacccgcgcagagcccattgtgcgccgccggggggcgggcgaaagggctgggttgaatccagagaggccctaattactagactcattatcgccccaggcctgtttaccatcaatcagacactttcgctgattttatttatagcatctgcccaagcaacaaagaggaggtgtttgcttgggagttaaaagcaaatggcaaccaaagctcaggactgggagagaaaagataatcaatatgcatttccaagccttttggctatgtttgggtcttctgttcatctcaattaatgcagaatttatggatgatgatgttgagacggaagactttgaagaaaattcagaagaaattgatgttaatgaaagtgaactttcctcagagattaaatataagacacctcaacctataggagaagtatattttgcagaaacttttgatagtggaaggttggctggatgggtcttatcaaaagcaaagaaagatgacatggatgaggaaatttcaatatacgatggaagatgggaaattgaagagttgaaagaaaaccaggtacctggtgacagaggactggtattaaaatctagagcaaagcatcatgcaatatctgctgtattagcaaaaccattcatttttgctgataaacccttgatagttcaatatgaagtaaattttcaagatggtattgattgtggaggtgcatacattaaactcctagcagacactgatgatttgattctggaaaacttttatgataaaacatcctatatcattatgtttggaccagataaatgtggagaagattataaacttcattttatcttcagacataaacatcccaaaactggagttttcgaagagaaacatgccaaacctccagatgtagaccttaaaaagttctttacagacaggaagactcatctttatacccttgtgatgaatccagatgacacatttgaggtgttagttgatcaaacagttgtaaacaaaggaagcctcctagaggatgtggttcctcctatcaaacctcccaaagaaattgaagatcccaatgataaaaaacctgaggaatgggatgaaagagcaaaaattcctgatccttctgccgtcaaaccagaagactgggatgaaagtgaacctgcccaaatagaagattcaagtgttgttaaacctgctggctggcttgatgatgaaccaaaatttatccctgatcctaatgctgaaaaacctgatgactggaatgaagacacggatggagaatgggaggcacctcagattcttaatccagcatgtcggattgggtgtggtgagtggaaacctcccatgatagataacccaaaatacaaaggagtatggagacctccactggtcgataatcctaactatcagggaatctggagtcctcgaaaaattcctaatccagattatttcgaagatgatcatccatttcttctgacttctttcagtgctcttggtttagagctttggtctatgacctctgatatctactttgataattttattatctgttcggaaaaggaagtagcagatcactgggctgcagatggttggagatggaaaataatgatagcaaatgctaataagcctggtgtattaaaacagttaatggcagctgctgaagggcacccatggctttggttgatttatcttgtgacagcaggagtgccaatagcattaattacttcattttgttggccaagaaaagtaaagaaaaaacataaagatacagagtataaaaaaaccgacatatgtataccacaaacaaaaggagtactagagcaagaagaaaaggaagagaaagcagccctggaaaaaccaatggacctggaagaggaaaaaaagcaaaatgatggtgaaatgcttgaaaaagaagaggaaagtgaacctgaggaaaagagtgaagaagaaattgaaatcatagaagggcaagaagaaagtaatcaatcaaataagtctgggtcagaggatgagatgaaagaagcagatgagagcacaggatctggagatgggccgataaagtcagtacgcaaaagaagagtacgaaaggactaaactagattgaaatatttttaattcccgagagggatgtttggcattgtaaaaatcagcatgccagacctgaactttaatcagtctgcacatcctgtttctaatatctagcaacattatattctttcagacatttattttagtccttcatttcagaggaaaaagaagcaactttgaagttacctcatctttgaatttagaataaaagtggcacattacatatcggatctaagagattaataccattagaagttacacagttttagttgtttggagatagttttggtttgtacagaacaaaataatatgtagcagcttcattgctattggaaaaatcagttattggaatttccacttaaatggctatacaacaatataactggtagttctataataaaaatgagcatatgttctgttgtgaagagctaaatgcaataaagtttctgtatggttgtttgattctatcaac

SEQ ID NO: 145617 - DNA, 1841 bp, Artificial Sequence
  derived and/or modified sequence
gctgctgcgcggccgccggcgggactggtctgaagagacgcggggaccaagtggcaacgacttggacatctgagctgtcactgccgaaaacaggccgcaagagagataatcaatatgcatttccaagccttttggctatgtttgggtcttatcaaaagcaaagaaagatgacatggatgaggaaatttcaatatacgatggaagatgggaaattgaagagttgaaagaaaaccaggtacctggtgacagaggactggtattaaaatctagagcaaagcatcatgcaatatctgctgtattagcaaaaccattcatttttgctgataaacccttgatagttcaatatgaagtaaattttcaagatggtattgattgtggaggtgcatacattaaactcctagcagacactgatgatttgattctggaaaacttttatgataaaacatcctatatcattatgtttggaccagataaatgtggagaagattataaacttcattttatcttcagacataaacatcccaaaactggagttttcgaagagaaacatgccaaacctccagatgtagaccttaaaaagttctttacagacaggaagactcatctttatacccttgtgatgaatccagatgacacatttgaggtgttagttgatcaaacagttgtaaacaaaggaagcctcctagaggatgtggttcctcctatcaaacctcccaaagaaattgaagatcccaatgataaaaaacctgaggaatgggatgaaagagcaaaaattcctgatccttctgccgtcaaaccagaagactgggatgaaagtgaacctgcccaaatagaagattcaagtgttgttaaacctgctggctggcttgatgatgaaccaaaatttatccctgatcctaatgctgaaaaacctgatgactggaatgaagacacggatggagaatgggaggcacctcagattcttaatccagcatgtcggattgggtgtggtgagtggaaacctcccatgatagataacccaaaatacaaaggagtatggagacctccactggtcgataatcctaactatcagggaatctggagtcctcgaaaaattcctaatccagattatttcgaagatgatcatccatttcttctgacttctttcagtgctcttggtttagagctttggtctatgacctctgatatctactttgataattttattatctgttcggaaaaggaagtagcagatcactgggctgcagatggttggagatggaaaataatgatagcaaatgctaataagcctggtgtattaaaacagttaatggcagctgctgaagggcacccatggctttggttgatttatcttgtgacagcaggagtgccaatagcattaattacttcattttgttggccaagaaaagtaaagaaaaaacataaagatacagagtataaaaaaaccgacatatgtataccacaaacaaaaggagtactagagcaagaagaaaaggaagagaaagcagccctggaaaaaccaatggacctggaagaggaaaaaaagcaaaatgatggtgaaatgcttgaaaaagaagaggaaagtgaacctgaggaaaagagtgaagaagaaattgaaatcatagaagggcaagaagaaagtaatcaatcaaataagtctgggtcagaggatgagatgaaagaagcagatgagagcacaggatctggagatgggccgataaagtcagtacgcaaaagaagagtacgaaaggactaaactagattgaaatatttttaattcccgagagggatgtttggcattgtaaaaatcagcatgccagacctgaactttaatcagtctg

SEQ ID NO: 145618 - protein, 358 aa, Artificial Sequence
  derived and/or modified sequence
MESADFYEAEPRPPMSSHLQSPPHAPSSAAFGFPRGAGPAQPPAPPAAPEPLGGICEHETSIDISAYIDPAAFNDEFLADLFQHSRQQEKAKAAVGPTGGGGGGDFDYPGAPAGPGGAVMPGGAHGPPPGYGCAAAGYLDGRLEPLYERVGAPALRPLVIKQEPREEDEAKQLALAGLFPYQPPPPPPPSHPHPHPPPAHLAAPHLQFQIAHCGQTTMHLQPGHPTPPPTPVPSPHPAPALGAAGLPGPGSALKGLGAAHPDLRASGGSGAGKAKKSVDKNSNEYRVRRERNNIAVRKSRDKAKQRNVETQQKVLELTSDNDRLRKRVEQLSRELDTLRGIFRQLPESSLVKAMGNCA

SEQ ID NO: 145619 - DNA, 1077 bp, Artificial Sequence
  derived and/or modified sequence
atggagagcgccgacttctacgaggcagagccccggccgccaatgagctcccatcttcagtctccgccgcacgcccctagcagcgcagccttcgggttcccccgcggagccggaccggcacaacccccagccccccccgcagccccggagccactgggcggaatttgcgaacatgagacctccatcgacatctctgcttatatcgatccggctgcattcaacgacgaattcctggctgatttgttccagcactcccgacagcaggaaaaggccaaggcagcggtcgggccaactggcgggggaggtggtggcgactttgattacccgggggccccagccgggccaggtggtgccgtcatgcctggtggggcgcatgggcccccacctggctatgggtgcgctgccgctgggtacctggacgggcggctggaacccctgtacgagcgggtgggagcgcccgccctgcggcccttagtgattaagcaggagccccgtgaagaggacgaagctaaacaattggctctggcaggcctgttcccataccagccaccgccaccaccaccaccctctcacccccacccccacccgccacccgcacatctcgcagcccctcacttgcagttccagatcgcacattgtgggcagactacaatgcacctccagcctggtcatccaaccccaccccccacacctgttccgtccccccaccccgccccggccctcggcgctgcggggctgcccgggccaggctctgcgctgaagggtctgggcgcagcccatcccgatctgcgtgcatctggtggctccggcgcgggcaaagcaaagaagtcagtggacaagaactccaacgagtatcgagtccggcgcgaaaggaataacattgctgtgcgaaagtcaagggataaggccaaacagaggaatgttgagacccagcagaaagttctcgaacttacctcggacaatgatcggctgcgcaaacgggtcgaacagctctcacgggagctggacacactgcgcggtatctttagacaactgccagagtcatctctggtgaaggctatgggcaactgtgcgtag

SEQ ID NO: 145620 - DNA, 1077 bp, Artificial Sequence
  derived and/or modified sequence
atggagagcgctgacttctatgaagctgagcccaggcctcccatgagcagccacctgcagagccccccccacgcccccagcagcgctgccttcggcttccccagaggagctggccctgcccagcccccagcccctcctgctgcccctgagcccctgggcggcatctgtgagcacgagaccagcattgacatcagcgcctacatcgaccctgctgccttcaatgatgagttcctggccgacctcttccagcacagccggcagcaggagaaggccaaggctgctgtgggccccaccggcggcggcggcggcggggactttgactacccaggggccccagctggccctggaggagctgtgatgcctggaggagcccacggccccccacctggctacggctgtgccgccgccggctacctggatggccgcctggagcccctgtatgagcgggtgggcgccccagccctgcggcccctggtgatcaagcaggagccccgggaggaggatgaggccaagcagctggccctggccggcctcttcccctaccagcccccacctcctcctccacccagccacccccacccccaccccccaccagcccacctggccgccccccacctgcagttccagatcgcccactgcggccagaccaccatgcacctgcagcccggccaccccaccccaccacccacccctgtgcccagcccccacccagccccagccctgggcgccgccggcctgcccggccctggcagcgccctgaagggcctgggcgccgcccacccagacctgcgggccagcggcggcagcggggccggcaaggccaagaagtctgtggacaagaacagcaatgagtacagagtgcggcgggagaggaacaacattgctgtgaggaagagccgggacaaggccaagcagagaaatgtggagacccagcagaaggtgctggagctgaccagtgacaatgaccggctgaggaagagggtggagcagctgagccgggagctggacaccctgcggggcatcttccggcagctgcctgagagcagcctggtgaaggccatgggcaactgtgcctag

SEQ ID NO: 145621 - DNA, 1077 bp, Artificial Sequence
  derived and/or modified sequence
atggagagcgccgacttctacgaggccgagccccggccccccatgtctagccatctgcagtccccgcctcacgcaccgagctccgcggccttcggatttcccagaggcgctggccccgcccaacctcctgctccacctgccgccccagagcctctgggtggcatttgtgagcatgagaccagtatcgacatttcagcttacatagatccagccgctttcaatgatgaattcctggccgatctgttccagcacagcagacagcaggagaaagcaaaagcagctgtaggccctactgggggtggcgggggcggggacttcgattatcccggtgctcctgccggaccaggcggagcagttatgcctggaggcgcacacggtcctccgccagggtatgggtgtgcggccgctgggtaccttgacggccggcttgagcctctatacgaaagagtgggagcacccgctttacggccattggtaattaagcaggaaccacgggaagaggatgaagccaaacaactggctctggctggcctgttcccatatcaaccacctcccccaccgccaccctcacatcctcacccacacccacctccggctcacctggcggccccacaccttcaatttcaaattgctcattgcggacagactaccatgcacctccaacctgggcaccccaccccacctccaacaccagttcccagtccccaccccgcacctgctttaggggcagccggcttacccggacccggctctgccctcaagggactgggtgcagcccatcccgatctgagagctagcggcggcagcggtgccggcaaagcaaaaaagtcggtggataagaactcgaatgagtatcgcgtgcgcagagagcgaaataatatcgctgttcgtaaaagtcgggacaaagccaaacagcgcaatgtggaaactcagcaaaaggtgcttgaactcacctcagataatgaccggctgagaaagagagtagaacagttgagcagagaattggataccctccggggcatcttcagacagctccccgaatctagcctggtgaaggccatgggaaattgtgcctag

SEQ ID NO: 145622 - DNA, 1077 bp, Artificial Sequence
  derived and/or modified sequence
atggaatccgccgatttttacgaagccgaaccccgtccaccaatgtcaagtcatttgcagtctccacctcacgcaccatcatccgcagccttcggatttccacggggtgcagggcctgctcagcctcctgccccacctgccgcacctgaacccttgggaggaatatgtgagcatgaaacaagcatcgacataagtgcatacattgacccggcagcctttaatgacgagttcctggctgatctctttcagcatagtcgacaacaggaaaaggctaaggccgctgtgggtccaaccggtgggggaggcggtggcgactttgactaccctggagcgccagccggacccggaggagccgtgatgccgggaggcgctcacggtccaccccctggttatggatgcgccgcagctggctacttagacggaaggctggagcccctttacgagcgggtgggcgctccagccctccgccctctcgtcatcaaacaagagccaagagaggaagacgaggctaagcagctggccctcgccggactatttccctatcagccaccccctccgccaccccctagccatccccatcctcatcctccgcctgcgcacctcgccgctccgcatctgcagtttcaaattgcccattgtggccagactaccatgcatctgcagccaggccatcccaccccccctccaactcctgtgccgagtcctcacccagcccctgcactgggggctgcgggactcccgggaccaggctcagccctgaaaggactcggggctgctcacccagacctcagagcatctgggggtagtggtgccggaaaggcgaagaaatctgtggacaagaacagcaacgaatacagggtccggagggagagaaacaatattgccgtaaggaaaagcagggacaaagctaaacagaggaacgtcgaaacacaacaaaaagtgcttgaactgacatccgacaacgaccgcctgagaaagagagttgagcaactttccagagagttggacacattgaggggaatctttcgacaacttcccgagtcttccctggtgaaggccatgggcaactgtgcctag

SEQ ID NO: 145623 - DNA, 1077 bp, Artificial Sequence
  derived and/or modified sequence
atggagagcgccgacttctacgaggccgagcccagaccccccatgagcagccacctgcagagccccccccacgcccccagcagcgccgccttcggcttccccagaggcgccggccccgcccagccccccgccccccccgccgcccccgagcccctgggcggcatctgcgagcacgagaccagcatcgacatcagcgcctacatcgaccccgccgccttcaacgacgagttcctggccgacctgttccagcacagcagacagcaggagaaggccaaggccgccgtgggccccaccggcggcggcggcggcggcgacttcgactaccccggcgcccccgccggccccggcggcgccgtgatgcccggcggcgcccacggccccccccccggctacggctgcgccgccgccggctacctggacggcagactggagcccctgtacgagagagtgggcgcccccgccctgagacccctggtgatcaagcaggagcccagagaggaggacgaggccaagcagctggccctggccggcctgttcccctaccagcccccccccccccccccccccagccacccccacccccaccccccccccgcccacctggccgccccccacctgcagttccagatcgcccactgcggccagaccaccatgcacctgcagcccggccaccccacccccccccccacccccgtgcccagcccccaccccgcccccgccctgggcgccgccggcctgcccggccccggcagcgccctgaagggcctgggcgccgcccaccccgacctgagagccagcggcggcagcggcgccggcaaggccaagaagagcgtggacaagaacagcaacgagtacagagtgagaagagagagaaacaacatcgccgtgagaaagagcagagacaaggccaagcagagaaacgtggagacccagcagaaggtgctggagctgaccagcgacaacgacagactgagaaagagagtggagcagctgagcagagagctggacaccctgagaggcatcttcagacagctgcccgagagcagcctggtgaaggccatgggcaactgcgcctag

SEQ ID NO: 145624 - protein, 167 aa, Artificial Sequence
  derived and/or modified sequence
MSLALRSELVVDKTKRKKRRELSEEQKQEIKDAFELFDTDKDEAIDYHELKVAMRALGFDVKKADVLKILKDYDREATGKITFEDFNEVVTDWILERDPHEEILKAFKLFDDDDSGKISLRNLRRVARELGENMSDEELRAMIEEFDKDGDGEINQEEFIAIMTGDI

SEQ ID NO: 145625 - DNA, 504 bp, Artificial Sequence
  derived and/or modified sequence
atgagcctggccctgagaagcgagctggtggtggacaagaccaagagaaagaagagaagagagctgagcgaggagcagaagcaggagatcaaggacgccttcgagctgttcgacaccgacaaggacgaggccatcgactaccacgagctgaaggtggccatgagagccctgggcttcgacgtgaagaaggccgacgtgctgaagatcctgaaggactacgacagagaggccaccggcaagatcaccttcgaggacttcaacgaggtggtgaccgactggatcctggagagagacccccacgaggagatcctgaaggccttcaagctgttcgacgacgacgacagcggcaagatcagcctgagaaacctgagaagagtggccagagagctgggcgagaacatgagcgacgaggagctgagagccatgatcgaggagttcgacaaggacggcgacggcgagatcaaccaggaggagttcatcgccatcatgaccggcgacatctag

SEQ ID NO: 145626 - DNA, 504 bp, Artificial Sequence
  derived and/or modified sequence
atgagtctggcgctccgttcggaactggtggtagataaaactaagagaaagaaaagacgggaactgtcagaggagcagaagcaggagataaaagatgctttcgagcttttcgacaccgataaagatgaagcaatcgattaccacgaactcaaggtcgccatgcgagctttgggctttgatgttaaaaaggctgatgtcctaaagatactgaaggattatgatcgcgaagccaccggaaagatcacattcgaagacttcaatgaggtagtgaccgactggatcctagaacgcgatccacacgaggagatcctgaaagctttcaagctgttcgatgatgacgactctggcaagatctctctgcgaaacttgcgacgggtagcacgagaactgggcgagaatatgtctgatgaagagctgcgggccatgatcgaggagttcgataaagacggtgatggcgaaatcaatcaggaggagtttatcgccattatgaccggggacatttag

SEQ ID NO: 145627 - DNA, 504 bp, Artificial Sequence
  derived and/or modified sequence
atgagcctggccctgcggtctgagctggtggtggacaagaccaagaggaagaagagaagagagctgtctgaggagcagaagcaggagatcaaggatgcctttgagctgtttgacacagacaaggatgaggccatcgactaccacgagctgaaggtggccatgagggccctgggctttgatgtgaagaaggcagatgtgctgaagatcctgaaggactatgaccgggaggccaccgggaagatcacctttgaggacttcaatgaggtggtgacagactggatcctggagcgggacccccatgaggagatcctgaaggccttcaagctgtttgatgatgatgattctgggaagatcagcctgaggaacctgcggcgggtggcccgggagctgggggagaacatgtctgatgaggagctgcgggccatgattgaggagtttgacaaggatggagatggagagatcaaccaggaggagttcatcgccatcatgaccggggacatctag

SEQ ID NO: 145628 - DNA, 504 bp, Artificial Sequence
  derived and/or modified sequence
atgagcctggccctgcggagcgagctggtggtggacaagaccaagcgcaagaagagacgcgagcttagtgaagagcaaaagcaggaaatcaaggacgcatttgaattgtttgacacagacaaagacgaagccatcgactaccatgaactgaaggtggccatgagggcactggggttcgatgtcaagaaggctgacgtcctgaaaattctgaaggactatgatcgcgaggctacagggaagatcacctttgaggactttaacgaggttgtaactgattggatactcgaacgggacccgcacgaggaaatactgaaagccttcaagctgtttgacgatgacgattctggcaagatcagcctgcgtaacctacgtagggtggctcgagagctcggggagaatatgagcgatgaagagctgagagctatgatcgaggaattcgacaaggatggagacggcgagatcaatcaggaggagtttatcgcaattatgaccggcgatatttag

SEQ ID NO: 145629 - DNA, 504 bp, Artificial Sequence
  derived and/or modified sequence
atgagcctagcccttcgcagtgagttagtagttgacaagaccaagagaaaaaaacggagagagctgtctgaggagcagaagcaggagatcaaagacgccttcgaactgttcgacacggacaaagacgaggccattgactatcacgagctgaaggtggcgatgcgagccctcggcttcgatgttaagaaggcggacgtcttaaagattctcaaagattatgacagagaagccactgggaaaatcacttttgaagacttcaacgaagtggtcaccgattggattttagaacgcgacccgcatgaagaaatactcaaggcattcaaattattcgacgacgatgatagcggcaaaatcagtctacgaaaccttagacgagtggccagggagttgggtgaaaatatgtcagacgaggaactcagagccatgattgaagagttcgacaaggacggcgatggggagatcaatcaagaagaatttatcgccataatgaccggagacatttag

SEQ ID NO: 145630 - DNA, 2432 bp, Artificial Sequence
  derived and/or modified sequence
atgttgtgggaggtccctgaggccgctgaggtcgttcgtgtctgttgaacggctgtgggcgtcttgctgccttgggtagggggttaaaatcgttcttgagaggaacgtctctgtgcgaagagataatgagtttagctctgagaagtgagcttgtagtggacaaaacaaagaggaaaaaaagaagagaactgtctgaggaacagaaacaagaaattaaagatgcttttgaactatttgatacagacaaagatgaagcaatagattatcatgaattaaaggtggcaatgagagccttggggtttgatgtaaaaaaagctgatgtactgaagattcttaaagattatgacagagaagccacagggaaaatcacctttgaagattttaatgaagttgtgacagactggatattggaaagagatccccatgaagaaatactcaaggcatttaaactatttgatgatgatgattcaggtaaaataagcttgaggaatttgcgacgtgttgctagagaattgggtgaaaacatgagtgatgaagaacttcgagctatgatagaagaatttgacaaagatggtgatggagaaataaaccaagaggagttcattgctattatgactggtgacatttaaagaattacaaggataaacactaagaatgttgcagttaccatcttatattctatttttgtgcctggagccatgtgaaaaaaaccaacttagttcttttatcctaaaggaccaaaaataagcatcttatatatctgtattttactactgttaagtttctttgtatgaactgtgttgttagtactcagatagtttagctttgtatttataatagagcttttatataaagttttaaaaattgaatgtgtgatatgtgttctttgaaggttttttaatttaacatttatagtcactttttagtgcacacattttccagactttcgttaataaaatatttattttattagaattttaaagtttggtaaatttgtttttattcctagtatctgttaaccctcaagagtggatttcttaaatcttccctttataattttactagtttctgaaacaaaaattgaaatacaattagcaatagagtggcacatttttccattacctaacatttcatcaattttgacattctatattttaatacaagctgactcaatataagcctaattccttttttaagagtcctgtctttgagtttagaaggaataagtattgtgcagatagacccatttatccttgtgtattatgtttcttaacttggtatcattgtaagtatgaaagttaattttcttctgaatatttccttaaacaaattgaatgaatacaatttgaattttctaacttcttgactgagagatttaaattttggaattttgatttgttaaggtaattatcactcaattacatgtcacagtgatgaaaatagaaaactgtaagccacagaaataatttaagtctatgttttacctatatgaaggaacagtctgtgattcaccaggaaatagtagagacacagtttccaagtactggtgggctcttctgccttgtagaagtgtatgttagggggaaacaagtggttatggagatcgatcatagaaaaaaatagtacctatatggatccttcactcatatctagtactcggtgttatgggctctcccaggaacggaattgagttgtctatttcagcaatctttctttagaattcttgttttaaatttttaagtttaaagtgtagtatcatttgaggcgctttaaatgttgtgagccttttaagagtattacattaagggttgtccactagaaatttaacacaaaatcagtagggaatactatagcagtagtgacatttcaaacagttatctaggaagcaagtgtatattaagtcattcttgtattgctacgaagaaatacccaagactgcatattttataaagaaaagaagcttaattggcttacggttctgcaggctttacaggaagcatggtgcttctgcttttggggaggcctcaggaagcttacagtcatggtagaaggcaaagggggagcaggcacatcacatggtgaaaaccagagtgaacaagtgagagaagtgccaagtactttgaaaccaccagatctcatgagaactcactattgtgaggacatctaatcacctcccaccagacctcacctccagtactggggattacaattcaacatgatatttgagtggggacagatatacaaactatatcagcaggttaactagagtaaaacttaattttgaatacaaattcaatggtcacagtcattatattcagggcaacagaccttgaaattaaaaaatttttgtcgcacactgatgagttccctctgtcttgatcatgaaatatattgatttccaggaaagtgaaaaataaaacagtaaaagtaaa

SEQ ID NO: 145631 - protein, 898 aa, Artificial Sequence
  derived and/or modified sequence
MAAAAAEEGMEPRALQYEQTLMYGRYTQDLGAFAKEEAARIRLGGPEPWKGPPSSRAAPELLEYGRSRCARCRVCSVRCHKFLVSRVGEDWIFLVLLGLLMALVSWVMDYAIAACLQAQQWMSRGLNTSILLQYLAWVTYPVVLITFSAGFTQILAPQAVGSGIPEMKTILRGVVLKEYLTLKTFIAKVIGLTCALGSGMPLGKEGPFVHIASMCAALLSKFLSLFGGIYENESRNTEMLAAACAVGVGCCFAAPIGGVLFSIEVTSTFFAVRNYWRGFFAATFSAFIFRVLAVWNRDEETITALFKTRFRLDFPFDLQELPAFAVIGIASGFGGALFVYLNRKIVQVMRKQKTINRFLMRKRLLFPALVTLLISTLTFPPGFGQFMAGQLSQKETLVTLFDNRTWVRQGLVEELEPPSTSQAWNPPRANVFLTLVIFILMKFWMSALATTIPVPCGAFMPVFVIGAAFGRLVGESMAAWFPDGIHTDSSTYRIVPGGYAVVGAAALAGAVTHTVSTAVIVFELTGQIAHILPVMIAVILANAVAQSLQPSLYDSIIRIKKLPYLPELGWGRHQQYRVRVEDIMVRDVPHVALSCTFRDLRLALHRTKGRMLALVESPESMILLGSIERSQVVALLGAQLSPARRRQHMQERRATQTSPLSDQEGPPTPEASVCFQVNTEDSAFPAARGETHKPLKPALKRGPSVTRNLGESPTGSAESAGIALRSLFCGSPPPEAASEKLESCEKRKLKRVRISLASDADLEGEMSPEEILEWEEQQLDEPVNFSDCKIDPAPFQLVERTSLHKTHTIFSLLGVDHAYVTSIGRLIGIVTLKELRKAIEGSVTAQGVKVRPPLASFRDSATSSSDTETTEVHALWGPHSRHGLPREGSPSDSDDKCQ

SEQ ID NO: 145632 - DNA, 84 bp, Artificial Sequence
  derived and/or modified sequence
atgagccccgccctgaccttccccagaagatggatcgccgagggcctggtggagaacctgaacccccccggcgccgacgcctag

SEQ ID NO: 145633 - DNA, 84 bp, Artificial Sequence
  derived and/or modified sequence
atgtcacccgctctgacgtttcccagacgctggatagccgagggactggttgaaaatttgaacccacccggagctgatgcatag

SEQ ID NO: 145634 - DNA, 2697 bp, Artificial Sequence
  derived and/or modified sequence
atggcggcagccgctgcagaagagggcatggagcccagagctctccagtacgagcaaactctgatgtatgggcggtacacccaggatcttggcgcttttgctaaggaagaggccgctcgcattcgtttgggtggccctgaaccgtggaaaggtccaccgtcaagccgcgccgcaccggagctcctggagtatggccggagccggtgtgcgagatgcagagtctgctctgttagatgtcacaaatttttggtcagtcgcgtcggcgaggattggatattcctcgtgctcctgggcctcctcatggccctggtgagttgggtgatggattatgcgattgcagcttgtcttcaggcccaacaatggatgtctagaggcctgaataccagcatcttattgcagtacctcgcctgggtgacttacccagtggtgctgatcacattttccgccggctttactcagattctcgcacctcaggctgtgggtagtggcatcccagaaatgaaaaccatactcaggggagtcgtgctgaaggaatatttgacgctcaaaaccttcatcgccaaagtcatagggcttacctgcgcgctcgggagcggcatgccactcgggaaggagggaccctttgtgcatattgcgagcatgtgcgctgccctgttgtccaaattcctctccctctttggaggcatttatgagaatgaaagtcggaacactgaaatgttagctgccgcctgtgcagtaggagtggggtgttgtttcgccgcacctattgggggagtgctcttctcaatcgaggtcactagtacatttttcgcagtgcggaattattggcgtggcttcttcgcagccaccttctccgcttttatattccgcgtgctagccgtgtggaatagggacgaggagaccatcactgccctcttcaagacaagattccgccttgatttcccttttgacctgcaggaacttcccgcttttgccgtcatcggcattgcctctggctttggcggtgccctgttcgtgtaccttaatagaaagattgttcaggtcatgagaaagcagaagaccatcaaccggtttttgatgcggaagcggctgctgttccccgccctcgtcaccctgttgattagtacactcacctttccgccagggtttggccagttcatggcgggccagctgagtcagaaggaaacgctcgttaccctcttcgacaatcgaacgtgggtgcggcagggacttgtggaggaactggaaccaccttcaactagccaggcctggaatccgcctcgcgccaatgtgttccttacactcgtaatttttatcctaatgaaattctggatgtccgctttggccacaactattcccgtcccatgcggtgcctttatgcccgtgtttgttattggcgccgctttcgggcgactggtcggcgaatcaatggccgcttggttccctgacggtattcacacggatagcagcacctatcgcatcgtccctggcggctacgccgtggtgggcgcagctgccctggccggcgctgtcacacacacagtgagtacagcagtgatcgtcttcgagctcactggtcagattgctcatatcctgcccgtgatgatagcagtcatccttgcaaacgcagtcgcacagtccctgcaaccgtcactttacgactccatcatcaggataaagaaattgccttatctcccggagttggggtggggacgccaccaacagtacagggtcagagtggaagacattatggtaagggacgtcccccatgttgctctttcctgtactttccgggacctcaggctggcactccaccgaacaaagggacgtatgctggccttagtcgagtctccggagtctatgattctcttagggtctatcgagcgatctcaggtggtagcactactgggagcccagcttagcccggccaggcgtcggcagcatatgcaggaacggcgcgccacacagactagtccactgagcgaccaggagggaccccccacccccgaagcgtctgtctgctttcaggtgaacacagaagacagcgcattcccggccgcccgcggggagactcacaagccccttaaaccagccttaaaacgtggcccttctgtgacgaggaatctgggcgagtcccccaccggaagtgctgagagcgctgggatcgccctgcgctctttgttctgtggttcacccccaccagaggctgccagcgaaaagctggaatcatgtgaaaagcggaaattaaaacgggtcagaatttctctcgctagtgatgcggatctggaaggggaaatgtcaccggaggaaattttggaatgggaggaacaacagcttgacgagcctgtcaacttctctgactgtaagattgatccagctccttttcagcttgtagagcggacttctcttcataagacgcacactattttctcattgctcggtgtcgatcacgcctatgtgacctctattggccgcctcatcggtattgtaactctcaaggagttaaggaaagcaatcgagggatctgtgaccgcccaaggggttaaagtcaggcctccgttagcctccttcagggattctgccacctcgagttcggacacggagactacagaagtgcacgccttgtgggggcctcattcacgtcacggactgcctagagaaggatcaccgtctgactctgacgacaagtgccagtag

SEQ ID NO: 145635 - DNA, 2697 bp, Artificial Sequence
  derived and/or modified sequence
atggctgctgctgctgctgaggagggcatggagccccgggccctgcagtatgagcagaccctgatgtatggccgctacacccaggacctgggcgcctttgccaaggaggaggccgcccgcatccggctgggcggccctgagccctggaagggcccccccagcagcagagctgcccctgagctgctggagtatggccgcagccgctgtgcccgctgccgggtgtgcagcgtgcgctgccacaagttcctggtgtcccgggtgggggaggactggatcttcctggtgctgctgggcctgctgatggccctggtgtcctgggtgatggactatgccatcgccgcctgcctgcaggcccagcagtggatgagccggggcctgaacaccagcatcctgctgcagtacctggcctgggtgacctaccctgtggtgctgatcaccttctctgctggcttcacccagatcctggccccccaggccgtgggcagcggcatccctgagatgaagaccatcctgcggggcgtggtgctgaaggagtacctgaccctgaagaccttcatcgccaaggtgattggcctgacctgtgccctgggcagcggcatgcccctgggcaaggagggcccctttgtgcacatcgcctccatgtgtgccgccctgctgagcaagttcctgagcctgtttggaggcatctatgaaaatgaaagcaggaacacagagatgctggccgccgcctgtgctgtgggcgtgggctgctgctttgctgcccccatcggcggcgtgctcttcagcattgaggtgaccagcaccttctttgctgtgaggaactactggaggggcttctttgctgccaccttcagcgccttcatcttccgggtgctggccgtgtggaacagagatgaggagaccatcacagccctcttcaagacccgcttccggctggacttcccctttgacctgcaggagctgcctgcctttgctgtgattggaattgccagcggctttggaggagccctgtttgtgtacctgaacaggaagatcgtgcaggtgatgaggaagcagaagaccatcaaccgcttcctgatgaggaagaggctgctcttccctgccctggtgaccctgctgatcagcaccctgaccttccccccaggcttcggccagttcatggccggccagctgagccagaaggagaccctggtgaccctgtttgacaacagaacctgggtgcggcagggcctggtggaggagctggagccccccagcaccagccaggcctggaaccccccccgggccaacgtgttcctgaccctggtgatcttcatcctgatgaagttctggatgtctgccctggccaccaccatccctgtgccctgtggggccttcatgcctgtgtttgtgattggagctgccttcggccgcctggtgggggagagcatggccgcctggttcccagatggcatccacacagacagcagcacctaccgcatcgtgcctgggggctatgctgtggtgggcgctgctgccctggccggggctgtgacccacacagtgtccacagctgtgattgtgtttgagctgaccggccagatcgcccacatcctgcctgtgatgattgctgtgatcctggccaatgctgtggcccagagcctgcagcccagcctgtatgacagcatcatccgcatcaagaagctgccctacctgcctgagctgggctggggccgccaccagcagtacagagtgcgggtggaggacatcatggtgagagatgtgccccacgtggccctgagctgcaccttccgggacctgcggctggccctgcacaggaccaagggccgcatgctggccctggtggagagccctgagagcatgatcctgctgggcagcattgaaagaagccaggtggtggccctgctgggcgcccagctgagccctgcccggcggcggcagcacatgcaggagcggcgggccacccagaccagccccctgagtgaccaggagggcccccccaccccagaggcctctgtgtgcttccaggtgaacacagaggacagcgccttccctgctgcccggggggagacccacaagcccctgaagccagccctgaagaggggccccagcgtgaccaggaacctgggggagagccccaccggcagcgctgagagcgctggcatcgccctgcggagcctcttctgtggcagccccccacctgaggccgccagcgagaagctggagagctgtgagaagaggaagctgaagagggtgcgcatcagcctggccagtgatgctgacctggagggggagatgagccctgaggagatcctggagtgggaggagcagcagctggatgagcctgtgaacttcagtgactgcaagattgatcctgcccccttccagctggtggagaggaccagcctgcacaagacccacaccatcttcagcctgctgggcgtggaccacgcctacgtgaccagcatcggccgcctgattggaattgtgaccctgaaggagctgaggaaggccatcgagggctctgtgacagcccagggcgtgaaggtgcggccccccctggccagcttccgggacagcgccaccagcagcagtgacacagagaccacagaggtgcacgccctgtggggcccccacagccgccacggcctgccccgggagggcagccccagcgacagtgatgacaagtgccagtag

SEQ ID NO: 145636 - DNA, 2697 bp, Artificial Sequence
  derived and/or modified sequence
atggccgccgccgccgccgaggagggcatggagccccgggccctgcagtacgaacagacactgatgtacgggcgctacacccaggacttgggcgcttttgcaaaagaagaggcagcacgtattaggctgggcggccctgaaccctggaaaggaccaccctcaagccgtgctgcccctgagctgctagaatatggacggtcaagatgcgcccgttgtcgcgtgtgctcggtcagatgccacaagtttttggtgagccgtgtgggggaagattggatcttcttggtgctgctgggcttgctaatggctcttgtgtcttgggtcatggactacgcgatagctgcctgccttcaggcccaacagtggatgagcagggggcttaacacttccatcctcctgcagtacctggcgtgggttacttacccggtggtactgatcacattctcagccggattcacccaaatcctcgccccccaggctgtcgggtccggcatcccagaaatgaaaaccattctccgcggtgtggtacttaaggaatatttaacccttaagactttcatcgccaaggtgattgggttgacctgcgcactgggatccggtatgcctttagggaaggagggcccttttgtgcatattgcatctatgtgtgccgcacttctctctaaattcctgtccctgtttggtggcatttacgaaaatgaaagcagaaacaccgagatgttggcagctgcctgtgcggtgggagtcggctgctgtttcgcggccccaatcggcggtgttctgttctccatcgaggtcaccagcacattttttgctgtcagaaactattggcgaggctttttcgctgccacatttagtgcctttatttttagggtgctcgcagtatggaacagggatgaggagacaattactgcccttttcaagaccagatttcgactcgattttccgttcgacctccaggagctgccagcattcgccgttatcggcattgcttccggttttggcggtgctcttttcgtctacctgaatcggaagatcgtgcaagtgatgcgaaagcagaaaacaatcaacagattcctgatgagaaagcggctgttgttccccgccctggttaccctgctgattagcactctcacgttcccacccggtttcggacagttcatggcagggcaactgtcccagaaggagacgcttgtgaccctgttcgataatcgaacttgggttaggcagggcctggtagaagagcttgaaccaccatcaacctcacaggcctggaatccgccaagggccaacgtgttcctgacactggtaatatttattttgatgaaattttggatgtccgctctcgctactacaatcccggtgccctgtggtgcatttatgcctgttttcgtgatcggagccgccttcggccgcctcgtgggtgagtcgatggccgcctggttcccagacggcatccacacagatagttccacttataggatagtaccaggagggtatgccgttgtgggggctgcagctctagctggagcagtcacccacaccgtctctaccgcggtcatcgtgttcgagctaacaggccagatagcccatattctgccagtgatgatcgccgtgatcctggccaacgctgtcgctcaaagcctccagccttccctatatgatagcattataagaattaagaaactgccttacctgccagaactcggctggggacgccaccaacagtacagggttcgcgtagaggacattatggtcagagatgtgccccacgtcgctctgtcctgcacgtttcgggacctcaggttagcactccaccgaaccaagggacggatgctagcccttgtcgagagccccgaatctatgatcctgctcggcagcatcgagaggtctcaggtggttgctctgctgggagctcagctgtcccccgctcggcgacgtcagcatatgcaagaacgaagggccacccagaccagccctctgtctgaccaggagggcccgcccactcccgaggctagcgtgtgtttccaagtgaacactgaagatagtgcctttcccgccgcccgcggcgaaacgcataagccactgaaacctgctctgaaacggggtccatcagttacgaggaatctaggcgaaagccctactgggagcgctgagagcgctgggatcgctttgaggagtctgttctgcgggtcaccccctcccgaagctgctagtgagaaacttgagagctgtgaaaagaggaagcttaagcgagtgcggatttccctggcctctgacgcagatcttgaaggggaaatgtcacccgaggaaattcttgagtgggaggaacaacaactcgacgagccagtgaacttctccgattgtaagatcgatcctgcgccgtttcagttagtggagcgcacgtcccttcataagactcatactatttttagtttgttgggagtcgaccacgcatacgtgacctccatcggtcgcctgataggaatcgtgacgctaaaggagctgcgcaaggctatcgagggctctgtaaccgcccaaggggtgaaggttcgcccacctctagcaagttttagggactcggctacatcatcgagcgacacagaaaccacagaggtgcatgccctgtgggggcctcatagccgtcacggacttccacgggaagggagccctagcgattcagacgacaagtgccagtag

SEQ ID NO: 145637 - DNA, 2697 bp, Artificial Sequence
  derived and/or modified sequence
atggccgcagctgccgcagaggaagggatggagcctagggcactgcagtacgaacagacactgatgtacggcaggtacacgcaggatctgggagcattcgcaaaggaagaagccgctcggattcgattgggcggacctgagccgtggaagggacccccatccagccgcgctgctccagagctgcttgaatatgggcgaagcagatgcgctagatgccgggtgtgctccgtgagatgccacaagttcctagttagcagggttggggaagactggatctttctagtactcttgggtttgctcatggccttagtgtcgtgggttatggattatgccattgcagcgtgcctgcaagcacagcagtggatgagtagggggctcaatacttctatcttgctgcagtatttagcttgggttacttatccagtagtcctcattacctttagtgctggattcacacaaatcctggctcctcaggccgtaggttctggaattcccgagatgaagacgatcctccggggtgtggtgttaaaagaatatcttacactcaagaccttcatcgccaaagttatagggctgacttgcgccctgggatcagggatgcccctggggaaggagggcccatttgtccacattgcatctatgtgcgcggctctgctaagcaagtttctttcactcttcggaggtatatacgagaacgagtcacggaacacagaaatgttggcggcagcctgcgcggttggcgtcggatgttgttttgccgctcctattgggggagtgttgttcagcattgaagtgacctcaacctttttcgccgtgagaaattactggaggggatttttcgcggcaaccttctcagcctttatcttcagggtgctggcagtctggaaccgggatgaggaaaccattaccgccctcttcaagactagattccgattggacttcccgtttgatctgcaggagctgcctgccttcgctgtgattggaatcgcatccggcttcgggggagctttgtttgtgtatttgaaccgaaaaattgtgcaagtaatgagaaagcagaagaccattaaccgcttcctgatgcgcaagaggttgctctttcccgctttggtgaccctcctaatttcgacactaacgttccctccaggctttgggcagtttatggctggacagttgtcgcaaaaggagactttagtgactctgtttgacaaccgtacctgggtacgccagggactcgtggaagaactggagcctcctagtacctcccaggcctggaatcctccgagagctaacgtgttccttaccctggtcatttttatcctgatgaagttttggatgtccgcactggctacaacaatcccagtgccctgtggcgcatttatgcctgtgttcgtcattggtgcggcttttggcagactggtgggggaatctatggccgcatggtttcccgatggcatccacactgacagcagcacttacagaattgttcctggcggatacgctgtggtgggagctgctgcgcttgccggagctgttactcatacagtttcaaccgccgtcatcgtctttgagctaacagggcagatagcgcacatacttccagttatgatagcagttatccttgcaaacgctgttgcccaatcacttcaaccgtcactctacgacagcatcataaggataaagaaactcccttacctgcccgaacttggctggggaagacaccagcaatatcgtgttcgagtggaggacattatggtgcgagacgtgcctcacgttgctctgagctgtacttttcgggatctgcgtttagcactgcaccgcactaaaggtcgcatgcttgctctagtcgaatctccggagagcatgatcctgctcggttctatagaaagaagccaggtggtagccctgttaggggctcagctctcacctgccaggcgtcggcagcatatgcaagagcgcagggcaactcaaacttccccgctgtcagatcaggagggtccccctaccccagaggccagtgtgtgtttccaggtgaacacggaagactcggctttccccgcagcacggggagaaacacataagcccttgaagcccgctttgaagcggggacctagtgttacgaggaatctgggggaaagccccaccgggagcgccgaaagcgccggaatcgctcttcgatcactgttctgcgggtctccgccacctgaggctgccagcgaaaagctggagtcatgtgagaaacgaaaactgaaacgcgttagaattagtctcgcaagcgatgccgacctagaaggggaaatgagtccggaagaaatcctggagtgggaagaacagcagctagatgagcccgtaaactttagtgattgcaagatcgatcctgctccatttcaattagtagaacgcacaagtctgcacaagacacatacaatctttagcctgctgggtgtggaccacgcatatgtgacctctataggtcgcctcataggaatcgttacattgaaggagctgagaaaagctatcgaaggcagcgtcacagcccagggggtaaaggtgagaccccctctagcttctttcagggattctgccacctcctcttccgacacagagacgactgaagtgcatgctctgtgggggcctcatagccgacacggtctccccagggaaggtagtccctcagactcagacgataaatgccagtag

SEQ ID NO: 145638 - DNA, 3290 bp, Artificial Sequence
  derived and/or modified sequence
gacgcgagcgggaggctgcgccagcggcgcccgccgggggcccgccgcactctgctctcggcctcccgggctgcggggacgggacggctgccggcgcggactttgcgggccgggagccgagtccaggacagagccggaaccgccgagggaggcgagagggcagtgcgcggagatggcggccgcggcggcggaggaagggatggagccacgggcgctgcagtacgagcagaccctgatgtatggccggtacactcaggaccttggggcctttgccaaagaggaagctgctcggattcgcctgggagggcctgaaccctggaaaggtcccccttcctctcgggctgccccagagctcttggaatatggacggagccgttgcgcccgatgccgcgtctgttctgtccgctgccacaagttcctagtatccagggttggtgaagattggatcttcctggtcctgctggggcttctcatggcattggtcagctgggtcatggactatgccattgctgcctgtctgcaagcccagcagtggatgtcccggggcttgaacaccagcatcttgctccagtacctggcctgggtcacctaccctgttgtcctcatcactttctcagccggattcacacagatcctggcccctcaggctgtcggctctggcatccctgagatgaagaccatcttgcggggagtggtgctgaaagaatacctcacactcaagacctttatagctaaggtcattgggctgacctgcgccctaggcagcgggatgccgcttggcaaagagggcccttttgtgcatatcgcaagcatgtgtgctgcccttctcagcaagttcctctccctctttgggggtatctatgagaatgaatcccggaacacagagatgctggctgccgcctgtgccgtgggggtgggctgctgcttcgcggcacctattggaggcgtcctcttcagcatcgaggtcacctccaccttctttgcagtgcggaactactggcggggcttcttcgctgccaccttcagtgccttcatcttccgggtcttggcagtctggaaccgggatgaagagactattacagccctcttcaaaacccgattccggctcgacttcccctttgacctgcaggagctgccagcctttgctgtcattggtattgctagtggcttcggtggagccctctttgtctacctgaaccggaagattgtccaggtgatgcggaagcagaaaaccatcaatcgcttcctcatgaggaaacgcctgctcttcccggctctggtgaccctgctcatctccacgctgaccttcccccctggctttggacagttcatggctggacagctctcacagaaagagacgctggtcaccctgtttgacaatcggacgtgggtccgccagggcctggtggaggagctagaaccacccagcacctcacaggcctggaacccaccacgtgccaacgtcttcctcaccctggtcatcttcattctcatgaagttctggatgtctgcactggccaccaccatcccagttccctgtggggccttcatgcctgtctttgtcattggagcagcatttgggcgtctggtgggtgaaagcatggctgcctggttcccagatggaattcatacggacagcagcacctaccggattgtgcctgggggctacgctgtggtcggggcagctgcgctggcaggagcggtgacacacacagtgtccacggctgtgatcgtgttcgagctcacaggccagattgcccacatcctgcctgtcatgatcgccgtcatcctggccaacgctgtcgcccagagtctgcagccctccctctatgacagcatcatccgaatcaagaaactgccctacctgcctgagctcggctggggccgccaccagcagtaccgggtgcgtgtggaggacatcatggtgcgggatgttccccatgtggccctcagctgcaccttccgggacctgcgtttggcactgcacaggaccaagggccgaatgctggccctagtggagtcccctgagtccatgattctgctgggctccatcgagcgttcacaggtggtggcattgttgggggcccagctgagcccagcccgccggcggcagcacatgcaggagcgcagagccacccagacctctccactatctgatcaggagggtccccctacccctgaggcttctgtctgcttccaggtgaacacagaagactcagccttcccagcagcccggggggagacccacaagcccctaaagcctgcactcaagagggggcccagtgtcaccaggaacctcggagagagtcccacagggagcgcagagtcggcaggcatcgccctccggagcctcttctgtggcagtccaccccctgaggctgcttcggagaagttggaatcctgtgagaagcgcaagctgaagcgtgtccgaatctccctggcaagtgacgcggacctggaaggcgagatgagccctgaagagattctggagtgggaggagcagcaactagatgaacctgtcaacttcagtgactgcaaaattgatcctgctcccttccagctggtggagcggacctctttgcacaagactcacactatcttctcactgctgggagtggaccatgcttatgtcaccagtattggcagactcattggaatcgttactctaaaggagctccggaaggccatcgagggctctgtcacagcacagggtgtgaaagtccggccgcccctcgccagcttccgagacagtgccaccagcagcagtgacacggagaccactgaggtgcatgcactctgggggccccactcccgtcatggcctcccccgggagggcagcccttccgacagcgacgacaaatgccaatgagcccctcgtgggtggcctaggatggtgctagccatgcccgtcagcccagaatgtgcatctttcattccttctgccttcggaaggcaggaggcagctacagctggaggctgcaccccagccccctccagacctggggtgccagcttctcccagttcatcctacctggaatctgacccactacccacctgcaacaagtcttccagaggcaggaagataggccctgccctggcaggatgggttggggtcacttgacccctgctccccctttgaggggaaaggggtggaactaagatgggtttataactggaacctccaatgaccagatgtatatagagatttacaaagatttttatattaatttaataaaacaaattcttaaatagaacaaaataaacacctaatgagccacttatatatagaa

SEQ ID NO: 145639 - DNA, 2697 bp, Artificial Sequence
  derived and/or modified sequence
atggccgccgccgccgccgaggagggcatggagcccagagccctgcagtacgagcagaccctgatgtacggcagatacacccaggacctgggcgccttcgccaaggaggaggccgccagaatcagactgggcggccccgagccctggaagggcccccccagcagcagagccgcccccgagctgctggagtacggcagaagcagatgcgccagatgcagagtgtgcagcgtgagatgccacaagttcctggtgagcagagtgggcgaggactggatcttcctggtgctgctgggcctgctgatggccctggtgagctgggtgatggactacgccatcgccgcctgcctgcaggcccagcagtggatgagcagaggcctgaacaccagcatcctgctgcagtacctggcctgggtgacctaccccgtggtgctgatcaccttcagcgccggcttcacccagatcctggccccccaggccgtgggcagcggcatccccgagatgaagaccatcctgagaggcgtggtgctgaaggagtacctgaccctgaagaccttcatcgccaaggtgatcggcctgacctgcgccctgggcagcggcatgcccctgggcaaggagggccccttcgtgcacatcgccagcatgtgcgccgccctgctgagcaagttcctgagcctgttcggcggcatctacgagaacgagagcagaaacaccgagatgctggccgccgcctgcgccgtgggcgtgggctgctgcttcgccgcccccatcggcggcgtgctgttcagcatcgaggtgaccagcaccttcttcgccgtgagaaactactggagaggcttcttcgccgccaccttcagcgccttcatcttcagagtgctggccgtgtggaacagagacgaggagaccatcaccgccctgttcaagaccagattcagactggacttccccttcgacctgcaggagctgcccgccttcgccgtgatcggcatcgccagcggcttcggcggcgccctgttcgtgtacctgaacagaaagatcgtgcaggtgatgagaaagcagaagaccatcaacagattcctgatgagaaagagactgctgttccccgccctggtgaccctgctgatcagcaccctgaccttcccccccggcttcggccagttcatggccggccagctgagccagaaggagaccctggtgaccctgttcgacaacagaacctgggtgagacagggcctggtggaggagctggagccccccagcaccagccaggcctggaacccccccagagccaacgtgttcctgaccctggtgatcttcatcctgatgaagttctggatgagcgccctggccaccaccatccccgtgccctgcggcgccttcatgcccgtgttcgtgatcggcgccgccttcggcagactggtgggcgagagcatggccgcctggttccccgacggcatccacaccgacagcagcacctacagaatcgtgcccggcggctacgccgtggtgggcgccgccgccctggccggcgccgtgacccacaccgtgagcaccgccgtgatcgtgttcgagctgaccggccagatcgcccacatcctgcccgtgatgatcgccgtgatcctggccaacgccgtggcccagagcctgcagcccagcctgtacgacagcatcatcagaatcaagaagctgccctacctgcccgagctgggctggggcagacaccagcagtacagagtgagagtggaggacatcatggtgagagacgtgccccacgtggccctgagctgcaccttcagagacctgagactggccctgcacagaaccaagggcagaatgctggccctggtggagagccccgagagcatgatcctgctgggcagcatcgagagaagccaggtggtggccctgctgggcgcccagctgagccccgccagaagaagacagcacatgcaggagagaagagccacccagaccagccccctgagcgaccaggagggcccccccacccccgaggccagcgtgtgcttccaggtgaacaccgaggacagcgccttccccgccgccagaggcgagacccacaagcccctgaagcccgccctgaagagaggccccagcgtgaccagaaacctgggcgagagccccaccggcagcgccgagagcgccggcatcgccctgagaagcctgttctgcggcagccccccccccgaggccgccagcgagaagctggagagctgcgagaagagaaagctgaagagagtgagaatcagcctggccagcgacgccgacctggagggcgagatgagccccgaggagatcctggagtgggaggagcagcagctggacgagcccgtgaacttcagcgactgcaagatcgaccccgcccccttccagctggtggagagaaccagcctgcacaagacccacaccatcttcagcctgctgggcgtggaccacgcctacgtgaccagcatcggcagactgatcggcatcgtgaccctgaaggagctgagaaaggccatcgagggcagcgtgaccgcccagggcgtgaaggtgagaccccccctggccagcttcagagacagcgccaccagcagcagcgacaccgagaccaccgaggtgcacgccctgtggggcccccacagcagacacggcctgcccagagagggcagccccagcgacagcgacgacaagtgccagtag

SEQ ID NO: 145640 - protein, 374 aa, Artificial Sequence
  derived and/or modified sequence
MSGESMNFSDVFDSSEDYFVSVNTSYYSVDSEMLLCSLQEVRQFSRLFVPIAYSLICVFGLLGNILVVITFAFYKKARSMTDVYLLNMAIADILFVLTLPFWAVSHATGAWVFSNATCKLLKGIYAINFNCGMLLLTCISMDRYIAIVQATKSFRLRSRTLPRSKIICLVVWGLSVIISSSTFVFNQKYNTQGSDVCEPKYQTVSEPIRWKLLMLGLELLFGFFIPLMFMIFCYTFIVKTLVQAQNSKRHKAIRVIIAVVLVFLACQIPHNMVLLVTAANLGKMNRSCQSEKLIGYTKTVTEVLAFLHCCLNPVLYAFIGQKFRNYFLKILKDLWCVRRKYKSSGFSCAGRYSENISRQTSETADNDNASSFTM

SEQ ID NO: 145641 - DNA, 1125 bp, Artificial Sequence
  derived and/or modified sequence
atgagcggagaaagtatgaacttttctgacgttttcgactctagcgaagattacttcgtcagcgtgaataccagttattactcagtggacagcgaaatgttgctgtgcagtctccaagaggtgagacagtttagccggttgtttgtccccattgcatactcactcatctgtgtttttgggttactgggcaatatcttggttgtcataacctttgccttctataagaaagcccgttcaatgaccgacgtgtatctgctgaatatggctatcgctgatattctttttgtactcaccctgcctttctgggcagtttcccacgctaccggcgcgtgggtgttctctaacgccacctgtaagctgctgaagggcatttacgccattaattttaactgtggcatgttacttctgacctgcatctcaatggaccgctatatcgcaattgtgcaggctactaaaagcttccgcctgaggagtagaactctcccacgtagtaagattatctgtttggtggtctggggcctgtccgtgatcatatcttcctccactttcgtgttcaatcagaagtacaacactcagggatccgatgtgtgtgaaccgaagtatcaaaccgtcagcgagcccatccgatggaagctgttaatgcttggactcgagttactattcggattttttatccctctgatgttcatgatattttgctacactttcatcgtgaaaacacttgtgcaggctcaaaatagcaagcggcacaaagccattcgtgtaattatcgctgtggtcctcgttttcttggcttgccagattccgcacaacatggtgctgctagtgaccgcagccaatctaggcaagatgaatcggagctgccagtcagagaagctcattggttacactaaaaccgttaccgaggtccttgcttttttgcactgctgcctgaatcccgtcctgtatgcttttatcgggcagaaattccgcaactatttcctaaagattctgaaagatctctggtgcgtgagaagaaagtacaagtcatcaggcttcagctgtgccgggcgatattccgagaatatcagccgccagaccagtgagacagcagataatgataatgcaagcagtttcacgatgtag

SEQ ID NO: 145642 - DNA, 1125 bp, Artificial Sequence
  derived and/or modified sequence
atgagtggagagtccatgaacttttccgacgttttcgactcatctgaggattacttcgtgtctgttaacacgagttactacagcgttgactcagaaatgcttttgtgctcactccaggaggttagacagttttcacgactgtttgttcctatagcctattccctgatttgcgtgttcggactgctgggcaacatactggtggtgatcactttcgccttttataagaaagctcgcagcatgaccgacgtgtatctcctgaatatggcaatcgcagacatcctgttcgttctgaccctgcccttctgggccgtgagtcatgccaccggtgcatgggtgttctccaacgctacatgtaaactgctcaaagggatttacgctatcaatttcaactgtgggatgctgctgttaacgtgtatctccatggaccgatacattgccatagtgcaggcgacaaaaagtttccgcctgcgctctagaactctcccccgaagcaaaataatctgtctggtcgtctgggggctctccgtgattatttcaagtagcacgtttgtcttcaaccagaagtataacacccagggctctgatgtgtgtgaacctaagtaccaaaccgtgtctgaaccaatccgatggaaactgctcatgctgggcctggaattgctgttcggctttttcatcccactaatgttcatgatcttctgctacacttttattgtcaaaacccttgtgcaggcacaaaactctaaaaggcacaaggccatccgggtcatcatcgcagtggtcctcgtgttccttgcatgccagattcctcacaatatggttctgctggtaacggccgctaatctaggcaagatgaataggagctgtcaatcggaaaagctaattgggtacacgaaaacggtgacagaagtgttagccttcctccactgttgcctgaatcccgtgctgtacgcctttatcgggcaaaaattccgtaattattttctgaagattctaaaagacctctggtgtgtacgcaggaagtacaagagtagtggtttctcttgtgcagggcgctatagcgagaacatctcccgtcaaacgtcggaaactgcggataatgataacgcgtcctctttcactatgtag

SEQ ID NO: 145643 - DNA, 1125 bp, Artificial Sequence
  derived and/or modified sequence
atgtcaggagagtcaatgaactttagcgatgtatttgactcctcagaagactacttcgtttccgtcaacacgtcatattacagcgtcgatagcgaaatgctgctgtgttctctgcaggaggtaagacagttctcccgacttttcgtcccaattgcttacagcctgatctgtgtattcggcctactcggcaacatcttggtggtcattaccttcgctttttacaaaaaagccagatcaatgacggacgtctacttactcaacatggccatcgccgacatactgttcgtcttaaccctccctttctgggccgtgtcgcacgcaacaggagcatgggtctttagcaatgctacctgtaaattattgaaaggtatctacgccatcaattttaattgtggtatgcttcttctgacctgcatttcaatggaccgctacatcgccatcgtgcaagccacaaaatcctttcgactcagatctcgcactctgccccgtagcaaaattatttgtctagtagtttggggtctgtctgtgatcatctcttcttctacatttgttttcaatcagaaatacaatacccagggatcagacgtgtgtgaacccaaataccagaccgtcagcgaacccatacggtggaagttactgatgctgggcctggagcttctttttggtttcttcatccctcttatgtttatgattttttgttacacttttattgtcaagacgttggttcaggcacagaacagtaagaggcacaaagctattagggtgattattgctgttgtgctcgtgtttttggcatgccagatcccccacaacatggttctactggtcacagccgccaacctcggcaagatgaaccggtcctgccagagtgaaaaattgatcggctacacaaagacagtgaccgaagtactggcctttcttcattgctgtctcaacccagttctctacgcgtttatcgggcagaaatttcgaaattactttctgaagatcttgaaagatctctggtgtgtgagaagaaaatacaagtcatctggcttttcctgcgcaggccgctactcggagaacatctctaggcaaacttccgagacagccgataatgataatgcatcttctttcactatgtag

SEQ ID NO: 145644 - DNA, 1125 bp, Artificial Sequence
  derived and/or modified sequence
atgtctggagagagcatgaacttcagtgatgtgtttgacagcagcgaggactactttgtgtctgtgaacaccagctactacagcgtggacagcgagatgctgctgtgcagcctgcaggaggtgcggcagttcagccggctgtttgtgcccatcgcctacagcctcatctgtgtgtttggcctgctgggcaacatcctggtggtgatcacctttgccttctacaagaaggcccgctccatgacagatgtgtacctgctgaacatggccatcgctgacatcctgtttgtgctgaccctgcccttctgggccgtgagccacgccaccggggcctgggtgttcagcaatgccacctgcaagctgctgaagggcatctatgccatcaacttcaactgtggcatgctgctgctgacctgcatctccatggaccgctacatcgccatcgtgcaggccaccaagagcttccggctgcggagcaggaccctgcccaggagcaagatcatctgcctggtggtgtggggcctgagcgtcatcatcagcagcagcacctttgtgttcaaccagaagtacaacacccagggcagtgatgtgtgtgagcccaagtaccagacagtgtctgagcccatccgctggaagctgctgatgctgggcctggagctgctgtttggcttcttcatccccctgatgttcatgatcttctgctacaccttcatcgtgaagaccctggtgcaggcccagaacagcaagaggcacaaggccatccgggtcatcatcgctgtggtgctggtgttcctggcctgccagatcccccacaacatggtgctgctggtgacagctgccaacctgggcaagatgaacagaagctgccagagcgagaagctgattggctacaccaagacagtgacagaggtgctggccttcctgcactgctgcctgaaccctgtgctgtatgccttcatcggccagaagttcaggaactacttcctgaagatcctgaaggacctgtggtgtgtgcggaggaagtacaagagcagcggcttcagctgtgccggccgctacagcgagaacatcagccggcagaccagcgagacagctgacaatgacaatgccagcagcttcaccatgtag

SEQ ID NO: 145645 - DNA, 1125 bp, Artificial Sequence
  derived and/or modified sequence
atgagcggcgagagcatgaacttcagcgacgtgttcgacagcagcgaagattattttgtttctgttaacactagctattactccgtagatagtgagatgctgttgtgtagcttgcaggaagtcagacagttctcacggctgtttgttcccattgcatatagcttgatttgcgtctttggtctcctgggcaatattctcgtcgttatcaccttcgccttctacaaaaaggcacgttcaatgaccgacgtctatcttctaaatatggcaattgccgatatcttatttgttctgacacttccattctgggctgtgtctcacgccaccggagcatgggtgttttccaacgcaacttgcaaactacttaagggcatctacgctataaatttcaactgcgggatgctgctgctaacctgtatatcgatggaccgatacatagccattgtgcaagcaacaaaaagcttcaggctgcgcagcagaactctccctaggagtaagattatctgcctcgtggtatggggtttatctgtgattatatcaagtagtacttttgtgtttaaccagaagtataatacacaggggagcgacgtatgtgaacctaagtaccagaccgtctcagaaccaattcggtggaaacttctgatgctgggcctggagctgctgttcggcttctttattccccttatgtttatgattttctgctatacattcatagtcaaaacactcgtacaggcgcagaattccaagagacataaagccatcagagtgattatcgccgtggtgttggtgttcctcgcctgccagatcccacataatatggtgctgcttgtgacagctgccaatctcggaaaaatgaacaggtcctgccaatccgagaaattaatcgggtataccaagacagttacagaggttttggcgtttctacattgctgtttgaatcctgttctctatgccttcatcgggcagaaatttcgtaactatttcctgaagattctgaaagatttatggtgtgtgcgacggaagtacaaaagctccggatttagttgcgctggaaggtatagcgagaatattagccgccagacctcagagacagcagacaacgataatgctagctcctttactatgtag

SEQ ID NO: 145646 - DNA, 1125 bp, Artificial Sequence
  derived and/or modified sequence
atgagcggcgagagcatgaacttcagcgacgtgttcgacagcagcgaggattacttcgtttctgtgaacacgagttactacagcgtggactccgaaatgctcttgtgctccctgcaggaagttagacagttctcaaggctctttgtaccaatcgcatacagcctaatttgtgtctttgggctgctggggaacatcctcgtcgtgatcaccttcgctttttataaaaaagctcgatccatgactgacgtgtatctgctgaacatggccattgcggacatcctattcgtgctcaccttacctttctgggccgttagccatgccactggcgcttgggtgttctccaatgcaacatgcaagctacttaagggaatctacgcaattaatttcaattgcggaatgctgctcctgacttgtatttcaatggaccggtacatcgctatagtacaggccactaagtcgttccgcttgaggtctcgtaccctgcccagaagcaaaattatctgtctggtcgtctggggcctgtcagtgatcatcagctccagcacattcgtattcaaccagaagtacaatacacaagggagcgacgtctgcgaacccaagtatcagactgtttcagagccaattagatggaagctgttgatgttagggttagaactgctcttcgggttttttatacctctgatgttcatgatcttctgttatacctttatcgtgaaaaccctggtgcaggcccaaaattccaagaggcataaggcgatcagggtgatcattgcggtggttctggtttttttggcgtgtcagatccctcacaatatggtactacttgttaccgccgcaaaccttggtaaaatgaaccgaagctgtcaaagtgaaaagctcatcggatacaccaagactgtaaccgaggtgctggccttcctgcactgctgcctgaatccagttctgtatgccttcattggccagaagttccggaattactttctcaagatcctcaaagacctttggtgcgtgagaaggaaatacaaatctagtggcttcagctgtgctgggcggtacagcgagaacataagcagacagacctccgaaaccgccgataatgataacgcatcaagtttcacgatgtag

SEQ ID NO: 145647 - DNA, 1125 bp, Artificial Sequence
  derived and/or modified sequence
atgagcggcgagagcatgaacttcagcgacgtgttcgacagcagcgaagactatttcgtttcagttaatacctcttactactccgtcgattctgaaatgttgctctgctctctccaggaggtcagacagttctcgagactgtttgtgcctattgcatactccctgatttgcgtgttcggccttctggggaatatactggtggtgataacctttgctttctataaaaaggctcggtctatgacagacgtctacctcctcaacatggctatcgccgacatcctgtttgtgctcacactgccgttctgggctgttagccatgctactggagcctgggttttctccaacgccacgtgcaagcttctgaaggggatttacgccatcaatttcaattgtgggatgcttctgcttacatgcatctccatggatcgctacatcgcaatcgtccaggccacgaagtctttcaggctgcgctcccgaacgttgccgcgctctaagatcatctgtctggtggtctggggactttcagtaataatatcttcttcgactttcgtattcaaccaaaagtacaacacacagggctctgacgtgtgtgaaccgaaatatcagactgtttctgagcctatacgctggaagcttctcatgctcggcctcgaactgttgtttgggttttttattcctcttatgttcatgattttctgctacacttttattgttaagacgctggtacaagcacagaattcgaaacggcacaaagctatccgtgtgattattgctgtggtgcttgtgtttctggcttgtcaaatcccacacaatatggtccttttagtcacagctgctaatctagggaaaatgaataggagttgccagagtgagaaattaattgggtatacaaaaacagtgacagaggtgctggccttcttacattgctgtctgaatcccgtactgtacgcattcatcggtcagaaatttaggaactactttctcaaaatattgaaggatttgtggtgcgtaagaaggaaatataaaagttctggcttctcgtgcgccgggcggtactccgaaaacattagcagacagacctcagagaccgcggacaatgacaacgctagtagtttcacaatgtag

SEQ ID NO: 145648 - DNA, 1125 bp, Artificial Sequence
  derived and/or modified sequence
atgtcaggggagtcgatgaatttctcagacgtgtttgattcatctgaggactatttcgtgtccgtcaacacctcttattatagtgtcgactcagagatgttgctgtgttcacttcaagaagtcagacaattcagtcggctgttcgtgcctattgcctatagtcttatttgcgtgttcggattgttgggtaatatcttggtggtgataacattcgccttctataaaaaagcacgttcgatgaccgacgtatacctgctcaatatggctatcgcagatatcctttttgtcctcacccttcccttctgggctgtgagccatgctaccggggcatgggtcttctctaatgcaacttgcaagctcttgaagggaatttacgccatcaacttcaactgcggaatgcttctcctcacatgtatatcgatggatcgctacattgccatagtccaagctactaagagcttccgtcttcgatctcggaccttgccccgttccaagattatttgtttggtagtctggggactgtctgttattatctcgtccagcaccttcgtatttaatcagaagtacaatactcaagggtctgacgtctgtgagccaaagtatcagaccgtgtcagaaccgattcgatggaaattattgatgcttggcctggagctcctgtttggcttcttcattccactcatgtttatgattttctgctacacttttatcgtgaagacactggtccaagcccagaactcaaagcgtcacaaggccattcgcgtcatcatcgcggtggtgctcgttttcctcgcctgtcagatccctcacaatatggtcctcttggtcacagctgctaacctggggaaaatgaatcgcagctgtcagtcagaaaaattgatagggtacacaaagaccgtaaccgaggttctggcttttctacactgctgtctgaatcccgtgctctacgcattcattggccaaaaattccgcaactactttcttaaaatcctgaaagatctctggtgcgtgcggaggaaatacaaatcgagcggattctcctgtgctggacgctattccgagaacatttcccggcagacttcagagacggctgataacgataatgcttcatccttcacaatgtag

SEQ ID NO: 145649 - DNA, 1125 bp, Artificial Sequence
  derived and/or modified sequence
atgagcggtgagtcaatgaatttcagtgacgtgtttgactcaagcgaagactatttcgtttcagtaaacaccagttactacagtgtggactccgaaatgttactatgctcgctacaggaggtgcgccagttcagtcggttgttcgttcccatcgcctatagcctgatatgtgtattcggacttctgggaaacatccttgtagtgatcaccttcgccttctataaaaaagcaaggtctatgactgatgtgtacctgcttaatatggcaattgccgatattcttttcgtcctaaccctgcccttttgggctgtctctcatgcaaccggcgcttgggtgttctcgaatgccacgtgtaaactgcttaagggaatttacgcgatcaattttaattgtggcatgctcctcctgacatgtatcagcatggatcggtatattgccatcgttcaggcaaccaagtcttttagattgagaagcagaacactgccaagatcgaagattatatgtctggttgtctggggactttctgtcattatttcaagtagtactttcgtgtttaaccagaaatacaacacccagggatctgacgtttgcgagcctaagtaccagactgtgtccgagccaatccgctggaaattgctcatgcttggcctggaacttctctttggatttttcataccactcatgttcatgatcttttgttatacattcatagtaaagactctcgtgcaggcccagaattctaagcgacacaaagcaattcgcgtaattatcgccgtagtgctggtgtttctggcatgccagatcccacataacatggttctgttggtgacggcagcaaacctgggtaagatgaatcgatcctgccagtcggagaagcttattggctacaccaagaccgtcacagaggtccttgccttcctacattgctgcctgaatccggtgttatacgcattcattggacagaaattccgcaattatttccttaagatcttgaaggacctgtggtgcgttagacgaaagtataagtcaagtggctttagctgtgcaggacggtactccgagaatattagtagacagacatctgagacggctgacaatgacaacgcatccagcttcacgatgtag

SEQ ID NO: 145650 - DNA, 1125 bp, Artificial Sequence
  derived and/or modified sequence
atgtccggagagtcaatgaatttttctgatgtcttcgattcatcagaagattatttcgtatcagtgaatacctcatattattccgtcgactcagagatgctgctgtgctccctccaggaggtccgtcagttcagccgactgttcgtcccaattgcctattctttgatttgcgtgtttggactgctgggcaacatcttggtcgtgatcacattcgcattttacaagaaggcccgtagcatgacagacgtctacctgctgaacatggcaatcgcagacatcctgttcgtcctgaccctccctttttgggcggtttcccacgctactggcgcttgggtgttctctaatgctacgtgtaaactgctgaagggcatttacgcgattaattttaactgtggaatgctgctgctcacctgtatatcaatggacaggtatatcgccattgttcaagccaccaagagtttcaggctgaggagtcgcacattgcccagaagtaagattatttgtctcgtggtgtggggtctgtcagtcatcatctcaagtagcacctttgtgtttaaccagaaatataacacacagggctccgatgtctgcgaaccaaagtaccagaccgtgtccgagccaattcgatggaaactgttaatgctgggcctggagcttctgtttggctttttcatccccctgatgttcatgattttttgttacacctttatcgttaaaactctggtccaggcgcagaacagtaaacgccacaaggccatccgggtcattattgcggtggtgcttgtgttcttggcctgtcagattccacacaacatggtgctgttggtgactgctgcgaatctgggtaaaatgaacaggagctgtcaaagcgagaagctgatcggctatactaagacagtcacggaggtgctagccttcctgcactgctgcttgaatccggttctatatgcctttatcggccagaagttccgaaattattttcttaaaatccttaaagatctctggtgtgttagacgaaagtataagtcttcagggtttagctgcgccggacggtactccgaaaacatcagtaggcaaacttccgaaacagctgataatgacaatgcttcttcctttaccatgtag

SEQ ID NO: 145651 - DNA, 4018 bp, Artificial Sequence
  derived and/or modified sequence
tgcaaacgttcccaaatcttcccagtcggcttgcagagactccttgctcccaggagataaccaggtaaaggagtatgaaagtttgggtacaaactcattgctgcaaattgaaaaccatgcaaaggctgtcttcctctggggagttcaatgcctctctttttcttatcactttaccattggttggactttgattccagggatcctacgattactcaataccctacaggatatacatggttaaccatttgcatttgggcaaataggcgttacttttcaataggaagtggcaatccagaacttgcttttgggcaattctagtagctcaccgcttttttcttaatgactgctagaagctgcatcttattgacagatggtcatcacattggtgagctggagtcatcagattgtggggcccggagtgaggctgaagggagtggatcagagcactgcctgagagtcacctctactttcctgctaccgctgcctgtgagctgaaggggctgaaccatacactcctttttctacaaccagcttgcattttttctgcccacaatgagcggggaatcaatgaatttcagcgatgttttcgactccagtgaagattattttgtgtcagtcaatacttcatattactcagttgattctgagatgttactgtgctccttgcaggaggtcaggcagttctccaggctatttgtaccgattgcctactccttgatctgtgtctttggcctcctggggaatattctggtggtgatcacctttgctttttataagaaggccaggtctatgacagacgtctatctcttgaacatggccattgcagacatcctctttgttcttactctcccattctgggcagtgagtcatgccaccggtgcgtgggttttcagcaatgccacgtgcaagttgctaaaaggcatctatgccatcaactttaactgcgggatgctgctcctgacttgcattagcatggaccggtacatcgccattgtacaggcgactaagtcattccggctccgatccagaacactaccgcgcagcaaaatcatctgccttgttgtgtgggggctgtcagtcatcatctccagctcaacttttgtcttcaaccaaaaatacaacacccaaggcagcgatgtctgtgaacccaagtaccagactgtctcggagcccatcaggtggaagctgctgatgttggggcttgagctactctttggtttctttatccctttgatgttcatgatattttgttacacgttcattgtcaaaaccttggtgcaagctcagaattctaaaaggcacaaagccatccgtgtaatcatagctgtggtgcttgtgtttctggcttgtcagattcctcataacatggtcctgcttgtgacggctgcaaatttgggtaaaatgaaccgatcctgccagagcgaaaagctaattggctatacgaaaactgtcacagaagtcctggctttcctgcactgctgcctgaaccctgtgctctacgcttttattgggcagaagttcagaaactactttctgaagatcttgaaggacctgtggtgtgtgagaaggaagtacaagtcctcaggcttctcctgtgccgggaggtactcagaaaacatttctcggcagaccagtgagaccgcagataacgacaatgcgtcgtccttcactatgtgatagaaagctgagtctccctaaggcatgtgtgaaacatactcatagatgttatgcaaaaaaaagtctatggccaggtatgcatggaaaatgtgggaattaagcaaaatcaagcaagcctctctcctgcgggacttaacgtgctcatgggctgtgtgatctcttcagggtggggtggtctctgataggtagcattttccagcactttgcaaggaatgttttgtagctctagggtatatatccgcctggcatttcacaaaacagcctttgggaaatgctgaattaaagtgaattgttgacaaatgtaaacattttcagaaatattcatgaagcggtcacagatcacagtgtcttttggttacagcacaaaatgatggcagtggtttgaaaaactaaaacagaaaaaaaaatggaagccaacacatcactcattttaggcaaatgtttaaacatttttatctatcagaatgtttattgttgctggttataagcagcaggattggccggctagtgtttcctctcatttccctttgatacagtcaacaagcctgaccctgtaaaatggaggtggaaagacaagctcaagtgttcacaacctggaagtgcttcgggaagaaggggacaatggcagaacaggtgttggtgacaattgtcaccaattggataaagcagctcaggttgtagtgggccattaggaaactgtcggtttgctttgatttccctgggagctgttctctgtcgtgagtgtctcttgtctaaacgtccattaagctgagagtgctatgaagacaggatctagaataatcttgctcacagctgtgctctgagtgcctagcggagttccagcaaacaaaatggactcaagagagatttgattaatgaatcgtaatgaagttggggtttattgtacagtttaaaatgttagatgtttttaattttttaaataaatggaatactttttttttttttttaaagaaagcaactttactgagacaatgtagaaagaagttttgttccgtttctttaatgtggttgaagagcaatgtgtggctgaagacttttgttatgaggagctgcagattagctaggggacagctggaattatgctggcttctgataattattttaaaggggtctgaaatttgtgatggaatcagattttaacagctctcttcaatgacatagaaagttcatggaactcatgtttttaaagggctatgtaaatatatgaacattagaaaaatagcaacttgtgttacaaaaatacaaacacatgttaggaaggtactgtcatgggctaggcatggtggctcacacctgtaatcccagcattttgggaagctaagatgggtggatcacttgaggtcaggagtttgagaccagcctggccaacatggcgaaacccctctctactaaaaatacaaaaatttgccaggcgtggtggcgggtgcctgtaatcccagctacttgggaggctgaggcaagagaatcgcttgaacccaggaggcagaggttgcagtgagccgagatcgtgccattgcactccagcctgggtgacaaagcgagactccatctcaaaaaaaaaaaaaaaaaaaaaggaaagaactgtcatgtaaacataccaacatgtttaaacctgacaatggtgttatttgaaactttatattgttcttgtaagctttaactatatctctctttaaaatgcaaaataatgtcttaagattcaaagtctgtatttttaaagcatggctttggctttgcaaaataaaaaatgtgttttgtacatgaagtaggaatcgtatttcagcttcaaggttcagattgaggggcccactgtttggagaggatggtattcaggctttctcatgtccttcaaatctgttagcgtttgactctagaaatcaaagcaaaggagtggttacccagacacttcttttggtgtgatcaatgcgctgatgtgatctatgaagatgattcatgcttgaaaactagcacagaaacatcttgcttatttgccaaagctgggagatgagcttctctgcataatttaaatgttcagataaatgaagctgacttatttaagcaataaccttttaaacattttagctaagatgtataaaaatgtttccaaaatataccacatactttatttcttcttaaatgtagtacattaggttacatcatttttcttgctgtcttgggcatcaaaacaggtgccatggtaacctgacactctcaggagacattaagatagaaggggctgttcttcagtggttcccattgattctccccatatctttttgctctcaggctctggccgtctcttcctgagccttaactgtgt

SEQ ID NO: 145652 - DNA, 2980 bp, Artificial Sequence
  derived and/or modified sequence
caaacgttcccaaatcttcccagtcggcttgcagagactccttgctcccaggagataaccagaagctgcatcttattgacagatggtcatcacattggtgagctggagtcatcagattgtggggcccggagtgaggctgaagggagtggatcagagcactgcctgagagtcacctctactttcctgctaccgctgcctgtgagctgaaggggctgaaccatacactcctttttctacaaccagcttgcattttttctgcccacaatgagcggggaatcaatgaatttcagcgatgttttcgactccagtgaagattattttgtgtcagtcaatacttcatattactcagttgattctgagatgttactgtgctccttgcaggaggtcaggcagttctccaggctatttgtaccgattgcctactccttgatctgtgtctttggcctcctggggaatattctggtggtgatcacctttgctttttataagaaggccaggtctatgacagacgtctatctcttgaacatggccattgcagacatcctctttgttcttactctcccattctgggcagtgagtcatgccaccggtgcgtgggttttcagcaatgccacgtgcaagttgctaaaaggcatctatgccatcaactttaactgcgggatgctgctcctgacttgcattagcatggaccggtacatcgccattgtacaggcgactaagtcattccggctccgatccagaacactaccgcgcagcaaaatcatctgccttgttgtgtgggggctgtcagtcatcatctccagctcaacttttgtcttcaaccaaaaatacaacacccaaggcagcgatgtctgtgaacccaagtaccagactgtctcggagcccatcaggtggaagctgctgatgttggggcttgagctactctttggtttctttatccctttgatgttcatgatattttgttacacgttcattgtcaaaaccttggtgcaagctcagaattctaaaaggcacaaagccatccgtgtaatcatagctgtggtgcttgtgtttctggcttgtcagattcctcataacatggtcctgcttgtgacggctgcaaatttgggtaaaatgaaccgatcctgccagagcgaaaagctaattggctatacgaaaactgtcacagaagtcctggctttcctgcactgctgcctgaaccctgtgctctacgcttttattgggcagaagttcagaaactactttctgaagatcttgaaggacctgtggtgtgtgagaaggaagtacaagtcctcaggcttctcctgtgccgggaggtactcagaaaacatttctcggcagaccagtgagaccgcagataacgacaatgcgtcgtccttcactatgtgatagaaagctgagtctccctaaggcatgtgtgaaacatactcatagatgttatgcaaaaaaaagtctatggccaggtatgcatggaaaatgtgggaattaagcaaaatcaagcaagcctctctcctgcgggacttaacgtgctcatgggctgtgtgatctcttcagggtggggtggtctctgataggtagcattttccagcactttgcaaggaatgttttgtagctctagggtatatatccgcctggcatttcacaaaacagcctttgggaaatgctgaattaaagtgaattgttgacaaatgtaaacattttcagaaatattcatgaagcggtcacagatcacagtgtcttttggttacagcacaaaatgatggcagtggtttgaaaaactaaaacagaaaaaaaaatggaagccaacacatcactcattttaggcaaatgtttaaacatttttatctatcagaatgtttattgttgctggttataagcagcaggattggccggctagtgtttcctctcatttccctttgatacagtcaacaagcctgaccctgtaaaatggaggtggaaagacaagctcaagtgttcacaacctggaagtgcttcgggaagaaggggacaatggcagaacaggtgttggtgacaattgtcaccaattggataaagcagctcaggttgtagtgggccattaggaaactgtcggtttgctttgatttccctgggagctgttctctgtcgtgagtgtctcttgtctaaacgtccattaagctgagagtgctatgaagacaggatctagaataatcttgctcacagctgtgctctgagtgcctagcggagttccagcaaacaaaatggactcaagagagatttgattaatgaatcgtaatgaagttggggtttattgtacagtttaaaatgttagatgtttttaattttttaaataaatggaatactttttttttttttttaaagaaagcaactttactgagacaatgtagaaagaagttttgttccgtttctttaatgtggttgaagagcaatgtgtggctgaagacttttgttatgaggagctgcagattagctaggggacagctggaattatgctggcttctgataattattttaaaggggtctgaaatttgtgatggaatcagattttaacagctctcttcaatgacatagaaagttcatggaactcatgtttttaaagggctatgtaaatatatgaacattagaaaaatagcaacttgtgttacaaaaatacaaacacatgttaggaaggtactgtcatgggctaggcatggtggctcacacctgtaatcccagcattttgggaagctaagatgggtggatcacttgaggtcaggagtttgagaccagcctggccaacatggcgaaacccctctctactaaaaatacaaaaatttgccaggcgtggtggcgggtgcctgtaatcccagctacttgggaggctgaggcaagagaatcgcttgaacccaggaggcagaggttgcagtgagccgagatcgtgccattgcactccagcctgggtgacaaagcgagactccatctcaaaaaaaaaaaaaaaaaa

SEQ ID NO: 145653 - DNA, 3216 bp, Artificial Sequence
  derived and/or modified sequence
agtgtatgggtgaaggaggcagcagtgtggccggagaggagagctgggctgggagcacaggaaggtccccaggactctgtggtcatcagtaagagagggcccacgtgtatatgctggtgaacagaaatgtcaaccttttcaaagtctgacatttaagagaaaaaactgtggctgttggtttgtggaacagacagctccttctttattgagtcacctctactttcctgctaccgctgcctgtgagctgaaggggctgaaccatacactcctttttctacaaccagcttgcattttttctgcccacaatgagcggggaatcaatgaatttcagcgatgttttcgactccagtgaagattattttgtgtcagtcaatacttcatattactcagttgattctgagatgttactgtgctccttgcaggaggtcaggcagttctccaggctatttgtaccgattgcctactccttgatctgtgtctttggcctcctggggaatattctggtggtgatcacctttgctttttataagaaggccaggtctatgacagacgtctatctcttgaacatggccattgcagacatcctctttgttcttactctcccattctgggcagtgagtcatgccaccggtgcgtgggttttcagcaatgccacgtgcaagttgctaaaaggcatctatgccatcaactttaactgcgggatgctgctcctgacttgcattagcatggaccggtacatcgccattgtacaggcgactaagtcattccggctccgatccagaacactaccgcgcagcaaaatcatctgccttgttgtgtgggggctgtcagtcatcatctccagctcaacttttgtcttcaaccaaaaatacaacacccaaggcagcgatgtctgtgaacccaagtaccagactgtctcggagcccatcaggtggaagctgctgatgttggggcttgagctactctttggtttctttatccctttgatgttcatgatattttgttacacgttcattgtcaaaaccttggtgcaagctcagaattctaaaaggcacaaagccatccgtgtaatcatagctgtggtgcttgtgtttctggcttgtcagattcctcataacatggtcctgcttgtgacggctgcaaatttgggtaaaatgaaccgatcctgccagagcgaaaagctaattggctatacgaaaactgtcacagaagtcctggctttcctgcactgctgcctgaaccctgtgctctacgcttttattgggcagaagttcagaaactactttctgaagatcttgaaggacctgtggtgtgtgagaaggaagtacaagtcctcaggcttctcctgtgccgggaggtactcagaaaacatttctcggcagaccagtgagaccgcagataacgacaatgcgtcgtccttcactatgtgatagaaagctgagtctccctaaggcatgtgtgaaacatactcatagatgttatgcaaaaaaaagtctatggccaggtatgcatggaaaatgtgggaattaagcaaaatcaagcaagcctctctcctgcgggacttaacgtgctcatgggctgtgtgatctcttcagggtggggtggtctctgataggtagcattttccagcactttgcaaggaatgttttgtagctctagggtatatatccgcctggcatttcacaaaacagcctttgggaaatgctgaattaaagtgaattgttgacaaatgtaaacattttcagaaatattcatgaagcggtcacagatcacagtgtcttttggttacagcacaaaatgatggcagtggtttgaaaaactaaaacagaaaaaaaaatggaagccaacacatcactcattttaggcaaatgtttaaacatttttatctatcagaatgtttattgttgctggttataagcagcaggattggccggctagtgtttcctctcatttccctttgatacagtcaacaagcctgaccctgtaaaatggaggtggaaagacaagctcaagtgttcacaacctggaagtgcttcgggaagaaggggacaatggcagaacaggtgttggtgacaattgtcaccaattggataaagcagctcaggttgtagtgggccattaggaaactgtcggtttgctttgatttccctgggagctgttctctgtcgtgagtgtctcttgtctaaacgtccattaagctgagagtgctatgaagacaggatctagaataatcttgctcacagctgtgctctgagtgcctagcggagttccagcaaacaaaatggactcaagagagatttgattaatgaatcgtaatgaagttggggtttattgtacagtttaaaatgttagatgtttttaattttttaaataaatggaatactttttttttttttttaaagaaagcaactttactgagacaatgtagaaagaagttttgttccgtttctttaatgtggttgaagagcaatgtgtggctgaagacttttgttatgaggagctgcagattagctaggggacagctggaattatgctggcttctgataattattttaaaggggtctgaaatttgtgatggaatcagattttaacagctctcttcaatgacatagaaagttcatggaactcatgtttttaaagggctatgtaaatatatgaacattagaaaaatagcaacttgtgttacaaaaatacaaacacatgttaggaaggtactgtcatgggctaggcatggtggctcacacctgtaatcccagcattttgggaagctaagatgggtggatcacttgaggtcaggagtttgagaccagcctggccaacatggcgaaacccctctctactaaaaatacaaaaatttgccaggcgtggtggcgggtgcctgtaatcccagctacttgggaggctgaggcaagagaatcgcttgaacccaggaggcagaggttgcagtgagccgagatcgtgccattgcactccagcctgggtgacaaagcgagactccatctcaaaaaaaaaaaaaaaaaaaaaggaaagaactgtcatgtaaacataccaacatgtttaaacctgacaatggtgttatttgaaactttatattgttcttgtaagctttaactatatctctctttaaaatgcaaaataatgtcttaagattcaaagtctgtatttttaaagcatggctttggctttgcaaaataaaaaatgtgttttgtacatgaa

SEQ ID NO: 145654 - DNA, 1125 bp, Artificial Sequence
  derived and/or modified sequence
atgagcggcgagagcatgaacttcagcgacgtgttcgacagcagcgaggactacttcgtgagcgtgaacaccagctactacagcgtggacagcgagatgctgctgtgcagcctgcaggaggtgagacagttcagcagactgttcgtgcccatcgcctacagcctgatctgcgtgttcggcctgctgggcaacatcctggtggtgatcaccttcgccttctacaagaaggccagaagcatgaccgacgtgtacctgctgaacatggccatcgccgacatcctgttcgtgctgaccctgcccttctgggccgtgagccacgccaccggcgcctgggtgttcagcaacgccacctgcaagctgctgaagggcatctacgccatcaacttcaactgcggcatgctgctgctgacctgcatcagcatggacagatacatcgccatcgtgcaggccaccaagagcttcagactgagaagcagaaccctgcccagaagcaagatcatctgcctggtggtgtggggcctgagcgtgatcatcagcagcagcaccttcgtgttcaaccagaagtacaacacccagggcagcgacgtgtgcgagcccaagtaccagaccgtgagcgagcccatcagatggaagctgctgatgctgggcctggagctgctgttcggcttcttcatccccctgatgttcatgatcttctgctacaccttcatcgtgaagaccctggtgcaggcccagaacagcaagagacacaaggccatcagagtgatcatcgccgtggtgctggtgttcctggcctgccagatcccccacaacatggtgctgctggtgaccgccgccaacctgggcaagatgaacagaagctgccagagcgagaagctgatcggctacaccaagaccgtgaccgaggtgctggccttcctgcactgctgcctgaaccccgtgctgtacgccttcatcggccagaagttcagaaactacttcctgaagatcctgaaggacctgtggtgcgtgagaagaaagtacaagagcagcggcttcagctgcgccggcagatacagcgagaacatcagcagacagaccagcgagaccgccgacaacgacaacgccagcagcttcaccatgtag

SEQ ID NO: 145655 - protein, 309 aa, Artificial Sequence
  derived and/or modified sequence
MSSTQFNKGPSYGLSAEVKNRLLSKYDPQKEAELRTWIEGLTGLSIGPDFQKGLKDGTILCTLMNKLQPGSVPKINRSMQNWHQLENLSNFIKAMVSYGMNPVDLFEANDLFESGNMTQVQVSLLALAGKAKTKGLQSGVDIGVKYSEKQERNFDDATMKAGQCVIGLQMGTNKCASQSGMTAYGTRRHLYDPKNHILPPMDHSTISLQMGTNKCASQVGMTAPGTRRHIYDTKLGTDKCDNSSMSLQMGYTQGANQSGQVFGLGRQIYDPKYCPQGTVADGAPSGTGDCPDPGEVPEYPPYYQEEAGY

SEQ ID NO: 145656 - protein, 288 aa, Artificial Sequence
  derived and/or modified sequence
MSSTQFNKGPSYGLSAEVKNRLLSKYDPQKKGLKDGTILCTLMNKLQPGSVPKINRSMQNWHQLENLSNFIKAMVSYGMNPVDLFEANDLFESGNMTQVQVSLLALAGKAKTKGLQSGVDIGVKYSEKQERNFDDATMKAGQCVIGLQMGTNKCASQSGMTAYGTRRHLYDPKNHILPPMDHSTISLQMGTNKCASQVGMTAPGTRRHIYDTKLGTDKCDNSSMSLQMGYTQGANQSGQVFGLGRQIYDPKYCPQGTVADGAPSGTGDCPDPGEVPEYPPYYQEEAGY

SEQ ID NO: 145657 - DNA, 930 bp, Artificial Sequence
  derived and/or modified sequence
atgagcagcacccagttcaacaagggccccagctacggcctgagcgccgaggtgaagaacagactgctgagcaagtacgacccccagaaggaggccgagctgagaacctggatcgagggcctgaccggcctgagcatcggccccgacttccagaagggcctgaaggacggcaccatcctgtgcaccctgatgaacaagctgcagcccggcagcgtgcccaagatcaacagaagcatgcagaactggcaccagctggagaacctgagcaacttcatcaaggccatggtgagctacggcatgaaccccgtggacctgttcgaggccaacgacctgttcgagagcggcaacatgacccaggtgcaggtgagcctgctggccctggccggcaaggccaagaccaagggcctgcagagcggcgtggacatcggcgtgaagtacagcgagaagcaggagagaaacttcgacgacgccaccatgaaggccggccagtgcgtgatcggcctgcagatgggcaccaacaagtgcgccagccagagcggcatgaccgcctacggcaccagaagacacctgtacgaccccaagaaccacatcctgccccccatggaccacagcaccatcagcctgcagatgggcaccaacaagtgcgccagccaggtgggcatgaccgcccccggcaccagaagacacatctacgacaccaagctgggcaccgacaagtgcgacaacagcagcatgagcctgcagatgggctacacccagggcgccaaccagagcggccaggtgttcggcctgggcagacagatctacgaccccaagtactgcccccagggcaccgtggccgacggcgcccccagcggcaccggcgactgccccgaccccggcgaggtgcccgagtaccccccctactaccaggaggaggccggctactag

SEQ ID NO: 145658 - DNA, 867 bp, Artificial Sequence
  derived and/or modified sequence
atgagcagcacccagttcaacaagggccccagctacggcctgagcgccgaggtgaagaacagactgctgagcaagtacgacccccagaagaagggcctgaaggacggcaccatcctgtgcaccctgatgaacaagctgcagcccggcagcgtgcccaagatcaacagaagcatgcagaactggcaccagctggagaacctgagcaacttcatcaaggccatggtgagctacggcatgaaccccgtggacctgttcgaggccaacgacctgttcgagagcggcaacatgacccaggtgcaggtgagcctgctggccctggccggcaaggccaagaccaagggcctgcagagcggcgtggacatcggcgtgaagtacagcgagaagcaggagagaaacttcgacgacgccaccatgaaggccggccagtgcgtgatcggcctgcagatgggcaccaacaagtgcgccagccagagcggcatgaccgcctacggcaccagaagacacctgtacgaccccaagaaccacatcctgccccccatggaccacagcaccatcagcctgcagatgggcaccaacaagtgcgccagccaggtgggcatgaccgcccccggcaccagaagacacatctacgacaccaagctgggcaccgacaagtgcgacaacagcagcatgagcctgcagatgggctacacccagggcgccaaccagagcggccaggtgttcggcctgggcagacagatctacgaccccaagtactgcccccagggcaccgtggccgacggcgcccccagcggcaccggcgactgccccgaccccggcgaggtgcccgagtaccccccctactaccaggaggaggccggctactag

SEQ ID NO: 145659 - DNA, 2454 bp, Artificial Sequence
  derived and/or modified sequence
gaaagagtgagagccgcccacgagctctgagcagagagcccgcaggagtgccacgtcccggcggcctcggcccctccctgcctcagtttcccgtggcatcaaagggggcgaggggcccctccaggcctctggtgacgggggtgctgtgcccaggcgggggtccgggggcgaccgagggggctcaggaagtccgcggccgcaggaattcggcgcctccaggccttataaggacatttgcgctccgggccaatcagcggcgggggcgtggcgcgcggagcccggcgcgtcccaaccccgcgccagcccggcggtcccgtcccgtcccgtcctgtgcggccccgtcccgccgcccgcccgccagccatgagctccacgcagttcaacaagggcccctcgtacgggctgtcggccgaggtcaagaaccggctcctgtccaaatatgacccccagaaggaggcagagctccgcacctggatcgagggactcaccggcctctccatcggccccgacttccagaagggcctgaaggatggaactatcttatgcacactcatgaacaagctacagccgggctccgtccccaagatcaaccgctccatgcagaactggcaccagctagaaaacctgtccaacttcatcaaggccatggtcagctacggcatgaaccctgtggacctgttcgaggccaacgacctgtttgagagtgggaacatgacgcaggtgcaggtgtctcttctcgccctggcggggaaggccaagactaaggggctgcagagcggggtggacattggcgtcaagtactcggagaagcaggagcggaatttcgacgatgccaccatgaaggctggccagtgcgtcatcgggctgcagatgggcaccaacaaatgcgccagccagtcgggcatgactgcctacggcacgagaaggcatctctatgaccccaagaaccatatcctgccccccatggaccactcgaccatcagcctccagatgggcacgaacaagtgtgccagccaggtgggcatgacggctcccgggacccggcggcacatctatgataccaagctgggaaccgacaagtgtgacaactcctccatgtccctgcagatgggctacacgcagggcgccaaccagagcggccaggtcttcggcctgggccggcagatatatgaccccaagtactgcccgcaaggcacagtggccgatggggctccctcgggcaccggcgactgcccggacccgggggaggtccctgaatatcccccttactaccaggaggaggccggctactgaggctcccagcacgctctctccccacatcgtctgcccatctgggtttttgggtttttctgtgttttcatcttttttttttttttcttaacccgttcagtgctgccagtcaaccaagggtctgtgagtgtcagcgtgggatcaggcagcagagcttttttcccctttgccttgatccttcgcaaggctgagccactgggctgtgggggaaggggtcaaggccatatcccaatacgtgtagggcgagggtccctgctggcacattcaggctgtgctgggaagaagagacctgggcttggaaggaaccggtccccgacggtttctgcttgcctcgcctcttcccccttttgtcagctgagcagtttgtggtttctatgcccgcaagtttcaggaagtattcacaaaagaaaaatacattttttcccccaggggtggggcaaggacagtggagagagtgctaggaaatgagtcccctgggaaaggggaccgggccgtgatgttaaatatctccggctcccaagtgactggatttgcctaggaccttcagaccaacagacttcagaccctcagacctgccccggggccaggtggagaaagtgagggccgtacaaggaagtgaaattctgagttgttggggctaagcctgaccccctctccatgctccccgccccaacccactctggcctcagtagatttttttttcagttgtggttgttgcccaggctggagtgcagtggcgccatcttggctcactgcacctccaccttccgggctcaagcgattctccagcctcagcctcctgagtagctaggactgcaggtgctccaccacgcccggctaatttttgtatttttagtagagatggggtttccccatgttggccaggctggtctcgaactcctggcctcaggtgtgatccgcccgcctccgcctccccaagcgctgagattacaggtgtgagccaccgtgcccagcccctcagtaggttttaaggagcccccagccctcctcccttctgggcccgaccagcttatactgctccatcttccccggccacatgccccgccaagtactgcacagggaccccccacccaggggacctgctccgtgagataatgtgaaatacgactgtggaccaaacgcaataaaacctctgtttgtacg

SEQ ID NO: 145660 - DNA, 1462 bp, Artificial Sequence
  derived and/or modified sequence
ctgtgcggccccgtcccgccgcccgcccgccagccatgagctccacgcagttcaacaagggcccctcgtacgggctgtcggccgaggtcaagaaccggctcctgtccaaatatgacccccagaagaagggcctgaaggatggaactatcttatgcacactcatgaacaagctacagccgggctccgtccccaagatcaaccgctccatgcagaactggcaccagctagaaaacctgtccaacttcatcaaggccatggtcagctacggcatgaaccctgtggacctgttcgaggccaacgacctgtttgagagtgggaacatgacgcaggtgcaggtgtctcttctcgccctggcggggaaggccaagactaaggggctgcagagcggggtggacattggcgtcaagtactcggagaagcaggagcggaatttcgacgatgccaccatgaaggctggccagtgcgtcatcgggctgcagatgggcaccaacaaatgcgccagccagtcgggcatgactgcctacggcacgagaaggcatctctatgaccccaagaaccatatcctgccccccatggaccactcgaccatcagcctccagatgggcacgaacaagtgtgccagccaggtgggcatgacggctcccgggacccggcggcacatctatgataccaagctgggaaccgacaagtgtgacaactcctccatgtccctgcagatgggctacacgcagggcgccaaccagagcggccaggtcttcggcctgggccggcagatatatgaccccaagtactgcccgcaaggcacagtggccgatggggctccctcgggcaccggcgactgcccggacccgggggaggtccctgaatatcccccttactaccaggaggaggccggctactgaggctcccagcacgctctctccccacatcgtctgcccatctgggtttttgggtttttctgtgttttcatcttttttttttttttcttaacccgttcagtgctgccagtcaaccaagggtctgtgagtgtcagcgtgggatcaggcagcagagcttttttcccctttgccttgatccttcgcaaggctgagccactgggctgtgggggaaggggtcaaggccatatcccaatacgtgtagggcgagggtccctgctggcacattcaggctgtgctgggaagaagagacctgggcttggaaggaaccggtccccgacggtttctgcttgcctcgcctcttcccccttttgtcagctgagcagtttgtggtttctatgcccgcaagtttcaggaagtattcacaaaagaaaaatacattttttcccccaggggtggggcaaggacagtggagagagtgctaggaaatgagtcccctgggaaaggggaccgggccgtgatgttaaatatctccggctcccaagtgactggatttgcctaggaccttcagaccaacagacttcaga

SEQ ID NO: 145661 - DNA, 930 bp, Artificial Sequence
  derived and/or modified sequence
atgtcttctacgcagttcaacaaggggccttcatacggcctgagcgccgaggtcaagaaccggctcctgtctaaatacgacccgcagaaagaggcggaacttcgaacatggattgagggactgaccggcctttccatcgggcccgatttccagaaaggcctgaaagatggtacgatactgtgcacgttgatgaacaaactgcagcctggtagtgttcccaagatcaatagatccatgcaaaattggcaccagctcgaaaacctgtcaaactttattaaagcgatggtttcatatggaatgaaccctgttgatctgttcgaggcaaatgatctcttcgagagcggcaatatgacccaggtgcaggtgtctcttctggctctcgcagggaaggcaaaaacaaaaggcttacagtctggtgttgatataggcgtgaagtatagtgagaagcaggagagaaattttgatgatgcgaccatgaaagccggccagtgcgtaataggactgcaaatgggcacaaacaaatgcgcatcacagtcaggtatgactgcatacggaacccgcaggcatctgtatgatcccaaaaaccatatactgccacccatggaccacagcaccatctccctgcagatgggcacgaacaaatgcgcttctcaggtgggcatgacggcccctggcacaaggagacacatttatgacactaagttgggaactgataagtgcgacaattcttcaatgtctctgcagatgggttatactcagggggcaaaccaatctggacaggtgttcggactggggcggcagatctatgatcctaagtattgccctcagggcactgttgcagacggtgcccccagtggaactggagattgccctgatccaggggaggtccctgaataccctccatactatcaggaagaagccgggtactag

SEQ ID NO: 145662 - DNA, 867 bp, Artificial Sequence
  derived and/or modified sequence
atgtcttcaacgcaattcaataaagggccatcatacggtcttagtgctgaggtgaaaaatcggctcctttccaagtacgaccctcagaagaagggcctgaaggatggcaccattctgtgcaccctgatgaacaagctgcagcccggctctgttccaaagattaatagatcgatgcagaattggcaccagctagaaaacctatccaattttatcaaggcgatggttagttacggcatgaatcccgttgatctgttcgaggcaaatgatttgttcgaatctgggaatatgacgcaagtccaggtgtcattactcgccctagcaggcaaagccaaaactaaggggctgcaatctggagtagacatcggcgtaaagtactccgagaagcaggagcgcaattttgacgatgccactatgaaagccggacagtgtgtgatcgggctgcagatgggcactaataaatgcgctagccagagtggaatgacagcgtacggtacccgccggcacctgtacgaccctaagaaccatatcctgccacccatggatcattcaacaataagcctccagatggggaccaacaagtgtgcatctcaggtagggatgacagctccaggtacacgacgccatatctatgacacaaagctgggcaccgataagtgcgacaattcaagcatgtcactgcagatgggttatacacagggggctaaccagtctggccaggtattcggcctggggaggcagatctatgaccctaaatattgtcctcagggcacagtggctgacggggcaccaagcggaacaggagactgtcctgaccctggagaagttcctgaatatcctccgtactatcaggaagaagcaggatattag

SEQ ID NO: 145663 - DNA, 930 bp, Artificial Sequence
  derived and/or modified sequence
atgagcagcacccagttcaacaagggccccagctatggcctgtctgctgaggtgaagaaccggctgctgagcaaatatgacccccagaaggaggccgagctgcggacctggattgagggcctgaccggcctgagcatcggccctgacttccagaagggcctgaaggatggcaccatcctgtgcaccctgatgaacaagctgcagcccggctctgtgcccaagatcaacagatccatgcagaactggcaccagctggagaacctgagcaacttcatcaaggccatggtgtcctatggcatgaaccctgtggacctgtttgaggccaatgacctgtttgagagcggcaacatgacccaggtgcaggtgtccctgctggccctggccggcaaggccaagaccaagggcctgcagagcggcgtggacatcggcgtgaagtacagcgagaagcaggagaggaactttgatgatgccaccatgaaggccggccagtgtgtgattggcctgcagatgggcaccaacaagtgtgccagccagagcggcatgacagcctacggcaccaggaggcacctgtatgaccccaagaaccacatcctgccccccatggaccacagcaccatcagcctgcagatgggcaccaacaagtgtgccagccaggtgggcatgacagcccctggcaccaggaggcacatctatgacaccaagctgggcacagacaagtgtgacaacagctccatgagcctgcagatgggctacacccagggcgccaaccagagcggccaggtgtttggcctgggccggcagatctatgaccccaagtactgcccccagggcaccgtggctgatggagcccccagcggcactggagactgcccagaccctggagaggtgcctgagtacccaccctactaccaggaggaggccggctactag

SEQ ID NO: 145664 - DNA, 867 bp, Artificial Sequence
  derived and/or modified sequence
atgagcagcacccagttcaacaagggccccagctatggcctgtctgctgaggtgaagaaccggctgctgagcaaatatgacccccagaagaagggcctgaaggatggcaccatcctgtgcaccctgatgaacaagctgcagcccggctctgtgcccaagatcaacagatccatgcagaactggcaccagctggagaacctgagcaacttcatcaaggccatggtgtcctatggcatgaaccctgtggacctgtttgaggccaatgacctgtttgaaagtggcaacatgacccaggtgcaggtgtccctgctggccctggccggcaaggccaagaccaagggcctgcagagcggcgtggacattggagtgaagtacagcgagaagcaggagaggaactttgatgatgccaccatgaaggccggccagtgtgtgattggcctgcagatgggcaccaacaagtgtgccagccagagcggcatgacagcctacggcacccggcggcacctgtatgaccccaagaaccacatcctgccccccatggaccacagcaccatcagcctgcagatgggcaccaacaagtgtgccagccaggtgggcatgacagcccctggcacccggcggcacatctatgacaccaagctgggcacagacaagtgtgacaacagctccatgagcctgcagatgggctacacccagggcgccaaccagagcggccaggtgtttggcctgggccggcagatctatgaccccaagtactgcccccagggcaccgtggctgatggagcccccagcggcaccggggactgcccagaccccggggaggtgcctgagtacccaccctactaccaggaggaggccggctactag

SEQ ID NO: 145665 - DNA, 930 bp, Artificial Sequence
  derived and/or modified sequence
atgagcagcacccagttcaacaagggccccagctacggcctgagcgcagaagtaaaaaatcgactgctgtctaaatacgatccacagaaggaggccgagctgcgcacttggattgagggacttaccggcctgagcattggtcccgattttcaaaaaggcttgaaagatggaacaatcctttgtactctcatgaataagctgcagccagggagcgtgcccaagatcaatcggtctatgcagaattggcaccaactcgaaaatctctccaactttatcaaggccatggtgtcatacggcatgaaccctgtcgacttattcgaggctaacgatttgtttgagtcagggaatatgacgcaggtgcaggtgagcttactggccctggctggtaaggctaagactaaagggttgcagtctggcgtggatattggcgtaaagtattccgaaaaacaggaacgaaactttgacgacgccactatgaaagcaggccaatgcgttatcggtcttcaaatggggaccaacaagtgcgcctcccagagcggaatgactgcctatggcacacggaggcacttgtatgatcctaaaaatcacatcctgcctcccatggaccactcaacaatctccctgcagatggggactaacaagtgtgccagccaggtgggcatgacggccccaggcacccgccggcacatctacgacactaagctagggacggataagtgtgacaacagctctatgtctttgcaaatgggatacactcagggcgctaaccagagcggacaagtgttcggactggggagacaaatctatgacccaaagtattgtcctcagggtacagtggccgatggcgccccatcaggaaccggtgattgcccagaccccggcgaggttcctgagtacccgccttactaccaggaggaggcgggctattag

SEQ ID NO: 145666 - DNA, 867 bp, Artificial Sequence
  derived and/or modified sequence
atgagcagcacccagttcaacaagggccccagctacggcctgagcgcggaggtgaaaaatcggctcttatcaaaatatgaccctcaaaagaaggggctaaaggacggcactatcctttgcaccctgatgaataagctgcagcccggcagcgtcccaaaaataaacaggtcaatgcaaaattggcaccagctagagaacctgtccaactttatcaaagctatggtgtcctacggcatgaatcctgtggacctgttcgaagccaacgatttgttcgagtctggcaatatgactcaggtccaggtgtcattgcttgccctggctggaaaggcgaagacaaagggcctccagtccggtgtggacattggcgtgaaatattccgagaagcaggaacgcaatttcgacgacgcaacaatgaaggctgggcagtgtgtgatcggtttgcagatgggaaccaataaatgtgccagccagagtggaatgaccgcatacggcacacgccgacacctgtatgacccgaagaatcacattctaccgccaatggaccacagcacaatctcgctgcagatgggtactaataagtgcgcatctcaagtgggcatgacggctcctggcacccggcgacatatctatgacactaaacttgggactgacaagtgtgacaacagcagcatgagtcttcagatggggtatacacagggggctaaccagagtggtcaggtgtttgggctggggcggcagatctatgatcccaaatattgccctcagggcaccgttgcagatggagctcccagtgggacaggagattgtccggaccccggggaagtgccggaatatcccccttactaccaggaagaagccgggtactag

SEQ ID NO: 145667 - DNA, 930 bp, Artificial Sequence
  derived and/or modified sequence
atgtctagcacccaatttaacaaaggaccatcttatggcctatctgcagaagtgaaaaatcgcctgctctcaaaatacgacccacaaaaggaagcggagttgcgcacgtggatcgaggggcttacgggactgtcaattggtccggactttcaaaaggggttaaaggacggtaccatactgtgtaccctcatgaataaattgcagcctggcagtgtacctaaaataaataggagtatgcagaattggcatcagctggagaacttgtcaaactttattaaggcaatggtatcctacgggatgaatcccgtggatctgtttgaagctaacgacttgttcgagagcggcaacatgacccaggtgcaggtctctctgctagctctggccggaaaagcaaagaccaagggtctgcagtccggcgttgacatcggcgtcaaatatagcgaaaagcaggagagaaactttgatgatgccaccatgaaagctggacagtgtgtgatcggtttacagatggggaccaataaatgcgcctcacagtctggcatgacagcatacggcacccggaggcatctttatgaccccaagaaccacatactgcccccaatggatcactcgactattagtctccagatggggacgaacaaatgtgcctctcaggtggggatgaccgccccagggacccgccgacacatatacgacacgaagctgggtaccgataaatgcgataatagctctatgtctttgcagatgggctacactcaaggcgctaaccagtctggacaggtctttggtctggggcgtcagatctacgatccaaaatactgtccacaggggaccgttgccgatggggctcctagtgggacaggggactgtcctgatcctggggaagtgcctgagtatcctccatattaccaggaggaagccggatattag

SEQ ID NO: 145668 - DNA, 867 bp, Artificial Sequence
  derived and/or modified sequence
atgtctagcactcagtttaacaaggggccatcatatggtctgagcgctgaagtgaagaaccgcctgctttccaagtacgatccacagaagaaaggactgaaggacgggacaattctgtgcaccctgatgaataagcttcaacccggatccgttcctaaaatcaatagaagtatgcagaactggcatcagctggaaaacctgagcaatttcattaaggctatggtgagttacgggatgaaccccgtggacctgttcgaagctaatgatctgtttgagtctgggaatatgacccaggtgcaggtgtcactgttagcactggcaggaaaggccaagaccaagggactgcagagcggggtcgatatcggagtgaaatattctgagaaacaggaacgcaatttcgacgatgccactatgaaagccggacagtgtgtgatcggactgcagatggggacaaataagtgcgcttcacagtccgggatgaccgcttacggcacccgcagacatctgtacgacccaaaaaatcacattctgcctccaatggaccactctaccatttccctgcagatggggacgaataagtgcgcttctcaggtcggcatgaccgcacctggcacccgacgccacatctacgataccaagttaggcaccgacaagtgcgacaacagtagcatgagtcttcagatgggatatacccagggtgcaaaccagtcaggccaggtgttcggtctgggacggcagatctatgacccaaagtactgtccccagggaacggtggcagacggcgctccttctggaacaggagactgcccggaccctggggaagttcccgaataccccccatactaccaggaagaggccggttattag

SEQ ID NO: 145669 - protein, 33 aa, Artificial Sequence
  derived and/or modified sequence
KGKKGKKGKKGKKGKKGKKGKKGKKGKKGKKGK

SEQ ID NO: 145670 - protein, 3177 aa, Artificial Sequence
  derived and/or modified sequence
MRKHRHLPLVAVFCLFLSGFPTTHAQQQQADVKNGAAADIIFLVDSSWTIGEEHFQLVREFLYDVVKSLAVGENDFHFALVQFNGNPHTEFLLNTYRTKQEVLSHISNMSYIGGTNQTGKGLEYIMQSHLTKAAGSRAGDGVPQVIVVLTDGHSKDGLALPSAELKSADVNVFAIGVEDADEGALKEIASEPLNMHMFNLENFTSLHDIVGNLVSCVHSSVSPERAGDTETLKDITAQDSADIIFLIDGSNNTGSVNFAVILDFLVNLLEKLPIGTQQIRVGVVQFSDEPRTMFSLDTYSTKAQVLGAVKALGFAGGELANIGLALDFVVENHFTRAGGSRVEEGVPQVLVLISAGPSSDEIRYGVVALKQASVFSFGLGAQAASRAELQHIATDDNLVFTVPEFRSFGDLQEKLLPYIVGVAQRHIVLKPPTIVTQVIEVNKRDIVFLVDGSSALGLANFNAIRDFIAKVIQRLEIGQDLIQVAVAQYADTVRPEFYFNTHPTKREVITAVRKMKPLDGSALYTGSALDFVRNNLFTSSAGYRAAEGIPKLLVLITGGKSLDEISQPAQELKRSSIMAFAIGNKGADQAELEEIAFDSSLVFIPAEFRAAPLQGMLPGLLAPLRTLSGTPEVHSNKRDIIFLLDGSANVGKTNFPYVRDFVMNLVNSLDIGNDNIRVGLVQFSDTPVTEFSLNTYQTKSDILGHLRQLQLQGGSGLNTGSALSYVYANHFTEAGGSRIREHVPQLLLLLTAGQSEDSYLQAANALTRAGILTFCVGASQANKAELEQIAFNPSLVYLMDDFSSLPALPQQLIQPLTTYVSGGVEEVPLAQPESKRDILFLFDGSANLVGQFPVVRDFLYKIIDELNVKPEGTRIAVAQYSDDVKVESRFDEHQSKPEILNLVKRMKIKTGKALNLGYALDYAQRYIFVKSAGSRIEDGVLQFLVLLVAGRSSDRVDGPASNLKQSGVVPFIFQAKNADPAELEQIVLSPAFILAAESLPKIGDLHPQIVNLLKSVHNGAPAPVSGEKDVVFLLDGSEGVRSGFPLLKEFVQRVVESLDVGQDRVRVAVVQYSDRTRPEFYLNSYMNKQDVVNAVRQLTLLGGPTPNTGAALEFVLRNILVSSAGSRITEGVPQLLIVLTADRSGDDVRNPSVVVKRGGAVPIGIGIGNADITEMQTISFIPDFAVAIPTFRQLGTVQQVISERVTQLTREELSRLQPVLQPLPSPGVGGKRDVVFLIDGSQSAGPEFQYVRTLIERLVDYLDVGFDTTRVAVIQFSDDPKVEFLLNAHSSKDEVQNAVQRLRPKGGRQINVGNALEYVSRNIFKRPLGSRIEEGVPQFLVLISSGKSDDEVDDPAVELKQFGVAPFTIARNADQEELVKISLSPEYVFSVSTFRELPSLEQKLLTPITTLTSEQIQKLLASTRYPPPAVESDAADIVFLIDSSEGVRPDGFAHIRDFVSRIVRRLNIGPSKVRVGVVQFSNDVFPEFYLKTYRSQAPVLDAIRRLRLRGGSPLNTGKALEFVARNLFVKSAGSRIEDGVPQHLVLVLGGKSQDDVSRFAQVIRSSGIVSLGVGDRNIDRTELQTITNDPRLVFTVREFRELPNIEERIMNSFGPSAATPAPPGVDTPPPSRPEKKKADIVFLLDGSINFRRDSFQEVLRFVSEIVDTVYEDGDSIQVGLVQYNSDPTDEFFLKDFSTKRQIIDAINKVVYKGGRHANTKVGLEHLRVNHFVPEAGSRLDQRVPQIAFVITGGKSVEDAQDVSLALTQRGVKVFAVGVRNIDSEEVGKIASNSATAFRVGNVQELSELSEQVLETLHDAMHETLCPGVTDAAKACNLDVILGFDGSRDQNVFVAQKGFESKVDAILNRISQMHRVSCSGGRSPTVRVSVVANTPSGPVEAFDFDEYQPEMLEKFRNMRSQHPYVLTEDTLKVYLNKFRQSSPDSVKVVIHFTDGADGDLADLHRASENLRQEGVRALILVGLERVVNLERLMHLEFGRGFMYDRPLRLNLLDLDYELAEQLDNIAEKACCGVPCKCSGQRGDRGPIGSIGPKGIPGEDGYRGYPGDEGGPGERGPPGVNGTQGFQGCPGQRGVKGSRGFPGEKGEVGEIGLDGLDGEDGDKGLPGSSGEKGNPGRRGDKGPRGEKGERGDVGIRGDPGNPGQDSQERGPKGETGDLGPMGVPGRDGVPGGPGETGKNGGFGRRGPPGAKGNKGGPGQPGFEGEQGTRGAQGPAGPAGPPGLIGEQGISGPRGSGGAAGAPGERGRTGPLGRKGEPGEPGPKGGIGNRGPRGETGDDGRDGVGSEGRRGKKGERGFPGYPGPKGNPGEPGLNGTTGPKGIRGRRGNSGPPGIVGQKGDPGYPGPAGPKGNRGDSIDQCALIQSIKDKCPCCYGPLECPVFPTELAFALDTSEGVNQDTFGRMRDVVLSIVNDLTIAESNCPRGARVAVVTYNNEVTTEIRFADSKRKSVLLDKIKNLQVALTSKQQSLETAMSFVARNTFKRVRNGFLMRKVAVFFSNTPTRASPQLREAVLKLSDAGITPLFLTRQEDRQLINALQINNTAVGHALVLPAGRDLTDFLENVLTCHVCLDICNIDPSCGFGSWRPSFRDRRAAGSDVDIDMAFILDSAETTTLFQFNEMKKYIAYLVRQLDMSPDPKASQHFARVAVVQHAPSESVDNASMPPVKVEFSLTDYGSKEKLVDFLSRGMTQLQGTRALGSAIEYTIENVFESAPNPRDLKIVVLMLTGEVPEQQLEEAQRVILQAKCKGYFFVVLGIGRKVNIKEVYTFASEPNDVFFKLVDKSTELNEEPLMRFGRLLPSFVSSENAFYLSPDIRKQCDWFQGDQPTKNLVKFGHKQVNVPNNVTSSPTSNPVTTTKPVTTTKPVTTTTKPVTTTTKPVTIINQPSVKPAAAKPAPAKPVAAKPVATKMATVRPPVAVKPATAAKPVAAKPAAVRPPAAAAAKPVATKPEVPRPQAAKPAATKPATTKPMVKMSREVQVFEITENSAKLHWERAEPPGPYFYDLTVTSAHDQSLVLKQNLTVTDRVIGGLLAGQTYHVAVVCYLRSQVRATYHGSFSTKKSQPPPPQPARSASSSTINLMVSTEPLALTETDICKLPKDEGTCRDFILKWYYDPNTKSCARFWYGGCGGNENKFGSQKECEKVCAPVLAKPGVISVMGT

SEQ ID NO: 145671 - DNA, 9534 bp, Artificial Sequence
  derived and/or modified sequence
atgagaaagcacagacacctgcccctggtggccgtgttctgcctgttcctgagcggcttccccaccacccacgcccagcagcagcaggccgacgtgaagaacggcgccgccgccgacatcatcttcctggtggacagcagctggaccatcggcgaggagcacttccagctggtgagagagttcctgtacgacgtggtgaagagcctggccgtgggcgagaacgacttccacttcgccctggtgcagttcaacggcaacccccacaccgagttcctgctgaacacctacagaaccaagcaggaggtgctgagccacatcagcaacatgagctacatcggcggcaccaaccagaccggcaagggcctggagtacatcatgcagagccacctgaccaaggccgccggcagcagagccggcgacggcgtgccccaggtgatcgtggtgctgaccgacggccacagcaaggacggcctggccctgcccagcgccgagctgaagagcgccgacgtgaacgtgttcgccatcggcgtggaggacgccgacgagggcgccctgaaggagatcgccagcgagcccctgaacatgcacatgttcaacctggagaacttcaccagcctgcacgacatcgtgggcaacctggtgagctgcgtgcacagcagcgtgagccccgagagagccggcgacaccgagaccctgaaggacatcaccgcccaggacagcgccgacatcatcttcctgatcgacggcagcaacaacaccggcagcgtgaacttcgccgtgatcctggacttcctggtgaacctgctggagaagctgcccatcggcacccagcagatcagagtgggcgtggtgcagttcagcgacgagcccagaaccatgttcagcctggacacctacagcaccaaggcccaggtgctgggcgccgtgaaggccctgggcttcgccggcggcgagctggccaacatcggcctggccctggacttcgtggtggagaaccacttcaccagagccggcggcagcagagtggaggagggcgtgccccaggtgctggtgctgatcagcgccggccccagcagcgacgagatcagatacggcgtggtggccctgaagcaggccagcgtgttcagcttcggcctgggcgcccaggccgccagcagagccgagctgcagcacatcgccaccgacgacaacctggtgttcaccgtgcccgagttcagaagcttcggcgacctgcaggagaagctgctgccctacatcgtgggcgtggcccagagacacatcgtgctgaagccccccaccatcgtgacccaggtgatcgaggtgaacaagagagacatcgtgttcctggtggacggcagcagcgccctgggcctggccaacttcaacgccatcagagacttcatcgccaaggtgatccagagactggagatcggccaggacctgatccaggtggccgtggcccagtacgccgacaccgtgagacccgagttctacttcaacacccaccccaccaagagagaggtgatcaccgccgtgagaaagatgaagcccctggacggcagcgccctgtacaccggcagcgccctggacttcgtgagaaacaacctgttcaccagcagcgccggctacagagccgccgagggcatccccaagctgctggtgctgatcaccggcggcaagagcctggacgagatcagccagcccgcccaggagctgaagagaagcagcatcatggccttcgccatcggcaacaagggcgccgaccaggccgagctggaggagatcgccttcgacagcagcctggtgttcatccccgccgagttcagagccgcccccctgcagggcatgctgcccggcctgctggcccccctgagaaccctgagcggcacccccgaggtgcacagcaacaagagagacatcatcttcctgctggacggcagcgccaacgtgggcaagaccaacttcccctacgtgagagacttcgtgatgaacctggtgaacagcctggacatcggcaacgacaacatcagagtgggcctggtgcagttcagcgacacccccgtgaccgagttcagcctgaacacctaccagaccaagagcgacatcctgggccacctgagacagctgcagctgcagggcggcagcggcctgaacaccggcagcgccctgagctacgtgtacgccaaccacttcaccgaggccggcggcagcagaatcagagagcacgtgccccagctgctgctgctgctgaccgccggccagagcgaggacagctacctgcaggccgccaacgccctgaccagagccggcatcctgaccttctgcgtgggcgccagccaggccaacaaggccgagctggagcagatcgccttcaaccccagcctggtgtacctgatggacgacttcagcagcctgcccgccctgccccagcagctgatccagcccctgaccacctacgtgagcggcggcgtggaggaggtgcccctggcccagcccgagagcaagagagacatcctgttcctgttcgacggcagcgccaacctggtgggccagttccccgtggtgagagacttcctgtacaagatcatcgacgagctgaacgtgaagcccgagggcaccagaatcgccgtggcccagtacagcgacgacgtgaaggtggagagcagattcgacgagcaccagagcaagcccgagatcctgaacctggtgaagagaatgaagatcaagaccggcaaggccctgaacctgggctacgccctggactacgcccagagatacatcttcgtgaagagcgccggcagcagaatcgaggacggcgtgctgcagttcctggtgctgctggtggccggcagaagcagcgacagagtggacggccccgccagcaacctgaagcagagcggcgtggtgcccttcatcttccaggccaagaacgccgaccccgccgagctggagcagatcgtgctgagccccgccttcatcctggccgccgagagcctgcccaagatcggcgacctgcacccccagatcgtgaacctgctgaagagcgtgcacaacggcgcccccgcccccgtgagcggcgagaaggacgtggtgttcctgctggacggcagcgagggcgtgagaagcggcttccccctgctgaaggagttcgtgcagagagtggtggagagcctggacgtgggccaggacagagtgagagtggccgtggtgcagtacagcgacagaaccagacccgagttctacctgaacagctacatgaacaagcaggacgtggtgaacgccgtgagacagctgaccctgctgggcggccccacccccaacaccggcgccgccctggagttcgtgctgagaaacatcctggtgagcagcgccggcagcagaatcaccgagggcgtgccccagctgctgatcgtgctgaccgccgacagaagcggcgacgacgtgagaaaccccagcgtggtggtgaagagaggcggcgccgtgcccatcggcatcggcatcggcaacgccgacatcaccgagatgcagaccatcagcttcatccccgacttcgccgtggccatccccaccttcagacagctgggcaccgtgcagcaggtgatcagcgagagagtgacccagctgaccagagaggagctgagcagactgcagcccgtgctgcagcccctgcccagccccggcgtgggcggcaagagagacgtggtgttcctgatcgacggcagccagagcgccggccccgagttccagtacgtgagaaccctgatcgagagactggtggactacctggacgtgggcttcgacaccaccagagtggccgtgatccagttcagcgacgaccccaaggtggagttcctgctgaacgcccacagcagcaaggacgaggtgcagaacgccgtgcagagactgagacccaagggcggcagacagatcaacgtgggcaacgccctggagtacgtgagcagaaacatcttcaagagacccctgggcagcagaatcgaggagggcgtgccccagttcctggtgctgatcagcagcggcaagagcgacgacgaggtggacgaccccgccgtggagctgaagcagttcggcgtggcccccttcaccatcgccagaaacgccgaccaggaggagctggtgaagatcagcctgagccccgagtacgtgttcagcgtgagcaccttcagagagctgcccagcctggagcagaagctgctgacccccatcaccaccctgaccagcgagcagatccagaagctgctggccagcaccagataccccccccccgccgtggagagcgacgccgccgacatcgtgttcctgatcgacagcagcgagggcgtgagacccgacggcttcgcccacatcagagacttcgtgagcagaatcgtgagaagactgaacatcggccccagcaaggtgagagtgggcgtggtgcagttcagcaacgacgtgttccccgagttctacctgaagacctacagaagccaggcccccgtgctggacgccatcagaagactgagactgagaggcggcagccccctgaacaccggcaaggccctggagttcgtggccagaaacctgttcgtgaagagcgccggcagcagaatcgaggacggcgtgccccagcacctggtgctggtgctgggcggcaagagccaggacgacgtgagcagattcgcccaggtgatcagaagcagcggcatcgtgagcctgggcgtgggcgacagaaacatcgacagaaccgagctgcagaccatcaccaacgaccccagactggtgttcaccgtgagagagttcagagagctgcccaacatcgaggagagaatcatgaacagcttcggccccagcgccgccacccccgccccccccggcgtggacacccccccccccagcagacccgagaagaagaaggccgacatcgtgttcctgctggacggcagcatcaacttcagaagagacagcttccaggaggtgctgagattcgtgagcgagatcgtggacaccgtgtacgaggacggcgacagcatccaggtgggcctggtgcagtacaacagcgaccccaccgacgagttcttcctgaaggacttcagcaccaagagacagatcatcgacgccatcaacaaggtggtgtacaagggcggcagacacgccaacaccaaggtgggcctggagcacctgagagtgaaccacttcgtgcccgaggccggcagcagactggaccagagagtgccccagatcgccttcgtgatcaccggcggcaagagcgtggaggacgcccaggacgtgagcctggccctgacccagagaggcgtgaaggtgttcgccgtgggcgtgagaaacatcgacagcgaggaggtgggcaagatcgccagcaacagcgccaccgccttcagagtgggcaacgtgcaggagctgagcgagctgagcgagcaggtgctggagaccctgcacgacgccatgcacgagaccctgtgccccggcgtgaccgacgccgccaaggcctgcaacctggacgtgatcctgggcttcgacggcagcagagaccagaacgtgttcgtggcccagaagggcttcgagagcaaggtggacgccatcctgaacagaatcagccagatgcacagagtgagctgcagcggcggcagaagccccaccgtgagagtgagcgtggtggccaacacccccagcggccccgtggaggccttcgacttcgacgagtaccagcccgagatgctggagaagttcagaaacatgagaagccagcacccctacgtgctgaccgaggacaccctgaaggtgtacctgaacaagttcagacagagcagccccgacagcgtgaaggtggtgatccacttcaccgacggcgccgacggcgacctggccgacctgcacagagccagcgagaacctgagacaggagggcgtgagagccctgatcctggtgggcctggagagagtggtgaacctggagagactgatgcacctggagttcggcagaggcttcatgtacgacagacccctgagactgaacctgctggacctggactacgagctggccgagcagctggacaacatcgccgagaaggcctgctgcggcgtgccctgcaagtgcagcggccagagaggcgacagaggccccatcggcagcatcggccccaagggcatccccggcgaggacggctacagaggctaccccggcgacgagggcggccccggcgagagaggcccccccggcgtgaacggcacccagggcttccagggctgccccggccagagaggcgtgaagggcagcagaggcttccccggcgagaagggcgaggtgggcgagatcggcctggacggcctggacggcgaggacggcgacaagggcctgcccggcagcagcggcgagaagggcaaccccggcagaagaggcgacaagggccccagaggcgagaagggcgagagaggcgacgtgggcatcagaggcgaccccggcaaccccggccaggacagccaggagagaggccccaagggcgagaccggcgacctgggccccatgggcgtgcccggcagagacggcgtgcccggcggccccggcgagaccggcaagaacggcggcttcggcagaagaggcccccccggcgccaagggcaacaagggcggccccggccagcccggcttcgagggcgagcagggcaccagaggcgcccagggccccgccggccccgccggcccccccggcctgatcggcgagcagggcatcagcggccccagaggcagcggcggcgccgccggcgcccccggcgagagaggcagaaccggccccctgggcagaaagggcgagcccggcgagcccggccccaagggcggcatcggcaacagaggccccagaggcgagaccggcgacgacggcagagacggcgtgggcagcgagggcagaagaggcaagaagggcgagagaggcttccccggctaccccggccccaagggcaaccccggcgagcccggcctgaacggcaccaccggccccaagggcatcagaggcagaagaggcaacagcggcccccccggcatcgtgggccagaagggcgaccccggctaccccggccccgccggccccaagggcaacagaggcgacagcatcgaccagtgcgccctgatccagagcatcaaggacaagtgcccctgctgctacggccccctggagtgccccgtgttccccaccgagctggccttcgccctggacaccagcgagggcgtgaaccaggacaccttcggcagaatgagagacgtggtgctgagcatcgtgaacgacctgaccatcgccgagagcaactgccccagaggcgccagagtggccgtggtgacctacaacaacgaggtgaccaccgagatcagattcgccgacagcaagagaaagagcgtgctgctggacaagatcaagaacctgcaggtggccctgaccagcaagcagcagagcctggagaccgccatgagcttcgtggccagaaacaccttcaagagagtgagaaacggcttcctgatgagaaaggtggccgtgttcttcagcaacacccccaccagagccagcccccagctgagagaggccgtgctgaagctgagcgacgccggcatcacccccctgttcctgaccagacaggaggacagacagctgatcaacgccctgcagatcaacaacaccgccgtgggccacgccctggtgctgcccgccggcagagacctgaccgacttcctggagaacgtgctgacctgccacgtgtgcctggacatctgcaacatcgaccccagctgcggcttcggcagctggagacccagcttcagagacagaagagccgccggcagcgacgtggacatcgacatggccttcatcctggacagcgccgagaccaccaccctgttccagttcaacgagatgaagaagtacatcgcctacctggtgagacagctggacatgagccccgaccccaaggccagccagcacttcgccagagtggccgtggtgcagcacgcccccagcgagagcgtggacaacgccagcatgccccccgtgaaggtggagttcagcctgaccgactacggcagcaaggagaagctggtggacttcctgagcagaggcatgacccagctgcagggcaccagagccctgggcagcgccatcgagtacaccatcgagaacgtgttcgagagcgcccccaaccccagagacctgaagatcgtggtgctgatgctgaccggcgaggtgcccgagcagcagctggaggaggcccagagagtgatcctgcaggccaagtgcaagggctacttcttcgtggtgctgggcatcggcagaaaggtgaacatcaaggaggtgtacaccttcgccagcgagcccaacgacgtgttcttcaagctggtggacaagagcaccgagctgaacgaggagcccctgatgagattcggcagactgctgcccagcttcgtgagcagcgagaacgccttctacctgagccccgacatcagaaagcagtgcgactggttccagggcgaccagcccaccaagaacctggtgaagttcggccacaagcaggtgaacgtgcccaacaacgtgaccagcagccccaccagcaaccccgtgaccaccaccaagcccgtgaccaccaccaagcccgtgaccaccaccaccaagcccgtgaccaccaccaccaagcccgtgaccatcatcaaccagcccagcgtgaagcccgccgccgccaagcccgcccccgccaagcccgtggccgccaagcccgtggccaccaagatggccaccgtgagaccccccgtggccgtgaagcccgccaccgccgccaagcccgtggccgccaagcccgccgccgtgagaccccccgccgccgccgccgccaagcccgtggccaccaagcccgaggtgcccagaccccaggccgccaagcccgccgccaccaagcccgccaccaccaagcccatggtgaagatgagcagagaggtgcaggtgttcgagatcaccgagaacagcgccaagctgcactgggagagagccgagccccccggcccctacttctacgacctgaccgtgaccagcgcccacgaccagagcctggtgctgaagcagaacctgaccgtgaccgacagagtgatcggcggcctgctggccggccagacctaccacgtggccgtggtgtgctacctgagaagccaggtgagagccacctaccacggcagcttcagcaccaagaagagccagcccccccccccccagcccgccagaagcgccagcagcagcaccatcaacctgatggtgagcaccgagcccctggccctgaccgagaccgacatctgcaagctgcccaaggacgagggcacctgcagagacttcatcctgaagtggtactacgaccccaacaccaagagctgcgccagattctggtacggcggctgcggcggcaacgagaacaagttcggcagccagaaggagtgcgagaaggtgtgcgcccccgtgctggccaagcccggcgtgatcagcgtgatgggcacctag

SEQ ID NO: 145672 - DNA, 9534 bp, Artificial Sequence
  derived and/or modified sequence
atgagaaagcacagacacttgccgttggtggcagtgttttgtctgttcctgtccgggtttcccaccacccacgcacagcaacagcaggcagatgtgaagaacggagcagctgctgacattattttcttagtggatagctcgtggacgattggtgaggagcattttcagctggtcagggagttcctgtacgacgtggtgaaatcactcgctgtcggcgagaatgacttccacttcgctctggtccagttcaatggaaacccacacaccgaatttctgcttaacacttacagaacaaagcaagaggtgctctcccacatttcaaatatgtcatacatcgggggaaccaatcaaacaggaaaaggcctggaatacatcatgcagtcccaccttacgaaagccgccggatccagggcaggcgatggggtcccacaagtgattgtggtgctcaccgacggccactctaaagacggtctggcactaccgtccgccgaactcaagtcagccgacgttaacgtttttgcgatcggagtcgaggatgccgatgagggcgccctgaaggaaattgccagcgaaccactgaacatgcatatgtttaaccttgaaaatttcacctccctccatgacattgtggggaatcttgtgagctgcgttcactccagtgtgtctcccgaaagagcgggggacaccgagacgctcaaagatatcacggcacaggatagcgccgatatcatctttttgattgacggtagcaacaacaccgggagtgtgaactttgctgtgatcctggactttctggtgaacctcctcgaaaaattgccaatcggaacccaacagattcgcgtcggagtggttcagttttccgacgagccacgcactatgttctcccttgatacctattccaccaaggcacaggtgctgggagccgtgaaggctctcggcttcgctgggggtgagttagcaaatataggacttgccctcgattttgtagtggaaaatcacttcacacgagcggggggaagccgggtggaggaaggggtgcctcaggttctcgtactaatctctgccgggccctcaagcgatgaaataagatacggcgttgtggccctgaagcaggcaagtgtgtttagtttcggcctgggggcacaagctgcttcccgcgccgagctacagcacatagctaccgatgataacttagtgttcaccgtgccagagttccggagcttcggagacctgcaagaaaaactgctcccctatatagtaggcgtggcgcagaggcacatagtcctgaagccaccaaccatcgtgacgcaagtgatcgaagtgaataagagagatattgtctttctggtggacggaagtagcgcactcggattggctaatttcaatgctattcgcgatttcatagcaaaggtaatacagcgactcgaaattggtcaggatctcattcaggtggcagttgcacagtacgccgacacggtgaggcccgagttttattttaatacgcacccaaccaagcgtgaagtgattactgcagtccggaaaatgaagcctctggatggcagcgcgctgtacacagggagcgctcttgattttgtaagaaacaacctcttcacctccagcgcaggatatagggccgctgagggcatccccaagctgcttgtgctcatcaccgggggcaaatctctcgatgaaatatcacagcccgcccaggaactgaaaagaagcagtatcatggcttttgctattggaaataagggtgcagaccaggccgaactcgaagaaatcgcctttgattcctccttggtctttattccagctgagttccgggcggcacctctgcaggggatgctgcccggtcttctggcaccgcttcgtaccctgtccggaaccccagaagtccactctaataaacgcgatataatctttttgctggacgggtccgccaacgtgggcaaaacaaattttccttacgtgcgcgacttcgtcatgaatttggttaattcactggatattggtaatgataacataagagttgggttagtgcagttctccgatacacccgtcaccgagttctccctgaatacttaccagacaaagagcgatatcctcggtcatctcaggcaactccagctgcaaggcgggtcagggctgaacactgggtccgcactaagttacgtatacgcaaaccatttcaccgaggccggcggcagtaggattcgcgaacacgtgcctcaactccttctgctgctcacagccggtcaaagtgaagattcttacttgcaagccgccaacgccctgacgagagccggtatcttaactttctgtgtgggggcctcccaggccaataaggcggagttagagcagatagcctttaacccttcactggtctatcttatggatgatttttcctcactgcccgccctcccccagcagctcatccagccccttaccacatacgtgagcggcggcgtggaggaggtgcctttagcgcagccagagagcaaaagagatattctatttctctttgacggctccgctaatctggtcggtcagtttccagtggtgcgcgacttcctgtataaaatcatagacgaacttaacgtcaagcccgagggcacacggatagccgtagctcagtactctgatgatgtcaaggtggagagccgatttgatgagcaccagtcaaagcccgaaatcctgaatcttgtgaagaggatgaagatcaagacaggaaaggcccttaacctgggctatgcgcttgattatgcccagaggtacatattcgttaaaagcgccgggtccagaatcgaggacggagtgttgcaatttctagttttgctggtcgccggtcgctcctccgatagggtagatggccctgcgtctaatttaaagcagtcaggcgtggtgccatttatctttcaggctaagaatgccgatcccgccgaactggaacagatagtcctgtcacccgcatttatcctcgctgctgaaagccttccgaaaatcggtgatctccacccccagatcgtgaatctgctgaagagcgtccacaacggggccccagcacctgtttctggcgagaaagatgttgtgttcctgctggatggatccgagggcgtccgcagcggatttccactgctgaaggagtttgttcagcgggtagtcgagtctctggatgtgggacaggatcgtgtgcgggtcgcagtggtccagtacagcgaccgcaccaggccagaattttacctcaactcatacatgaataaacaagacgtggtcaatgccgtcagacaattaacgctgctgggtggccctacccctaacacaggagcagcactggaattcgttctgcgcaatatcctcgtgagctctgccggaagcagaatcacagagggagttccccagttgttgatcgttcttacagcggaccgatcaggagatgatgtaaggaaccccagcgttgtggtaaagcgaggaggagccgtgcccataggtattggcattggcaatgcagacatcaccgaaatgcaaacaatctcattcattccagattttgctgttgccattcccacatttagacagttaggcactgtccagcaggtgatttccgaaagagtaactcagctgaccagagaggaattgtcgcgcctgcagcccgtgcttcagccacttccctcacctggggtaggcggcaagagggacgtagtgtttttgatcgacgggagccagtcggccgggcccgaattccaatatgttagaactctcattgagcggctggtcgactacctggatgtgggctttgataccacaagagttgctgtgattcagttttctgacgaccccaaagtagaatttctgctcaatgctcattcctctaaagatgaggtccagaacgccgtgcaacggctcaggcctaagggaggtcggcagataaacgttgggaatgccctcgagtacgtctctcgcaatatctttaagcggccactagggtccaggatcgaagagggggtgccacagttcctggttcttatttcgtctggaaagtctgatgatgaggtagacgatccagcagtggaacttaaacaattcggcgtggcaccttttacaattgctcgcaatgctgatcaagaggaactcgtaaagatttccctgtcacccgagtatgtatttagtgtctcaacttttagagagctgccatcactggaacagaaattgttgactccgatcacaacactgacaagcgagcagatccagaagctgttggcctccactaggtatccgccacccgctgtggaaagtgatgccgccgacatcgtctttttgatcgattccagcgaaggcgtcagaccagacggttttgcccacatcagggattttgtgagcaggatcgttcgtaggttaaacatcggaccatccaaggtcagggtcggcgtggtgcagttttccaatgacgtattccccgagttctacctgaagacgtatagatctcaggctcctgtgctcgatgccatccggaggctccgcttaagaggaggatctccactgaacactgggaaggcgctggaatttgtggcacggaacctctttgtcaagagcgcaggtagtcgaatcgaagatggagtcccgcagcacctggtgctggtgctgggtggtaagtcccaggacgatgtatccaggttcgcccaggtgatacggagcagcgggattgtgtcccttggcgtcggtgatagaaacatcgaccggactgagctacagaccatcactaacgacccgaggctggtattcaccgtgagagagttccgagagttacctaacatagaagaacgaatcatgaattcttttggccctagcgccgctacacccgcaccacctggagtcgataccccacccccctctaggcccgagaagaaaaaggccgatattgtgttcctgctggacggctcaatcaattttcgaagagactctttccaagaggtgctccgtttcgtctccgagatcgtggacacagtgtatgaggatggtgactccattcaagtgggcttagttcaatataatagcgacccaacagatgagttctttttaaaggacttcagtaccaagcgacaaattattgatgccattaacaaggtggtatacaagggaggaaggcacgctaacactaaggtgggactggagcatctgcgcgttaaccacttcgtgccagaggccggctcgaggttagaccaacgcgtgcctcagatcgcattcgtgattaccggcggtaagtcagtggaggatgcccaagatgtgagccttgcgcttacacagcgcggggtcaaggtgtttgccgtgggcgtgaggaatatcgactccgaagaggttggaaagattgcaagtaacagcgccaccgccttccgagtcgggaacgtccaggaactgagcgaattgagcgaacaagtgctggagacattgcacgatgctatgcacgagacactctgccccggagtgactgatgcagccaaggcttgtaacctcgacgtcattctgggcttcgacgggtcccgagaccagaatgtattcgtggcacagaagggatttgagtcaaaagttgatgccattctgaatcggatctcccagatgcatcgtgtgagctgcagcggtggtcgcagtcctaccgtgcgcgtttcagtggtcgctaatacccctagcgggcccgtggaggcctttgatttcgacgagtatcagcctgaaatgctggaaaaatttaggaacatgcggtcacagcacccatacgtgctgacggaggacaccctgaaggtgtatctgaacaaatttcggcagtcttcaccagattccgtgaaagtggtcattcacttcacagacggcgcggacggcgatctggcggacctccatcgcgctagtgagaacttgaggcaggagggcgtgagggctttgattctggtgggcttagagagggtggtgaaccttgaacgcctgatgcatctggagttcgggaggggatttatgtatgacagacccctgaggctgaatctgctggacctagattacgagttggccgagcagctggacaacatcgccgagaaggcatgctgcggcgtcccctgcaagtgttcaggccaacgtggcgatcgggggccaatcggaagtataggaccaaagggcattcctggggaggacggttaccgcggctaccccggagacgagggcggaccaggggagagggggcctcctggcgtgaatggtacacaaggtttccagggatgtccaggccagagaggcgtaaaagggtcccgtgggtttcctggcgaaaagggcgaggtaggcgagatcggcctagatgggctggatggtgaagatggggacaaggggctcccaggcagctcaggagaaaagggaaatccaggccgtcgcggcgacaaaggccccaggggcgaaaagggtgaacgcggagacgtcggcatccggggcgaccccggtaaccccgggcaggatagccaggaacgcggaccaaaaggggaaaccggggacctcggcccaatgggagtgcccggaagagacggagtcccaggaggtccgggtgagacaggtaagaacggtgggtttggcagaaggggacctcccggtgccaaggggaataagggtggcccaggccagccgggctttgagggagagcagggcactagaggcgcccagggtccagcaggacccgccggaccccccggattgatcggggagcagggcatttccgggcctagaggaagcggaggcgccgccggcgccccaggcgaacgtgggcgcactggtcctctcggccggaagggtgagcccggagagcccggccccaaaggaggaattggaaaccgcggcccgcggggagagaccggagacgatggaagggacggcgtgggctccgaaggacgaaggggcaagaagggagagcgcggattcccaggctaccctggtccaaagggaaatcctggggaacctggactcaacggcactacaggccccaagggtattagagggcgcaggggcaattctggtccacctggcatagtgggccagaagggcgatccgggttatcctggtcctgccggccccaaaggtaacaggggtgacagcatcgaccagtgcgctctaatacagtccatcaaggacaagtgcccctgctgctacggcccactggagtgccctgtgttccctaccgagctggctttcgctctcgatacttcagagggtgtcaaccaggatacttttgggaggatgcgggatgtcgttctcagcatcgtcaatgatttaaccattgccgaatctaattgcccccggggcgccagagttgctgtggtcacttataacaacgaggtcacaacagaaattcgctttgccgatagcaaacgaaaaagtgtgttgctcgacaagattaagaacctgcaggttgccttgacttccaagcagcaaagcctggagactgcgatgagcttcgtggcaaggaacaccttcaagagggttagaaatggatttctaatgcgcaaagtggcggtgtttttctcgaatactccgacgcgagcttccccccagctgcgcgaagccgtcctcaagctaagcgatgcaggcatcacacctctgtttttgacaaggcaggaggatcgccagttaatcaacgcacttcaaattaacaacacagcagtgggccacgcccttgtgctccctgcgggcagggacctgaccgacttcctggagaacgtcctcacttgtcacgtttgtcttgatatctgcaacattgatcccagctgcgggtttggctcatggaggcccagttttagggacagacgcgctgctggctccgacgtggatattgacatggccttcattctcgactcggctgagaccaccactctgttccagttcaatgagatgaaaaaatacattgcttatctggtgagacagctggatatgagcccggaccccaaggcctcccagcacttcgctcgtgtggcagtcgtgcagcacgcaccatcagaatctgtggataacgcttccatgccgccagtgaaagtcgagttttctcttacagactacggcagtaaggaaaaattggtggactttctctcacgtggaatgacccagctgcagggtactcgggctctcggcagtgctattgagtatactatcgagaacgtttttgaatcagcgccaaaccccagggatctcaagatagtcgtgctgatgttgaccggggaggtccccgagcagcagctcgaggaggcgcagcgcgtgattctgcaagctaagtgtaagggctacttcttcgtcgttctgggaataggccgcaaggtgaatattaaagaggtgtataccttcgcctccgaacctaatgatgtctttttcaaacttgtcgacaagagtactgaactgaacgaggaaccgctgatgcggttcggcaggctgctgccctcgtttgtaagtagcgagaacgcgttctatttgtctcctgacattcgcaagcagtgtgattggttccaaggagaccaaccaacaaaaaacctggtgaaatttggccataagcaagtgaatgtgcctaacaacgtaacctcatctccgacgagtaacccagttactacaaccaagccggtgactacaactaagccagtcacgactaccactaaacctgtgaccacaacaaccaaacccgttactattataaatcagcccagtgtgaaacccgccgccgctaagcccgctcccgcgaaacctgtggctgctaaacccgtggctacaaaaatggcaaccgtgcgccctccagtggcggtgaagcctgctaccgctgctaaaccagtggcggccaagcctgctgccgtgcggccacccgccgcggccgctgctaaaccagttgctacaaagccagaagtccctcgcccccaggcagccaaaccagcagccactaagcccgctacgactaaacccatggtgaaaatgtcccgcgaggtgcaagtgtttgagattaccgagaactcggccaagcttcattgggagcgcgccgaaccgcccggcccatacttttacgacttgacagtgacatctgcacacgatcagtctctggtgcttaagcaaaacttgacagtgacagatagggtaattggcggcctcctggcaggacagacctatcacgtggcagttgtgtgctatctgagatcccaagttcgagccacctaccacggtagcttcagcaccaagaagagtcagccccctcctccccagcccgcacgttcggcgagctctagtaccataaatctcatggtctccacggagcccctggcactgaccgagacagatatttgcaagctccctaaggacgaaggcacctgcagagattttatcctgaagtggtactacgatccgaacacgaagtcctgcgcccgtttttggtacggtggctgtggcggcaacgagaataagtttggatcccagaaggaatgtgagaaggtctgcgcacccgtactcgcaaagcccggagtgattagcgttatgggcacctag

SEQ ID NO: 145673 - DNA, 9534 bp, Artificial Sequence
  derived and/or modified sequence
atgaggaagcaccgccacctgcccctggtggccgtgttctgcctcttcctgagcggcttccccaccacccacgcccagcagcagcaggctgatgtgaagaatggagctgctgctgacatcatcttcctggtggacagctcctggaccatcggggaggagcacttccagctggtgcgggagttcctgtatgatgtggtgaagagcctggccgtgggagaaaatgacttccactttgccctggtgcagttcaacggcaacccccacacagagttcctgctgaacacctaccgcaccaagcaggaggtgctgagccacatcagcaacatgagctacatcggcggcaccaaccagacaggcaagggcctggagtacatcatgcagagccacctgaccaaggccgccggcagcagagctggagatggagtgccccaggtgattgtggtgctgacagatggccacagcaaggatggcctggccctgcccagcgctgagctgaagtctgcagatgtgaatgtgtttgccatcggcgtggaggatgctgatgaaggagccctgaaggagatcgccagcgagcccctgaacatgcacatgttcaacctggagaacttcaccagcctgcatgacatcgtgggcaacctggtgtcctgtgtgcacagctctgtgtccccagagcgggccggggacacagagaccctgaaggacatcacagcccaggacagcgctgacatcatcttcctgattgatggcagcaacaacacaggctctgtgaactttgctgtgatcctggacttcctggtgaacctgctggagaagctgcccatcggcacccagcagatccgggtgggcgtggtgcagttcagtgatgagcccaggaccatgttcagcctggacacctacagcaccaaggcccaggtgctgggcgctgtgaaggccctgggctttgctggaggagagctggccaacatcggcctggccctggactttgtggtggagaaccacttcaccagggctgggggcagccgggtggaggagggcgtgccccaggtgctggtgctgatctctgctggccccagcagtgatgagatccgctatggagtggtggccctgaagcaggcctctgtgttctcctttggcctgggcgcccaggccgccagcagagctgagctgcagcacatcgccacagatgacaacctggtgttcaccgtgcctgagttccgcagctttggagacctgcaggagaagctgctgccctacatcgtgggcgtggcccagaggcacatcgtgctgaagccacccaccatcgtgacccaggtgattgaggtgaacaagagggacatcgtgttcctggtggatggcagcagcgccctgggcctggccaacttcaatgccatccgggacttcatcgccaaggtgatccagaggctggagatcggccaggacctgatccaggtggccgtggcccagtatgctgacacagtgcggcctgagttctacttcaacacccaccccaccaagcgggaggtgatcacagctgtgaggaagatgaagcccctggatggcagcgccctgtacacaggcagcgccctggactttgtgaggaacaacctcttcaccagcagcgctggctacagagctgctgagggcatccccaagctgctggtgctgatcactggaggcaagagcctggatgagatcagccagcctgcccaggagctgaagaggagcagcatcatggcctttgccatcggcaacaagggagctgaccaggccgagctggaggagatcgcctttgacagcagcctggtgttcatcccagctgagttccgggccgcccccctgcagggcatgctgcccggcctgctggcccccctgcggaccctgagcggcaccccagaggtgcacagcaacaagagggacatcatcttcctgctggatggcagcgccaacgtgggcaagaccaacttcccctacgtgcgggactttgtgatgaacctggtgaacagcctggacattggaaatgacaacatccgggtgggcctggtgcagttcagtgacacccctgtgacagagttcagcctgaacacctaccagaccaagagtgacatcctgggccacctgcggcagctgcagctgcagggcggcagcggcctgaacacaggcagcgccctgtcctatgtgtatgccaaccacttcacagaggccggcggcagccgcatccgggagcacgtgccccagctgctgctgctgctgacagctggccagagcgaggacagctacctgcaggccgccaatgccctgaccagggctggcatcctgaccttctgtgtgggcgccagccaggccaacaaggccgagctggagcagatcgccttcaaccccagcctggtgtacctgatggatgacttcagcagcctgcctgccctgccccagcagctgatccagcccctgaccacctacgtgtctggaggagtggaggaggtgcccctggcccagcctgagagcaagagggacatcctcttcctgtttgatggcagcgccaacctggtgggccagtttcctgtggtgcgggacttcctgtacaagatcattgatgagctgaatgtgaagccagagggcaccagaattgctgtggcccagtacagtgatgatgtgaaggtggagagcagatttgatgagcaccagagcaagccagagatcctgaacctggtgaagaggatgaagatcaagacaggcaaggccctgaacctgggctacgccctggactatgcccagcgctacatctttgtgaagtctgctggcagcagaattgaagatggagtgctgcagttcctggtgctgctggtggccggccgcagcagtgacagagtggatggccctgccagcaacctgaagcagagcggcgtggtgcccttcatcttccaggccaagaatgctgaccctgctgagctggagcagatcgtgctgagccctgccttcatcctggccgctgagagcctgcccaagatcggggacctgcacccccagatcgtgaacctgctgaagtctgtgcacaacggggccccagcccctgtgtctggagagaaggatgtggtgttcctgctggatggcagcgagggcgtgcgcagcggcttccccctgctgaaggagtttgtgcagagggtggtggagagcctggatgtgggccaggacagagtgcgggtggccgtggtgcagtacagcgacaggaccaggcctgagttctacctgaacagctacatgaacaagcaggatgtggtgaatgctgtgcggcagctgaccctgctgggcggccccacccccaacacaggagctgccctggagtttgtgctgaggaacatcctggtgtcctctgctggcagccgcatcacagaaggagtgccccagctgctgattgtgctgacagctgacagaagtggagatgatgtgaggaaccccagcgtggtggtgaagaggggcggcgctgtgcccatcggcattggaattggaaatgctgacatcacagagatgcagaccatctccttcatcccagactttgctgtggccatccccaccttccggcagctgggcaccgtgcagcaggtgatcagcgagcgggtgacccagctgacccgggaggagctgagccggctgcagcctgtgctgcagcccctgcccagccctggggtgggcggcaagagagatgtggtgttcctgattgatggcagccagagcgctggccctgagttccagtatgtgaggaccctgattgagcggctggtggactacctggatgtgggctttgacaccaccagggtggccgtcatccagttcagtgatgaccccaaggtggagttcctgctgaatgcccacagcagcaaggatgaggtgcagaatgctgtgcagaggctgcggcccaagggcggccggcagatcaacgtgggcaatgccctggagtatgtgtccaggaacatcttcaagaggcccctgggcagccgcatcgaggagggcgtgccccagttcctggtgctgatcagcagcggcaagagtgatgatgaggtggatgatcctgctgtggagctgaagcagtttggagtggcccccttcaccatcgccagaaatgctgaccaggaggagctggtgaagatcagcctgagcccagaatatgtgttttctgtgtccaccttccgggagctgcccagcctggagcagaagctgctgacccccatcaccaccctgaccagcgagcagatccagaagctgctggccagcacccgctacccacctcctgctgtggagagtgatgctgctgacatcgtgttcctgattgacagcagcgagggcgtgcggccagatggctttgcccacatccgggactttgtgagccgcatcgtgcggcggctgaacatcggccccagcaaggtgcgggtgggcgtggtgcagttcagcaatgatgtgtttcctgagttctacctgaagacctaccgcagccaggcccctgtgctggatgccatccggcggctgcggctgcggggcggcagccccctgaacacaggcaaggccctggagtttgtggccaggaacctgtttgtgaagtctgctggcagcagaattgaagatggagtgccccagcacctggtgctggtgctgggcggcaagagccaggatgatgtgtccagatttgcccaggtgatccgcagcagcggcatcgtgtccctgggcgtgggggacaggaacatcgacagaacagagctgcagaccatcaccaatgacccccggctggtgttcaccgtgcgggagttccgggagctgcccaacatcgaggagcgcatcatgaacagctttggccccagcgctgccaccccagcccctcctggggtggacaccccaccacccagcaggcctgagaagaagaaggctgacatcgtgttcctgctggatggcagcatcaacttcagaagagacagcttccaggaggtgctgcgctttgtgtctgaaattgtggacacagtgtatgaagatggagacagcatccaggtgggcctggtgcagtacaacagcgaccccacagatgagttcttcctgaaggacttcagcaccaagaggcagatcattgatgccatcaacaaggtggtgtacaagggcggcagacatgccaacaccaaggtgggcctggagcacctgcgggtgaaccactttgtgcctgaggccggcagccggctggaccagagggtgccccagatcgccttcgtcatcactggaggcaagtctgtggaggatgcccaggatgtgtccctggccctgacccagaggggcgtgaaggtgtttgctgtgggcgtgagaaatattgattctgaggaggtgggcaagatcgccagcaacagcgccacagccttccgggtgggcaatgtgcaggagctgtctgagctgtctgagcaggtgctggagaccctgcatgatgccatgcatgagaccctgtgccctggggtgacagatgctgccaaggcctgcaacctggatgtgatcctgggctttgatggcagccgggaccagaatgtgtttgtggcccagaagggctttgagagcaaggtggatgccatcctgaaccgcatcagccagatgcaccgggtgtcctgcagcggcggccgcagccccaccgtgcgggtgtctgtggtggccaacaccccatctggccctgtggaggcctttgattttgatgagtaccagcctgagatgctggagaagttcaggaacatgaggagccagcacccctacgtgctgacagaggacaccctgaaggtgtacctgaacaagttccggcagagcagcccagacagcgtgaaggtggtgatccacttcacagatggagcagatggagacctggccgacctgcaccgggccagcgagaacctgcggcaggagggcgtgcgggccctgatcctggtgggcctggagcgggtggtgaacctggagcggctgatgcacctggagtttggccggggcttcatgtatgaccggcccctgcggctgaacctgctggacctggactatgagctggccgagcagctggacaacattgctgagaaggcctgctgcggcgtgccctgcaagtgcagcggccagagaggagaccggggccccatcggcagcatcggccccaagggcatccctggagaagatggctaccggggctacccaggagatgagggcggccctggagagcggggccccccaggagtgaatggcacccagggcttccagggctgccccggccagaggggcgtgaagggcagccggggcttccctggagagaagggggaggtgggggagatcggcctggatggcctggatggagaagatggagacaagggcctgcccggcagcagtggagagaagggcaaccctggaagaagaggagacaagggccccagaggagagaagggggagagaggagatgtgggcatccggggggaccccggcaaccctggccaggacagccaggagcggggccccaagggggagactggagacctgggccccatgggcgtgcccggcagagatggagtgcctgggggccctggagagaccgggaagaatggaggcttcggccggcggggccccccaggggccaagggcaacaagggcggccctggccagcccggctttgaaggagagcagggcaccaggggggcccagggccctgctggccctgctggccccccaggcctcatcggggagcagggcatcagcggcccccggggcagcggcggcgctgctggggcccctggagagcggggccgcacaggccccctgggcaggaagggggagcctggagagcccggccccaagggcggcatcggcaacagaggccccagaggagaaacaggagatgatggaagagatggagtgggcagcgagggccggcggggcaagaagggggagcggggcttccctggctacccaggccccaagggcaaccctggagagcccggcctgaatggcaccaccggccccaagggcatccggggccggcggggcaacagcggccccccaggcatcgtgggccagaagggggaccccggctacccaggccctgctggccccaagggcaacagaggagacagcattgaccagtgtgccctgatccagagcatcaaggacaagtgcccctgctgctacggccccctggagtgccctgtgttccccacagagctggcctttgccctggacaccagcgagggcgtgaaccaggacaccttcggccgcatgagagatgtggtgctgagcatcgtgaatgacctgaccatcgccgagagcaactgccccaggggggcccgggtggccgtggtgacctacaacaatgaggtgaccacagagatccgctttgctgacagcaagaggaagtctgtgctgctggacaagatcaagaacctgcaggtggccctgaccagcaagcagcagagcctggagacagccatgagctttgtggccaggaacaccttcaagagggtgagaaatggcttcctgatgaggaaggtggccgtgttcttcagcaacacccccacccgggccagcccccagctgcgggaggccgtgctgaagctgagtgatgctggcatcacccccctcttcctgacccggcaggaggaccggcagctgatcaatgccctgcagatcaacaacacagctgtgggccacgccctggtgctgcctgctggccgggacctgacagacttcctggagaatgtgctgacctgccacgtgtgcctggacatctgcaacatcgaccccagctgtggcttcggctcctggaggcccagcttccgggacagaagagctgctggcagtgatgtggacatcgacatggccttcatcctggacagcgctgagaccaccaccctcttccagttcaatgagatgaagaagtacatcgcctacctggtgcggcagctggacatgagcccagaccccaaggccagccagcactttgcccgggtggccgtggtgcagcacgcccccagcgagagcgtggacaatgcctccatgcctcctgtgaaggtggagttcagcctgacagattatggcagcaaggagaagctggtggacttcctgagccggggcatgacccagctgcagggcacccgggccctgggcagcgccatcgagtacaccattgaaaatgtgtttgaaagtgcccccaacccccgggacctgaagatcgtggtgctgatgctgaccggggaggtgcctgagcagcagctggaggaggcccagagggtcatcctgcaggccaagtgcaagggctacttctttgtggtgctgggcatcggcaggaaggtgaacatcaaggaggtgtacacctttgccagcgagcccaatgatgtgttcttcaagctggtggacaagagcacagagctgaatgaggagcccctgatgagatttggccgcctgctgcccagctttgtgtccagtgaaaatgccttctacctgagcccagacatcaggaagcagtgtgactggttccagggcgaccagcccaccaagaacctggtgaagtttggccacaagcaggtgaatgtgcccaacaacgtgaccagcagccccaccagcaaccctgtgaccaccaccaagcctgtgaccaccaccaagcctgtgaccaccaccaccaagcctgtgaccaccaccaccaagcctgtgaccatcatcaaccagcccagcgtgaagccagctgctgccaagccagccccagccaagcctgtggccgccaagcctgtggccaccaagatggccaccgtgcggccccctgtggccgtgaagccagccacagctgccaagcctgtggccgccaagccagctgctgtgcggcccccagctgctgctgctgccaagcctgtggccaccaagccagaggtgccccggccccaggccgccaagccagctgccaccaagccagccaccaccaagcccatggtgaagatgagccgggaggtgcaggtgtttgagatcacagagaacagcgccaagctgcactgggagcgggcagagcccccaggcccctacttctatgacctgactgtgaccagcgcccatgaccagagcctggtgctgaagcagaacctgactgtgacagacagagtgattggaggcctgctggccggccagacctaccacgtggccgtggtgtgctacctgcggagccaggtgcgggccacctaccacggcagcttcagcaccaagaagagccagcccccaccaccccagcctgcccggagcgccagcagcagcaccatcaacctgatggtgtccacagagcccctggccctgacagaaacagacatctgcaagctgcccaaggatgagggcacctgccgggacttcatcctgaagtggtactatgaccccaacaccaagagctgtgcccgcttctggtacggcggctgcggcggcaatgaaaacaagtttggcagccagaaggaatgtgagaaggtgtgtgcccctgtgctggccaagccaggagtcatctctgtgatgggcacctag

SEQ ID NO: 145674 - DNA, 10749 bp, Artificial Sequence
  derived and/or modified sequence
gcttgtagggtgaagacagaattcagagggtgacatcagcctgagcgggggccagaagaaacagagtggaggagtctggtttcatttacagttttgggtcagttctgcagtgaggagggggagaggaggggtccgggagggaggaggaggaggaggaggagctggaggaagccctgactggtatccctggccccagtccagtttggagctcagtcttccaccaaaggccgttcagttctcctgggctccagcctcctgcaaggactgcaagagttttcctccgcagctctgagtctccacttttttggtggagaaaggctgcaaaaagaaaaagagacgcagtgagtgggaaaagtatgcatcctattcaaacctaattgaatcgaggagcccagggacacacgccttcaggtttgctcaggggttcatatttggtgcttagacaaattcaaaatgaggaaacatcggcacttgcccttagtggccgtcttttgcctctttctctcaggctttcctacaactcatgcccagcagcagcaagcagatgtcaaaaatggtgcggctgctgatataatatttctagtggattcctcttggaccattggagaggaacatttccaacttgttcgagagtttctatatgatgttgtaaaatccttagctgtgggagaaaatgatttccattttgctctggtccagttcaacggaaacccacataccgagttcctgttaaatacgtatcgtactaaacaagaagtcctttctcatatttccaacatgtcttatattgggggaaccaatcagactggaaaaggattagaatacataatgcaaagccacctcaccaaggctgctggaagccgggccggtgacggagtccctcaggttatcgtagtgttaactgatggacactcgaaggatggccttgctctgccctcagcggaacttaagtctgctgatgttaacgtgtttgcaattggagttgaggatgcagatgaaggagcgttaaaagaaatagcaagtgaaccgctcaatatgcatatgttcaacctagagaattttacctcacttcatgacatagtaggaaacttagtgtcctgtgtgcattcatccgtgagtccagaaagggctggggacacggaaacccttaaagacatcacagcacaagactctgctgacattattttccttattgatggatcaaacaacaccggaagtgtcaatttcgcagtcattctcgacttccttgtaaatctccttgagaaactcccaattggaactcagcagatccgagtgggggtggtccagtttagcgatgagcccagaaccatgttctccttggacacctactccaccaaggcccaggttctgggtgcagtgaaagccctcgggtttgctggtggggagttggccaatatcggcctcgcccttgatttcgtggtggagaaccacttcacccgggcagggggcagccgcgtggaggaaggggttccccaggtgctggtcctcataagtgccgggccttctagtgacgagattcgctacggggtggtagcactgaagcaggctagcgtgttctcattcggccttggagcccaggccgcctccagggcagagcttcagcacatagctaccgatgacaacttggtgtttactgtcccggaattccgtagctttggggacctccaggagaaattactgccgtacattgttggcgtggcccaaaggcacattgtcttgaaaccgccaaccattgtcacacaagtcattgaagtcaacaagagagacatagtcttcctggtggatggctcatctgcactgggactggccaacttcaatgccatccgagacttcattgctaaagtcatccagaggctggaaatcggacaggatcttatccaggtggcagtggcccagtatgcagacactgtgaggcctgaattttatttcaatacccatccaacaaaaagggaagtcataaccgctgtgcggaaaatgaagcccctggacggctcggccctgtacacgggctctgctctagactttgttcgtaacaacctattcacgagttcagccggctaccgggctgccgaggggattcctaagcttttggtgctgatcacaggtggtaagtccctagatgaaatcagccagcctgcccaggagctgaagagaagcagcataatggcctttgccattgggaacaagggtgccgatcaggctgagctggaagagatcgctttcgactcctccctggtgttcatcccagctgagttccgagccgccccattgcaaggcatgctgcctggcttgctggcacctctcaggaccctctctggaacccctgaagttcactcaaacaaaagggatatcatctttcttttggatggatcagccaacgttggaaaaaccaatttcccttatgtgcgcgactttgtaatgaacctagttaacagccttgatattggaaatgacaatattcgtgttggtttagtgcaatttagtgacactcctgtaacggagttctctttaaacacataccagaccaagtcagatatccttggtcatctgaggcagctgcagctccagggaggttcgggcctgaacacaggctcagccctaagctatgtctatgccaaccacttcacggaagctggcggcagcaggatccgtgaacacgtgccgcagctcctgcttctgctcacagctgggcagtctgaggactcctatttgcaagctgccaacgccttgacacgcgcgggcatcctgactttttgtgtgggagctagccaggcgaataaggcagagcttgagcagattgcttttaacccaagcctggtgtatctcatggatgatttcagctccctgccagctttgcctcagcagctgattcagcccctaaccacatatgttagtggaggtgtggaggaagtaccactcgctcagccagagagcaagcgagacattctgttcctctttgacggctcagccaatcttgtgggccagttccctgttgtccgtgactttctctacaagattatcgatgagctcaatgtgaagccagaggggacccgaattgcggtggctcagtacagcgatgatgtcaaggtggagtcccgttttgatgagcaccagagtaagcctgagatcctgaatcttgtgaagagaatgaagatcaagacgggcaaagccctcaacctgggctacgcgctggactatgcacagaggtacatttttgtgaagtctgctggcagccggatcgaggatggagtgcttcagttcctggtgctgctggtcgcaggaaggtcatctgaccgtgtggatgggccagcaagtaacctgaagcagagtggggttgtgcctttcatcttccaagccaagaacgcagaccctgctgagttagagcagatcgtgctgtctccagcgtttatcctggctgcagagtcgcttcccaagattggagatcttcatccacagatagtgaatctcttaaaatcagtgcacaacggagcaccagcaccagtttcaggtgaaaaggacgtggtgtttctgcttgatggctctgagggcgtcaggagcggcttccctctgttgaaagagtttgtccagagagtggtggaaagcctggatgtgggccaggaccgggtccgcgtggccgtggtgcagtacagcgaccggaccaggcccgagttctacctgaattcatacatgaacaagcaggacgtcgtcaacgctgtccgccagctgaccctgctgggagggccgacccccaacaccggggccgccctggagtttgtcctgaggaacatcctggtcagctctgcgggaagcaggataacagaaggtgtgccccagctgctgatcgtcctcacggccgacaggtctggggatgatgtgcggaacccctccgtggtcgtgaagaggggtggggctgtgcccattggcattggcatcgggaacgctgacatcacagagatgcagaccatctccttcatcccggactttgccgtggccattcccacctttcgccagctggggaccgtccaacaggtcatctctgagagggtgacccagctcacccgcgaggagctgagcaggctgcagccggtgttgcagcctctaccgagcccaggtgttggtggcaagagggacgtggtctttctcatcgatgggtcccaaagtgccgggcctgagttccagtacgttcgcaccctcatagagaggctggttgactacctggacgtgggctttgacaccacccgggtggctgtcatccagttcagcgatgaccccaaggtggagttcctgctgaacgcccattccagcaaggatgaagtgcagaacgcggtgcagcggctgaggcccaagggagggcggcagatcaacgtgggcaatgccctggagtacgtgtccaggaacatcttcaagaggcccctggggagccgcattgaagagggcgtcccgcagttcctggtcctcatctcgtctggaaagtctgacgatgaggtggacgacccggcggtggagctcaagcagtttggcgtggcccctttcacgatcgccaggaacgcagaccaggaggagctggtgaagatctcgctgagccccgaatatgtgttctcggtgagcaccttccgggagctgcccagcctggagcagaaactgctgacgcccatcacgaccctgacctcagagcagatccagaagctcttagccagcactcgctatccacctccagcagttgagagtgatgctgcagacattgtctttctgatcgacagctctgagggagttaggccagatggctttgcacatattcgagattttgttagcaggattgttcgaagactcaacatcggccccagtaaagtgagagttggggtcgtgcagttcagcaatgatgtcttcccagaattctatctgaaaacctacagatcccaggccccggtgctggacgccatacggcgcctgaggctcagaggggggtccccactgaacactggcaaggctctcgaatttgtggcaagaaacctctttgttaagtctgcggggagtcgcatagaagacggggtgccccaacacctggtcctggtcctgggtggaaaatcccaggacgatgtgtccaggttcgcccaggtgatccgttcctcgggcattgtgagtttaggggtaggagaccggaacatcgacagaacagagctgcagaccatcaccaatgaccccagactggtcttcacagtgcgagagttcagagagcttcccaacatagaagaaagaatcatgaactcgtttggaccctccgcagccactcctgcacctccaggggtggacacccctcctccttcacggccagagaagaagaaagcagacattgtgttcctgttggatggttccatcaacttcaggagggacagtttccaggaagtgcttcgttttgtgtctgaaatagtggacacagtttatgaagatggcgactccatccaagtggggcttgtccagtacaactctgaccccactgacgaattcttcctgaaggacttctctaccaagaggcagattattgacgccatcaacaaagtggtctacaaagggggaagacacgccaacactaaggtgggccttgagcacctgcgggtaaaccactttgtgcctgaggcaggcagccgcctggaccagcgggtccctcagattgcctttgtgatcacgggaggaaagtcggtggaagatgcacaggatgtgagcctggccctcacccagaggggggtcaaagtgtttgctgttggagtgaggaatatcgactcggaggaggttggaaagatagcgtccaacagcgccacagcgttccgcgtgggcaacgtccaggagctgtccgaactgagcgagcaagttttggaaactttgcatgatgcgatgcatgaaaccctttgccctggtgtaactgatgctgccaaagcttgtaatctggatgtgattctggggtttgatggttctagagaccagaatgtttttgtggcccagaagggcttcgagtccaaggtggacgccatcttgaacagaatcagccagatgcacagggtcagctgcagcggtggccgctcgcccaccgtgcgtgtgtcagtggtggccaacacgccctcgggcccggtggaggcctttgactttgacgagtaccagccagagatgctcgagaagttccggaacatgcgcagccagcacccctacgtcctcacggaggacaccctgaaggtctacctgaacaagttcagacagtcctcgccggacagcgtgaaggtggtcattcattttactgatggagcagacggagatctggctgatttacacagagcatctgagaacctccgccaagaaggagtccgtgccttgatcctggtgggccttgaacgagtggtcaacttggagcggctaatgcatctggagtttgggcgagggtttatgtatgacaggcccctgaggcttaacttgctggacttggattatgaactagcggagcagcttgacaacattgccgagaaagcttgctgtggggttccctgcaagtgctctgggcagaggggagaccgcgggcccatcggcagcatcgggccaaagggtattcctggagaagacggctaccgaggctatcctggtgatgagggtggacccggtgagcgtggtccgcctggtgtgaacggcactcaaggtttccagggctgcccgggccagagaggagtaaagggctctcggggattcccaggagagaagggcgaagtaggagaaattggactggatggtctggatggtgaagatggagacaaaggattgcctggttcttctggagagaaagggaatcctggaagaaggggtgataaaggacctcgaggagagaaaggagaaagaggagatgttgggattcgaggggacccgggtaacccaggacaagacagccaggagagaggacccaaaggagaaaccggtgacctcggccccatgggtgtcccagggagagatggagtacctggaggacctggagaaactgggaagaatggtggctttggccgaaggggaccccccggagctaagggcaacaagggcggtcctggccagccgggctttgagggagagcaggggaccagaggtgcacagggcccagctggtcctgctggtcctccagggctgataggagaacaaggcatttctggacctcggggaagcggaggtgccgctggtgctcctggagaacgaggcagaaccggtccactgggaagaaagggtgagcccggagagccaggaccaaaaggaggaatcgggaaccggggccctcgtggggagacgggagatgacgggagagacggagttggcagtgaaggacgcagaggcaaaaaaggagaaagaggattccctggatacccaggaccaaagggtaacccaggtgaacctgggctaaatggaacaacaggacccaaaggcatcagaggccgaaggggaaattcgggacctccagggatagttggacagaagggagaccctggctacccaggaccagctggtcccaagggcaacaggggcgactccatcgatcaatgtgccctcatccaaagcatcaaagataaatgcccttgctgttacgggcccctggagtgccccgtcttcccaacagaactagcctttgctttagacacctctgagggagtcaaccaagacactttcggccggatgcgagatgtggtcttgagtattgtgaatgacctgaccattgctgagagcaactgcccacggggggcccgggtggctgtggtcacctacaacaacgaggtgaccacggagatccggtttgctgactccaagaggaagtcggtcctcctggacaagattaagaaccttcaggtggctctgacatccaaacagcagagtctggagactgccatgtcgtttgtggccaggaacacatttaagcgtgtgaggaacggattcctaatgaggaaagtggctgttttcttcagcaacacacccacaagagcatccccacagctcagagaggctgtgctcaagctctcagatgcggggatcacccccttgttccttacaaggcaggaagaccggcagctcatcaacgctttgcagatcaataacacagcagtggggcatgcgcttgtcctgcctgcagggagagacctcacagacttcctggagaatgtcctcacgtgtcatgtttgcttggacatctgcaacatcgacccatcctgtggatttggcagttggaggccttccttcagggacaggagagcggcagggagcgatgtggacatcgacatggctttcatcttagacagcgctgagaccaccaccctgttccagttcaatgagatgaagaagtacatagcgtacctggtcagacaactggacatgagcccagatcccaaggcctcccagcacttcgccagagtggcagttgtgcagcacgcgccctctgagtccgtggacaatgccagcatgccacctgtgaaggtggaattctccctgactgactatggctccaaggagaagctggtggacttcctcagcaggggaatgacacagttgcagggaaccagggccttaggcagtgccattgaatacaccatagagaatgtctttgaaagtgccccaaacccacgggacctgaaaattgtggtcctgatgctgacgggcgaggtgccggagcagcagctggaggaggcccagagagtcatcctgcaggccaaatgcaagggctacttcttcgtggtcctgggcattggcaggaaggtgaacatcaaggaggtatacaccttcgccagtgagccaaacgacgtcttcttcaaattagtggacaagtccaccgagctcaacgaggagcctttgatgcgcttcgggaggctgttgccatccttcgtcagcagtgaaaatgctttttacttgtccccagatatcaggaaacagtgtgattggttccaaggggaccaacccacaaagaaccttgtgaagtttggtcacaaacaagtaaatgttccgaataacgttacttcaagtcctacatccaacccagtgacgacaacgaagccggtgactacgacgaagccggtgaccaccacaacaaagcctgtaaccaccacaacaaagcctgtgactattataaatcagccatctgtgaagccagccgctgcaaagccggcccctgcgaaacctgtggctgccaagcctgtggccacaaagatggccactgttagacccccagtggcggtgaagccagcaacggcagcgaagcctgtagcagcaaagccagcagctgtaagaccccccgctgctgctgctgcaaaaccagtggcgaccaagcctgaggtccctaggccacaggcagccaaaccagctgccaccaagccagccaccactaagcccatggttaagatgtcccgtgaagtccaggtgtttgagataacagagaacagcgccaaactccactgggagagggctgagccccccggtccttatttttatgacctcaccgtcacctcagcccatgatcagtccctggttctgaagcagaacctcacggtcacggaccgcgtcattggaggcctgctcgctgggcagacataccatgtggctgtggtctgctacctgaggtctcaggtcagagccacctaccacggaagtttcagtacaaagaaatctcagcccccacctccacagccagcaaggtcagcttctagttcaaccatcaatctaatggtgagcacagaaccattggctctcactgaaacagatatatgcaagttgccgaaagacgaaggaacttgcagggatttcatattaaaatggtactatgatccaaacaccaaaagctgtgcaagattctggtatggaggttgtggtggaaacgaaaacaaatttggatcacagaaagaatgtgaaaaggtttgcgctcctgtgctcgccaaacccggagtcatcagtgtgatgggaacctaagcgtgggtggccaacatcatatacctcttgaagaagaaggagtcagccatcgccaacttgtctctgtagaagctccgggtgtagattcccttgcactgtatcatttcatgctttgatttacactcgaactcgggagggaacatcctgctgcatgacctatcagtatggtgctaatgtgtctgtggaccctcgctctctgtctccaggcagttctctcgaatactttgaatgttgtgtaacagttagccactgctggtgtttatgtgaacattcctatcaatccaaattccctctggagtttcatgttatgcctgttgcaggcaaatgtaaagtctagaaaataatgcaaatgtcacggctactctatatacttttgcttggttcattttttttcccttttagttaagcatgactttagatgggaagcctgtgtatcgtggagaaacaagagaccaactttttcattccctgcccccaatttcccagactagatttcaagctaattttctttttctgaagcctctaacaaatgatctagttcagaaggaagcaaaatcccttaatctatgtgcaccgttgggaccaatgccttaattaaagaatttaaaaaagttgtaatagagaatatttttggcattcctctaatgttgtgtgttttttttttgtgtgtgctggagggaggggatttaattttaattttaaaatgtttaggaaatttatacaaagaaactttttaataaagtatattgaaagtttcctggg

SEQ ID NO: 145675 - DNA, 9534 bp, Artificial Sequence
  derived and/or modified sequence
atgcggaagcaccggcacctgcccctggtggccgtgttctgcctgttcctctcgggatttcctaccactcacgcacagcagcagcaggccgatgtgaagaatggcgccgccgccgatatcattttccttgttgattcaagctggaccattggggaggaacacttccaactggtcagggagttcctttacgacgttgtgaagagtctcgcagtaggggagaatgacttccattttgctctcgtgcagttcaatggcaacccccatacagaattcttactgaatacttatcgcacgaagcaggaggtgctgagccatatctccaatatgagttacataggaggcacaaatcagaccggaaaaggattagagtacattatgcagagccacctgaccaaagccgcgggatcccgggcaggagacggcgttccccaggtgatagtagtgttgacagatggacacagcaaggacggcctggctctgccctcagctgaactgaagagtgctgacgtgaacgtgtttgccatcggcgttgaagatgcagacgagggggctctcaaggaaattgccagcgagcctctgaacatgcatatgtttaatcttgaaaactttacctctctccatgatattgtgggcaacctggtatcatgcgtgcactcaagtgtgagccctgagagagccggcgatacggagactctgaaagacatcaccgcccaggattctgcggatatcattttcctgatcgacgggtctaataatacaggatccgtgaactttgcagtcatccttgactttctcgtcaacctcctcgagaagctccccatcggaacccagcagataagggtgggcgtagtgcagttctctgatgagccccgtaccatgttctccctggacacctactctacaaaagcacaggttctgggagccgtgaaagctctaggcttcgccggaggagagctggccaatatcggcctggctctggattttgtcgtggagaatcattttacccgggccggcggatctcgggtggaagagggggtccctcaggtgctggtgcttatcagcgccgggccctcatctgatgaaatccgttatggagtcgtggctctcaagcaggcctctgtgttcagtttcggcctgggtgcacaggctgcttcaagagccgagctgcagcacatcgcaaccgatgacaacctcgtctttaccgtgcccgagttcagatcctttggagatcttcaagaaaaactactcccttatatcgttggagtggcgcagcgacacattgtgctcaagccacccacgatcgtgacccaagtgatcgaggtaaacaagcgcgacatcgtgttcctggtcgacggcagttctgcactgggactggctaactttaacgctatccgagactttatcgccaaagtcatccagcgcctggagatcggccaggatctgatccaggtggccgtggcacagtatgcagataccgttcggcctgagttttactttaacacacatccaaccaagagagaggtcataaccgccgtgcggaaaatgaaaccattggacggctctgctttgtacacaggttctgctctggattttgtgaggaacaacctgtttacaagcagcgcaggctatcgagcagctgagggaatacctaagttacttgtccttatcactgggggcaagtctcttgatgagatttctcagcctgcccaggaactgaagcgatccagtattatggctttcgcaattggcaataagggcgcagatcaggcagagttggaggaaattgccttcgactcctctctggtgttcataccagccgagttcagagctgcacctctgcagggaatgctgcccgggctgctcgctcccttgcggaccctgtcaggtacccctgaagtgcacagcaataagcgtgatattattttcctgctggatgggagtgcaaatgttgggaagacgaacttcccttacgtgcgcgattttgtgatgaatctggtcaacagtttagacatcggtaatgataatattcgcgtggggctcgtgcagttttcagacactcctgtgacagagttctcactgaatacataccaaacgaaaagtgacatcctgggacacctgcgtcagttgcaactgcaaggaggatcagggttaaacacagggtctgccctgtcgtatgtctacgcaaaccacttcacagaagctggcggaagcagaataagagaacatgtgccacagctgttgctgctcctcacagccggtcagtcagaagacagctatctgcaggccgctaacgccctcacaagagctggtatcctaactttttgtgttggcgcctctcaggccaataaagctgaactggagcagatcgctttcaatccctcactcgtttatttgatggatgattttagcagtctgccggccctgcctcagcagttaattcaaccactgacaacatacgtgagtggcggagtggaggaagtcccactcgcccagcctgagagcaaaagggatatactatttctctttgatggatcagccaacttagttggccagtttcccgttgtccgggacttcctatacaaaatcattgatgaactaaacgttaaacctgaaggaactaggattgccgtggctcagtacagcgatgatgtcaaggtggagagtcggttcgacgagcatcagagcaaaccggaaatcttaaacctggtaaagcggatgaagatcaaaactggcaaagccctcaatctcggatacgcattggactacgcacaacgttatatatttgttaagagcgctgggtctaggatcgaagacggggttcttcaattcctggtgctattggttgccggcagatcatccgacagggttgacggacccgccagcaatcttaagcagtccggtgtggtaccttttatcttccaggcaaagaatgctgatccagcggagctggaacaaattgttttgtcacctgccttcatacttgccgcggaatctttaccaaagatcggcgatctccatccccagattgtaaatctactgaagtcggtgcataacggggctccagctccagtgtcgggcgagaaggatgttgtgtttctccttgacggatcagaaggagtgcgctccggcttcccactgctaaaggagtttgtgcaacgagtcgtggaatctctggacgtgggacaagacagggttagagttgccgtagtacaatactctgaccgtacccgacccgaattctacctcaatagttacatgaataaacaggacgtggtgaacgccgtccggcagcttactcttctgggggggccaacccctaacacaggcgccgccttggagtttgtgctgcggaacatactggtttcgagcgctggcagccgcatcacagagggagtgccccagcttttgatcgttctgacagctgaccggtccggcgatgatgttaggaacccaagcgttgtagtaaagcgaggcggcgccgttcccataggcattggcataggcaacgctgacattaccgaaatgcagaccataagctttattccggactttgcggtggccatcccaactttccggcaacttggtactgtgcaacaggtaatctctgaacgggtgactcagctcaccagagaagagctcagtcgtctgcagccagttcttcagccattaccatcaccaggggtgggcgggaaacgggatgttgtgttcctcattgacggatcacagtcggcaggtcctgagtttcaatacgtgagaacgctcatcgagcggttggtggactacctggacgtcgggtttgatacaacacgagttgcggttattcaattctctgatgatcccaaggtggagtttctacttaatgcccactctagcaaagacgaggtgcaaaatgccgtccagcggctcagacccaagggaggacggcaaattaacgtgggtaatgccttggagtatgtatctcgcaacattttcaagcgccctctaggttcccgaatagaagaaggcgtaccacagtttttggttcttatttcgtctgggaagtctgacgatgaggtcgatgaccccgcagtggaattgaaacagtttggtgtggccccattcaccattgcccgcaatgccgatcaggaggagctcgttaagatatctctgtcacccgagtatgtgttcagcgtgagtacatttagagagttgcccagtctcgagcaaaagctgttgacccctatcaccacgctgacttccgagcagatccagaaactgctggcttcaaccaggtatccacctcccgccgtggagtctgacgccgccgatatcgtgttcctgatcgatagctctgaaggagttagacccgatggttttgcacatataagagacttcgttagccgaatcgtacgccggcttaatatcggtccttctaaagtgagagtaggggtggtgcaattttctaatgatgtgttccctgagttttacctcaaaacgtaccgctcccaggcacctgtgctcgacgcaattcgtcgactgcgtctaagagggggaagccctcttaataccgggaaggccctcgagtttgtcgctagaaatctctttgtgaaatcagcaggtagccgcattgaagatggggtcccgcagcaccttgtcctggtacttggcggcaaaagccaagatgacgttagcaggtttgcacaggtgataaggtcaagcggcattgtctctttaggcgtgggcgacagaaatatagatcgcacagagctgcaaaccattacaaacgatcctagactggtgtttacggtgagagagttccgagagttacccaatatcgaagagagaataatgaactcatttggacctagtgctgctacacctgcgccacctggcgtagacacccctccgccatcaagacctgaaaagaagaaggctgacatcgtgtttctcttggatgggtcgattaacttccgtcgtgactcctttcaggaggtactccggttcgttagtgaaatcgtcgatacagtgtatgaagatggcgactccatccaggtgggcctcgtgcagtacaactccgacccaacagacgaattcttcctgaaggattttagcacaaagcgacagataattgacgctatcaataaagtggtgtataagggaggaaggcacgcaaacaccaaagtcggtctggaacatctgagggttaaccactttgtgccagaggcgggttcacgtctggatcagagagtgccacagattgcctttgtcattaccgggggtaaatccgtggaggacgcccaggacgtgagtctagctctcactcaaaggggtgtgaaagtgttcgctgtcggggttagaaacatcgacagtgaggaggtggggaaaatagcctcaaactcagccactgcatttcgcgtcgggaacgtgcaggaattaagtgagctcagtgagcaggtcctggagaccctgcatgatgccatgcacgaaactttatgccccggagtaactgatgctgccaaagcctgtaatcttgacgtgattctcgggttcgacgggtccagagatcaaaacgtttttgtggcacagaaaggatttgaatccaaagtcgatgcaattcttaaccggattagtcagatgcaccgggttagctgttcagggggccgatcccccaccgtgagagtcagtgtagttgccaatacccctagcggtcccgtcgaggcattcgatttcgatgaatatcaaccagaaatgttggagaagtttcggaacatgaggagtcagcacccctatgtcctaaccgaggacactcttaaggtctaccttaacaagtttcggcagtcctctcccgacagcgtcaaggtggtgatccatttcactgacggagcggacggggacctggctgatcttcatcgagctagcgaaaatctccggcaagaaggagtacgggctttaatcttagtgggcctggagcgagtagttaaccttgaaagactgatgcatctagaattcggacgggggttcatgtacgacagacctctccgcctgaacttgttggatctggattatgaactcgctgaacagctcgataatatagcagagaaggcttgttgtggcgttccttgtaagtgctcgggccagcggggagacaggggtccaatcggaagcatcggcccaaagggaattccaggggaagatggatatagaggctatcccggcgatgagggaggtcctggagaacgagggcctcctggtgtgaatggcacgcaaggattccagggatgtcccggacagcggggggtaaaaggatcccgcggttttccaggcgaaaagggagaagttggagaaatcggcctcgacggtctggatggggaggatggggataagggattgccaggtagttctggcgagaaaggaaatcctggccgacggggagacaaagggccacgcggtgagaaaggagagagaggggatgtgggcattcgtggcgacccggggaatccaggacaggacagtcaagaaaggggccctaagggggagactggtgatctgggcccaatgggtgtgccaggaagggatggggtgcctggagggcctggagaaacgggaaagaatggtgggttcgggaggcgaggccctcccggggccaagggtaataagggtgggcctggacagcctgggtttgagggagagcagggcacccgcggggcgcagggacccgcaggaccagcaggacccccagggttaattggcgagcagggtatttcaggccctaggggtagtggcggggctgccggcgccccaggagagagaggacggacagggcctttaggccgtaagggtgagcccggtgaacccggacccaagggtggcattggtaaccgagggccgcggggcgagaccggtgacgacggaagagacggcgttggaagcgagggtcgcagagggaagaagggcgaacggggctttccagggtaccctggccccaaaggaaatcccggtgaacccggactgaacggaactaccgggcccaaagggattcggggacggcgtggtaacagcgggccacctggtattgtcggccaaaaaggcgaccctgggtatcccggcccagccgggcccaaggggaatcgcggtgactccatcgaccagtgcgcgttgattcagtctatcaaggataaatgtccctgctgctacgggccccttgaatgtcccgtatttccgacggaactggctttcgctctggataccagcgagggagtgaaccaagatacctttggaaggatgcgggacgtggtactatcaatcgtaaatgacctgactattgcagagagcaactgtcccagaggtgcaagagtcgcagtggtcacatataacaatgaagtgaccacagaaatcagattcgccgattcaaagcggaagtctgtccttctagacaaaattaaaaacttacaggtggcactgacatccaagcagcagtctctggagacggctatgtcatttgtcgcccgtaacaccttcaaacgtgtgagaaatgggtttctcatgaggaaagtggccgtctttttctccaacacgcctactcgtgcctccccgcagctccgggaagccgttctcaaactgagcgatgccggaatcacaccactgttcttaacaaggcaagaggaccgccagcttattaacgcgctccagattaacaatactgctgtcgggcacgccttagtgctgccagctggccgggatctgaccgatttcctggaaaacgttctgacctgccatgtttgcctggatatctgtaatatcgatcctagctgtggtttcgggagctggcgtccaagtttccgagacaggcgggcagctgggagtgacgtcgatattgatatggcctttatcttggactctgccgaaactaccacactcttccagttcaacgaaatgaaaaagtacattgcctatcttgtccggcagctggacatgagccccgaccctaaagcctcacagcacttcgcaagggtggcggtcgtccagcatgcaccaagtgaatccgtcgataacgcctcgatgccacccgtcaaagttgaattttccttgacagactatgggagtaaggagaagctggttgactttctgtctcgaggaatgacacaactacaaggaacgcgagcgcttggatcagctatagaatatactattgaaaatgtcttcgagtcagctccaaatccccgcgaccttaaaattgtggtgcttatgctgacaggcgaggtcccagaacagcagctggaagaggctcagcgggttatcctgcaggccaagtgcaaagggtactttttcgtggtcctgggtattggtagaaaggtgaatatcaaggaagtctatacgttcgcctcagagcctaatgacgttttcttcaagttggtggataagagcaccgagctgaacgaggagcctctcatgaggtttggccgtctgctgccaagcttcgtgagctccgagaacgcattctacctgtctccagacattcggaagcagtgtgattggtttcaaggcgatcaacctacaaagaatctggttaaattcggccacaaacaggtgaacgtcccaaataacgttacctcgagtccaaccagcaacccagttacaaccaccaagccagtgaccaccaccaagcccgtgaccacaacaactaagccggtgactacaacgactaagcctgtcactataataaatcagccctccgttaaacccgcggccgctaaacccgccccagcaaaaccagtagctgctaaacccgttgcgactaaaatggccaccgtaagaccaccagtcgctgtgaagccggcaacagccgctaagcccgtcgctgccaagcctgctgcagttagaccccccgcagccgccgctgccaagcctgtggctacaaaacccgaggttcctcgcccgcaagccgcaaagccggcagccacaaaaccagccacgacaaagcccatggttaaaatgtcgagggaagtgcaggtgtttgaaatcactgagaattcagccaagctccactgggagagagctgaacctccgggcccctatttctacgaccttaccgtcacctctgctcacgaccagagcttagttctcaagcagaaccttaccgtgaccgatagagttataggcggacttctcgccgggcagacctaccatgtggctgtggtgtgttatctgcggagccaagtgcgcgcaacgtaccacggcagcttcagtacgaaaaaaagccaaccacctccaccccagccggcaagaagtgctagctcctccactatcaacttaatggtgtcaaccgaacctctggcactgacggagactgacatctgtaaattgccgaaagatgagggaacgtgccgagactttatcctgaagtggtactacgatccgaacacgaaatcttgcgccaggttttggtatggtggctgcggtgggaacgaaaacaaatttggatctcagaaggaatgcgaaaaggtgtgcgctccagtgctcgcaaagcccggtgtgataagtgtgatgggaacctag

SEQ ID NO: 145676 - DNA, 9534 bp, Artificial Sequence
  derived and/or modified sequence
atgcgaaagcaccgccacttaccgcttgtcgccgtcttttgcctgtttctctctggatttccgactacacacgcccaacagcagcaggccgacgtcaagaatggagctgccgcagatatcatttttctggtggacagttcctggaccataggtgaagaacattttcagctagtcagagaattcctatacgacgtggtcaaatctttggcagtaggtgagaatgattttcacttcgccttagtgcagttcaatggcaacccccacaccgagtttctgcttaacacctacaggacgaagcaggaggtcctgagccatatatctaacatgtcatatatcggaggcactaaccaaacaggcaagggtttggagtacatcatgcagagccacttaactaaggctgccggaagtagggctggggacggcgtgccccaagtgatcgtcgtgctgaccgacggacatagtaaagacggcctcgccctgcccagtgcagaactcaaatccgctgacgtgaacgtgttcgcaatcggcgtagaagacgcggacgaaggagcactgaaggagattgccagcgagcctctaaacatgcatatgtttaacctggaaaattttaccagcctgcacgacatcgttgggaacctcgtgagttgtgtacacagcagcgtgtcacccgagcgtgcaggagatacagagactctcaaagacatcacggctcaagactctgctgacatcatcttcctgatcgatggatctaacaacactggctcagtcaattttgcagtcatactggacttccttgttaatctcctagaaaagttacccattggaacgcagcagatcagagtgggagtcgttcagtttagcgacgaaccaagaaccatgttcagtctggacacttacagtaccaaggcacaagtgttgggtgccgtcaaagctctggggttcgcaggcggtgagctggcaaatataggtctggcgctggacttcgtggtggaaaatcactttactcgcgcagggggaagccgggtagaggagggagtgccacaggtgcttgtcctcatttccgcaggaccttcaagtgatgagataaggtacggcgtggtggctctgaagcaggcttcagtattttccttcggcctgggcgctcaagctgcctccagggccgagttacagcatatcgcaacagatgacaatctggtgttcacagtgcctgagtttagatccttcggtgatttacaggaaaagctgttgccttatatcgtgggagtggcccagaggcatatagtgctaaagcctcccaccatcgtgactcaggtgatcgaggtgaacaaacgggacatagtcttcctggtcgacgggtcttccgcacttggcttagctaactttaacgccatccgagactttatcgccaaagtcattcaacgcctggaaatcggccaagatcttatacaggtggctgtggcccagtacgctgacaccgtcagaccagagttttattttaatacacacccaaccaagagggaggttatcaccgctgttcggaaaatgaagccccttgatggttcagcgctatatacaggctccgctttggacttcgttcgcaataacctgtttacctctagcgctggctatagagccgctgagggcatcccaaaactgctcgtgctaatcacgggtgggaagagtctggacgagatctctcaaccggctcaagagttaaagcgaagcagtatcatggcctttgccattggcaataagggagcagatcaggccgagctggaagagatagccttcgattcatccctcgtgttcatcccagcggagttcagagccgcaccactccaaggtatgctgcctggattgctggcacccctcaggacactttccgggactccagaggttcacagtaacaaacgagacatcatatttctcctcgacgggtctgccaacgtcggaaagactaattttccttatgttcgtgactttgtcatgaatctggtgaattccctcgacatcggaaatgacaacattcgggtgggattagtgcagttctcagacacccctgtgaccgagttttccctgaacacctaccagaccaagtcagatatcttggggcacctccgtcagctgcaactgcagggcggaagcggtctcaacacaggcagtgcccttagctacgtgtatgcgaaccacttcaccgaggctggaggaagtcgcatcagagaacatgtaccacagctgctcctgctgcttacggcaggtcagagtgaagactcgtatctacaggctgccaacgctctcaccagagcaggaatccttactttctgcgtcggagcctctcaggccaataaagcagaattagagcagatcgccttcaatccctcactggtctacttaatggacgacttttccagcctgccagccctgccacagcagttaattcaaccccttacgacgtacgtctccggaggagtggaggaagtacctcttgcccagccagagagcaagcgcgatatcctgtttctattcgacggctccgctaaccttgtggggcagttcccggttgttcgtgacttcctgtacaagatcattgacgagcttaatgttaaaccagagggaactaggatcgcggtcgctcagtattcagacgatgtgaaagtagaatcgagatttgacgagcaccaaagtaaacctgagattctcaacctagtaaagcgcatgaaaattaagactggcaaggctcttaacttggggtatgcgttggactatgcacagaggtacatctttgtaaagagtgctgggtccagaatcgaggacggcgtgcttcaattcctcgttctcctcgtcgctggcaggagcagtgaccgcgttgacggcccagcttccaatctgaagcaatccggtgtcgtaccgtttatctttcaggccaagaatgcagatccagctgaacttgagcagattgtgctcagccccgcttttatcctcgccgcagagtcactgcctaagattggcgacctgcacccgcagatcgtgaatcttttgaaaagcgtgcacaatggagcccctgccccagtgtctggtgaaaaagatgtagtgtttctgctggacggaagcgagggagttaggtcgggctttccgctcttgaaagagttcgttcagcgggtcgtcgaaagccttgatgtcggccaggacagagtccgggtggcggtggtgcagtattcagacagaacccggcctgagttctatcttaactcttacatgaacaaacaagacgtggtgaacgctgtgcgacagctcacgctgctggggggtcctacacctaacacaggcgcagcactagagttcgttctcagaaatattttggtgtctagcgccggttcaagaatcacggagggagttccccagctgctgattgtgttgacagccgatcgctccggggacgacgtgaggaatccaagcgtcgtggtcaagcgtgggggtgctgtgcccatcggcattggcataggaaatgctgatatcaccgagatgcaaacaatttctttcatacctgattttgccgtggccatacctacattcaggcagctcgggaccgtacaacaggtgatttcggaacgggtaactcagcttactagggaggaattgtcaagactgcagccagtgctgcaacccctcccctcacctggggtcggtggcaaacgggatgtcgtctttctaatagatgggagccagtcggctgggccagagtttcagtacgttagaaccctcattgagaggctcgtagactacctggacgtgggtttcgacaccactagggtggcagtcattcagttctcagatgatcctaaggtcgagtttctactgaatgcacattcatccaaggacgaggtccagaatgcggtccagagactccgtcctaaagggggaaggcagattaatgtgggaaacgcactcgagtatgtttcccgaaacatctttaaacggccactgggcagccgcatcgaagaaggggttccacagttccttgtcttgattagctcaggtaagtctgatgacgaggtggacgatccagctgttgaactgaagcagttcggtgtggctccatttacgatcgctcgcaacgctgaccaggaagagctggtgaaaattagtctgtcgccagagtatgtgttcagtgtgtctacattccgagagctccccagtctagaacagaaactgctaactcctattaccactctgacatctgagcagattcagaagctcctcgcctccacaagataccccccacctgctgtggaaagcgatgcagcagacatcgtgttcctcatcgatagttccgaaggggtccggcctgacgggtttgcgcacataagagactttgtttcccgcatcgtgcgacggctgaatattgggccaagcaaggtgcgggtgggtgtggtgcagtttagcaacgacgtttttcctgaattctacctcaaaacctatcgctctcaagccccagtgctcgacgcaattaggcggctgaggctacgcggagggagtcccctgaataccggcaaggccctggagtttgtggcacgtaacctgtttgtaaagagcgccggttcacggatcgaagacggtgttcctcaacacctggtcctagtgctcggcggtaagtcgcaggacgatgtcagtcgctttgcacaggtgatcagatcaagtggcattgtgtctcttggggtcggggatcgcaatatcgatcgcactgagttgcaaactatcaccaacgatcccaggctggttttcaccgtgcgagagttccgtgagctacctaacatcgaagaaaggataatgaacagttttgggccaagcgcagccacccccgctcctccaggggttgataccccacctcctagtcgacccgaaaagaagaaggcagatattgtgttcctgctggacggatcaatcaatttcagacgagactcatttcaggaggtcctgcgtttcgtgtccgagattgttgataccgtatatgaagatggagattcaatccaggtggggctcgtccagtacaactctgatccaacagatgagtttttcttgaaagactttagcactaagagacagatcattgacgctatcaacaaggtggtgtacaaagggggacgacacgcaaacacaaaagtcggactggagcatctgcgtgtgaatcatttcgttcctgaagcgggatccagactagatcagcgcgtaccccagattgcttttgtcatcactggcggaaagagcgtcgaagatgctcaggatgtgagccttgcactgactcaacgcggagtcaaggtattcgctgtgggcgtgcgaaacattgactccgaagaggtaggcaagattgctagtaattctgcaaccgcctttagagtaggaaatgtccaggagctgtcagagctttctgagcaggtgcttgaaactctccacgatgctatgcacgagactctctgccctggagtgactgacgccgctaaggcttgtaacttagatgtgattttaggattcgacgggagccgggaccagaacgtgtttgtagcccagaagggatttgaaagcaaagtggacgccattctgaacagaatttctcaaatgcacagggtgtcttgttcaggcggtcgaagtcccacggtcagagtttccgtagttgccaatacacctagcggtcccgtagaggctttcgattttgatgaatatcagcccgagatgttagaaaaattccgtaatatgaggagccagcacccctacgttctgacagaggacacgcttaaggtatatctaaacaagttccggcagtcatcccctgatagtgtgaaggttgttatacacttcaccgacggggcagacggagacctggccgacctacatagagccagtgaaaacctaagacaggagggcgtccgtgcactgatcctcgtcggtctggagcgcgtggtcaacctggaacgtctgatgcaccttgagtttggtcggggatttatgtatgaccgacccctcaggctcaatctactcgacctagactacgagctggccgagcagctcgataacatagcggaaaaggcctgttgcggcgtgccgtgcaagtgtagcggtcagagaggcgaccgcggtcctatcggtagtattgggcctaaggggattcctggagaggatggataccggggttatcccggtgatgaggggggtccgggtgagcggggacctcccggagtcaacggcacgcagggatttcaggggtgccctggccaacgtggagtcaaaggatctagggggtttcccggagagaagggagaagtgggagaaatcggccttgatggcctggacggggaggacggagacaagggattacccggaagctctggagagaaaggcaatcctggtagaaggggagacaagggccctcgcggtgagaagggcgagcgcggagacgtaggcatccgaggggacccaggcaatcctggtcaggactcccaggagaggggccctaaaggggagacaggggacctggggccaatgggcgttcctggcagagatggcgtgccgggaggtcccggagagactgggaaaaacgggggatttgggaggagaggtccacctggagccaagggcaataaagggggacccggtcagcctggttttgaaggcgaacaagggactcggggtgcacaggggcctgccggtccagccggaccacctggcctgataggcgaacaggggattagcggcccacggggatccggaggggctgccggagccccaggagagagaggaaggacagggcctctgggacggaagggggagcctggcgagccgggtcccaaaggcggtattgggaatcgaggacctagaggcgagaccggagatgacggccgtgatggagtaggctccgaaggtagacgcggaaagaaaggggagcgtggatttcctgggtatccagggcctaagggtaaccccggagagccgggactgaatgggacaacaggtcccaagggaatcagggggagaaggggcaatagcggaccccctggcattgttgggcagaagggggacccgggttatcctgggcctgctggtccaaagggcaacaggggcgacagtatagaccagtgtgccctcattcaatctatcaaggacaaatgtccttgttgctatggccctctggagtgtcccgttttccccacagaattggcgtttgcattggatacttccgaaggcgtgaatcaagataccttcggacgaatgagggacgttgtgctgtccatcgtcaatgatctgaccattgccgaatcaaattgtcctcgcggtgccagagtagccgtggttacatacaacaacgaggttaccaccgaaatccgcttcgccgatagtaagcgtaaatctgttctcctggataagattaaaaacctgcaagtggctctgacgagcaaacaacagtcgttagagaccgccatgagtttcgttgcacgaaacacttttaagcgcgtgcgaaacggcttcctgatgcggaaggtggccgtgttcttctccaatacaccaactcgtgcgtccccccaactgcgcgaggccgtgctgaaactgtcagacgccggaattactccactctttctcactcgtcaggaggaccgacagctaatcaatgccctacaaattaacaatactgctgtcggtcacgccttagtgctgcctgccggacgtgatcttaccgattttctagagaacgtactgacctgccatgtatgcctggacatttgcaatatcgatccttcctgcggattcgggtcatggcggccttcttttcgggatcggagagcagcgggatctgacgtggatattgacatggctttcatcctcgatagtgccgaaactaccaccctgttccagttcaatgaaatgaaaaagtacatagcctatctcgtgcgacagcttgatatgagtccagatccaaaggcatcccagcacttcgcccgtgtggcagtagtccagcacgcaccttcagagagtgttgacaatgcgagtatgcccccagtgaaggttgagtttagtctgacagattatgggtcgaaagagaagctcgtggatttcctaagccgaggaatgacgcaactacagggaacccgggcactcggtagtgcgattgaatatactatcgaaaacgtcttcgaaagcgcgcctaatccccgtgacctgaagattgtggtgttgatgctcactggggaggttcccgaacaacagctcgaggaagcccagcgggttattctgcaggccaagtgtaaaggatatttctttgtcgtcctggggatcggcaggaaggtcaacatcaaagaagtgtatacatttgcatcagaacctaatgacgtattttttaagcttgttgacaagtccaccgagcttaacgaagagcccctcatgcgtttcgggagactgttgccttcatttgtgagcagcgagaatgccttctatttgtcgccagacattagaaaacagtgtgactggttccagggagaccagccgaccaaaaatctagtgaaattcgggcacaaacaagtaaatgtcccaaacaatgtgacatctagccccacctcgaaccccgtgacaactactaaaccagttaccaccactaagcccgtaacgactaccacaaagcccgtaacaaccaccactaagcctgttaccatcatcaatcagccttctgtcaagccagctgccgctaaaccagccccagctaaaccagttgccgctaaacccgtcgcaactaaaatggcaacagtacggccacctgtggccgttaagccggcaacagcggctaagcctgtcgccgctaaaccggctgcagtgaggccgcctgctgccgcagcagcgaaacccgtggccactaagcccgaggtgcccaggccccaggctgcaaagccagcggcaacaaaacccgcaacaacaaaaccaatggttaagatgagccgtgaagtgcaggtttttgagattacagaaaactccgctaaactccactgggaacgagctgagcctccaggaccttacttctatgatctcaccgtaacgagcgcccatgaccagagcttggtattaaagcagaacctgactgtgaccgaccgagtgatagggggtcttttagccggtcagacctaccatgtcgcggtggtctgttacctgcggtcacaggtgcgcgcaacataccatggaagcttcagcactaagaagagccagcctccacccccacaacctgcccgatccgcttcctcctccacaatcaacctcatggtatccactgagccactcgccttgaccgagaccgatatttgcaaactgccgaaggacgaaggcacgtgtcgcgactttattctgaagtggtactacgacccaaacactaagtcttgtgcacgcttctggtacggaggttgtgggggtaatgagaacaagttcgggtcgcagaaggagtgcgaaaaggtgtgcgcaccagtgctggccaaaccaggagttatatccgtcatggggacatac

SEQ ID NO: 145677 - DNA, 9534 bp, Artificial Sequence
  derived and/or modified sequence
atgcggaagcatcggcatcttcccctggttgccgtcttttgtctgttcctctccggcttccctacaacacacgcacaacaacagcaggcggacgtcaagaatggcgctgcagctgacatcatcttcctggttgattccagttggacaatcggcgaagaacactttcaactagtgagagaattcctgtacgacgtcgtcaaatcactggctgtaggggagaatgactttcacttcgcacttgttcagttcaacggcaacccccatacagagttcctgttaaacacttaccggacaaagcaggaggtcctgtcccacatcagtaacatgtcttatatcggtgggactaatcaaacaggcaaaggacttgagtacattatgcagagccatttgaccaaggcggccgggagtagggccggagatggagtcccacaggtgattgtcgtgctgacagatggccatagcaaggatggtctggccctgccaagcgctgagctgaagtcggccgacgtgaacgtcttcgccattggggttgaagatgcagatgagggcgcccttaaagagatcgcttccgagccgctgaatatgcatatgttcaatctggagaacttcacatccctgcacgatatcgtcggaaatttagtttcctgcgtgcactccagcgtcagccctgagagagccggcgatacagaaaccctcaaggatataaccgcacaggattctgccgacatcatctttctaatcgacggaagtaataatacgggatctgtaaactttgctgtcatcttagacttcctagtcaacctgcttgaaaagctgccaatcggtactcagcagatccgcgtgggagtcgtgcagttctctgacgagccaagaacaatgttctctctagacacgtatagtacaaaagcccaggtccttggcgcagtgaaggccttgggctttgcgggcggcgagctcgcgaacataggattggcgttagatttcgtcgtggagaatcactttacccgcgccggcggatcccgcgttgaagaaggcgtgccccaagtcctggtccttattagcgccgggccgagctccgacgagatccgctatggagtggtagcgctaaagcaggctagtgttttctcatttggattaggggctcaagccgcctctcgagcagaactccaacatatcgccactgatgataacctggtgtttaccgtgcctgaattccggagctttggtgatctccaggagaagcttttaccctacatagtcggagttgctcaacggcacattgttctgaagcctccaactatcgtgacccaggtgattgaggttaataagagagatatcgtgttcctggtggacggatcttcggctctaggactcgccaattttaacgcaatcagagattttattgctaaggtaattcagcggctggaaataggccaagatctgatccaagtggccgttgcccagtatgctgacaccgttaggcccgaattttactttaacacccatcccacaaaacgtgaggtcattaccgcggtacgaaaaatgaagcccttggacggaagcgctttgtacaccggaagcgctctggatttcgtgcgcaacaatctcttcaccagcagcgccggctaccgggccgcagaggggatccccaaactgctcgttctgatcaccggagggaaatctcttgatgaaattagtcaaccggcacaagaactgaagaggtcgagtatcatggctttcgctattggtaataagggcgcagatcaagcagaactcgaggaaatcgcctttgattctagcttggtatttattccggccgaatttagagcagccccgttgcagggaatgttgcccgggcttctcgctccgctgcgtactttgagtggtactccagaggtccactccaataaaagagatataatattcttgttggatggcagtgccaacgtaggaaaaaccaattttccatacgtgcgagactttgtgatgaacctggtcaacagcctcgatattgggaatgacaatattagggtaggtttagtacaattttcggacacgcccgtcacagagttttcgcttaatacctaccagactaagagcgacatccttggacacctcagacaactacagttgcagggcggatccggtcttaataccggttccgccctgtcctatgtttatgcaaaccatttcactgaagccggaggctccagaatcagagaacacgtgccgcaactgctcctgctgctcacagccgggcagagcgaagacagttacctccaggccgctaacgctctgaccagggctggcatcctcacattctgcgtcggagccagccaagcgaacaaggcagagctggagcagattgccttcaatcctagtcttgtgtacctcatggacgacttcagctcgctgcctgccctcccccagcagttgattcagcctttaactacgtacgtgagcggtggcgtcgaggaagtgccactggcacaaccggaatccaagcgtgatatactgtttttgtttgatggcagcgcaaatcttgtcggccagttccccgtggtgcgggatttcctatacaagatcatcgatgagctcaatgttaagcccgagggcacaaggatcgccgtagcccaatactccgatgatgtgaaagttgagagcagattcgatgaacaccagtccaaaccggagatccttaatctggtgaaacgcatgaaaataaagacaggtaaggcgctgaacctcggatatgccctggactacgctcagcggtacatttttgtgaagtctgccgggagccgaatcgaggacggtgtgctccagttcctggtgctactagtcgccggcagaagtagcgacagagtcgacgggccagccagcaacctcaagcaaagtggggtcgtaccttttatcttccaggctaaaaatgctgaccctgctgaattggagcagatcgttctcagtcccgcgttcatactcgccgcagaaagtcttcccaaaatcggagacctgcacccacaaattgtcaacctcctgaaaagcgttcataacggagccccagcacctgtctccggagagaaggatgtggtgttcttactcgatgggagcgaaggagtgagaagcgggttccccctccttaaggaattcgtccagagggtagtggagagcctcgatgttggtcaggatcgagtgcgcgtggccgtagtacagtactctgacaggactaggccagagttctatctgaattcatacatgaacaaacaggatgtcgtgaacgcggttcgtcagctgacgttgctgggcgggccaacacccaatacaggggcggcattggaattcgtgcttcggaacatactagtcagtagtgcaggaagcaggatcaccgagggtgttccgcaactactcattgtgttgaccgctgatcgctccggcgatgacgttcgtaatccttctgtcgtggttaagcgcggcggcgcagtcccgatcggtatcggtattggcaacgctgatattactgagatgcagaccattagttttatcccagatttcgctgtagctatccccacgttccgccagctgggaacagtccaacaggtaatctccgagcgggtcacccagctgactcgagaagaattatcgcgtctgcagccagtacttcaacctctacctagtcccggcgtaggcggaaaacgcgatgtggtgtttctaatagatggatcccagtctgcaggacctgaattccagtacgttaggacgctcatcgagaggttagttgactacctggacgtcggcttcgacactacacgtgttgctgtgattcagttttctgatgatcccaaagtagaattcctgcttaatgcacattcatcaaaggatgaggtgcagaatgctgtccaacggctgagacctaaaggcgggagacagatcaacgttggaaacgcattggaatacgtcagccgcaatatcttcaagcggccccttggtagccgaattgaagagggggtgccccagtttctggttctcatctcatccggaaaaagtgatgacgaggttgacgatccagccgtggagcttaagcagttcggagtcgccccctttaccattgcccgaaatgctgaccaggaggaacttgtcaagatcagcttgagccctgaatatgtcttctcagtttccacattcagggaacttcccagcctggagcaaaaattgttaacaccaattaccacactgacatcagaacaaatccagaaattacttgcctccacaaggtaccctcctcccgccgtcgaatcagacgccgccgacattgtattcttgatagacagctccgagggcgtccgtcccgatggtttcgcccatatcagagactttgtctctagaattgttcgccgattgaatattggaccatccaaagttagagtgggtgtcgtccaatttagtaatgatgtgttcccggagttctatctcaagacctaccggtctcaagccccagtcctagatgcgatcaggcggctgcgcctacggggcggctctcccctcaacaccgggaaagctttagagtttgtggctcggaacctgtttgtcaagtcggctggctccaggatagaagatggagttccccagcatcttgtcctcgtattgggaggaaaatctcaggacgatgtctcgcggtttgcgcaggttatccgctcttctggcattgttagtttgggagtgggtgaccgcaacatcgacagaaccgaattacagaccatcactaacgacccccggttggtttttaccgtgagggagtttcgcgaactgcccaatattgaagaacgaatcatgaatagcttcggcccatctgcagccactccagctcccccaggcgtggatacacctcctccctctcgccctgagaagaagaaggccgatattgtcttcctgctggacggatccatcaactttagacgggatagcttccaagaggtcctgcgattcgtgagtgagatcgtggacaccgtatacgaggatggtgactcaatacaggttgggctggtgcagtataatagcgaccccaccgacgagtttttccttaaagactttagtaccaaacgccagattatcgatgcgatcaacaaagtggtctataagggagggaggcacgcaaacacaaaggtggggttggagcaccttcgggttaaccacttcgtaccagaagcagggtccaggctagatcagcgggtaccccaaatcgccttcgttattacaggagggaagtctgtcgaggacgcccaagacgtctctctcgcactgacccaacgcggggtgaaagtctttgccgtgggggttcggaatattgacagcgaagaggtgggaaagatcgccagcaactctgcaaccgcctttagggtaggaaatgtgcaggagttatctgaactatctgaacaagtgcttgaaactttgcatgatgccatgcatgaaactctgtgccccggagtgactgacgctgccaaagcttgtaatctcgatgtcatcctgggttttgacggcagccgggaccagaatgtcttcgtcgcgcaaaaaggcttcgagagtaaagttgacgcaatcctaaacaggatttcacagatgcaccgcgtttcctgtagcggcggtcgctctccaactgtgagagtgtccgtagtggccaatacgccttctggccccgtggaggctttcgacttcgatgaatatcagcccgaaatgctggagaaatttcgcaacatgaggtcccagcatccatacgtcctcacagaggacacactgaaagtttacctaaacaaatttcgacagtcctccccagatagtgtcaaggtggtcattcactttaccgatggggccgacggcgacctcgcagaccttcaccgggcgtccgagaatctaagacaggagggtgtccgggccctgattctggtggggttagagagggtggtcaacctagagcgtctgatgcacctggagtttgggagaggcttcatgtacgatcgacccctgaggctgaatctgctggacctcgactacgagttagccgagcagctggacaacattgctgaaaaggcctgttgtggggtgccctgtaaatgtagtgggcaacgcggtgaccgcggtcctattggatcaatcggccccaagggaatcccgggcgaggatggctacagaggttaccccggagacgaaggcggacccggcgagaggggtccgccgggggtaaacggtacacagggattccagggatgtcccgggcagcgaggcgtgaaggggagccggggtttcccaggcgaaaagggcgaggtcggtgaaattggactggatggtctggatggagaggacggagataaagggctgcctgggtcctctggcgagaagggaaacccgggtcgtagaggtgataagggccctaggggagagaagggagaacggggggacgtgggcattaggggcgaccccgggaatcctggccaagactcacaggagcgtgggcccaaaggcgagacaggtgacttaggacccatgggggtacctggccgcgacggagtcccaggcggccccggcgaaaccggaaagaacggcggatttggacggcgaggcccccccggagcgaagggcaacaaagggggccccggccagcccggctttgagggagaacagggcacccggggagcacagggacccgcaggacctgccggcccacctggcctcataggcgagcaaggtattagcggtccacggggaagtggaggggccgcaggggcgcccggtgaacgcggtcgcacaggaccactagggcgaaaaggcgaacccggcgagcccggcccaaagggagggattggtaacagagggcctagaggggagaccggggatgatggcagggatggtgtggggtccgaggggaggcgtggaaagaagggtgagagaggtttccccggctaccctggtccaaaagggaatccaggcgaaccgggcctgaatggaacaacaggcccaaagggaatcagaggtcgaaggggcaattcagggcccccaggcattgtcggtcagaagggcgacccaggttatcccggtcccgccgggccaaaagggaatcggggagattcaatcgaccagtgtgccctaatacaaagcatcaaagataagtgtccatgttgttatggtcctttggagtgtcccgttttccccacagaactagcctttgcattggacacttccgaaggcgtgaatcaagacacgtttggcagaatgcgcgacgtcgtcttgtctattgtcaacgatcttactatcgctgaatctaattgcccgcggggggctagagtagcagtcgtgacatacaacaacgaggtcacgacagaaattaggttcgctgattcaaaacgtaagagtgttcttctggacaagatcaagaatctgcaggtggcacttacatccaagcagcagtccctcgaaacggcaatgtcattcgtggccaggaatactttcaagagagttcgcaatggtttcctcatgagaaaagtggctgtcttcttttctaatactccaacaagggcatcaccccagctgcgcgaggcagtactgaaattatccgatgcgggaataacgccattatttctcacaagacaggaagacaggcagcttattaatgccctgcagattaacaatactgccgttggtcatgcacttgtgttacctgcaggccgtgatctgaccgacttcctcgagaacgtacttacatgccatgtgtgcctcgatatttgtaatatcgaccccagttgcggcttcggctcttggagaccctcatttcgggatcggcgggccgccgggtctgatgtagacatcgatatggcattcattctagacagtgctgagaccaccacgctcttccagttcaacgagatgaaaaagtatatcgcgtacctggtcagacaacttgacatgtcaccggatcccaaagccagccaacactttgcaagagtggctgtcgtgcaacatgctccttctgagagcgtagacaacgcaagcatgccacctgtcaaggtggagttcagcttaactgattatggcagcaaggaaaaactggtcgatttccttagcaggggaatgacccaattgcaggggaccagagcccttggctccgccattgagtacaccattgagaatgtgttcgaatctgcacccaacccaagagatcttaaaatcgtggttctcatgctcaccggcgaggtccctgagcagcaactagaagaagctcagagagtgatcctccaagccaagtgtaaaggctacttttttgttgtcctggggattggtcgcaaggtaaacatcaaagaggtttatacttttgcttctgaacccaatgacgtttttttcaagctggtcgataagagcactgagctgaatgaggagcctctgatgcggttcgggcgactcctccctagcttcgtttcatcagaaaatgcgttctatctctctcctgacataagaaagcaatgtgactggttccagggggaccaacccaccaaaaacctggtaaaatttggtcataagcaggtaaacgtgcccaacaacgttacatcaagccccaccagtaatccggtcaccacaacaaaacctgtcactaccaccaagcccgttaccaccacaactaagccagtgactacaactactaaacccgtgacaatcattaatcaaccgtctgtaaaaccggcagccgctaaacctgctcccgctaagcctgttgccgccaaaccagtcgccacaaagatggccaccgtacgccctcccgtcgcagtgaagcccgcgactgctgccaaacctgtggcggctaaacccgccgctgtgcgaccccctgccgctgcagcggctaaacccgttgccacaaagccagaggtgccccggcctcaggcagccaagccagccgcaacaaagcctgctactacgaagcccatggtaaaaatgtcacgagaagttcaggtctttgagataaccgaaaattccgccaagctccactgggaaagagcagagccccctggcccctatttctatgatctcaccgttacatccgcgcacgatcaatcactggtgctcaagcagaatttgaccgtgacagatagggtaatcggtggcctcctcgccggccaaacttaccacgtcgccgtggtctgctatttgagaagccaggtgagagctacataccacggtagctttagtacgaagaaatcacagcctcccccaccgcagcctgcgcggagtgcgagcagttccacgattaatttgatggtgtctacggaaccccttgcactgactgaaacggacatctgtaaactcccaaaggatgaagggacttgccgggattttatactgaagtggtactatgatcccaataccaaaagctgtgccagattttggtacggagggtgtggagggaacgagaataaattcgggagccagaaggaatgcgagaaggtctgtgcacctgtgttagctaaaccaggagttatttccgttatgggaacatag

SEQ ID NO: 145678 - DNA, 9534 bp, Artificial Sequence
  derived and/or modified sequence
atgaggaaacacaggcatctcccactggtcgctgtcttttgtttgtttttgtcaggattcccaaccacgcacgcacagcagcagcaagcagacgtgaaaaacggtgcagcagccgacatcatcttcctggttgactcctcctggaccataggtgaagaacacttccagctcgtccgcgaattcctttatgatgtggtcaagtccctggccgtaggcgagaatgatttccattttgctcttgtgcagttcaacggcaatccacatacagaatttttgctgaatacttaccgtaccaaacaggaggttctgtcacatatctcaaacatgtcttatattgggggcacaaatcagacggggaaagggcttgagtatattatgcagtcacacctcaccaaggcggcaggctctcgcgccggcgacggtgttcctcaagttattgtcgttctgacagatggacactctaaggacggtctggctcttcccagtgctgaattgaaatctgcggacgttaatgtatttgctataggcgtggaagacgctgacgaaggagcattgaaggagattgcatccgagcccttgaacatgcatatgtttaatctcgagaactttacttccctgcacgacatcgtcggcaatttggtatcctgcgtacacagtagtgtgagcccagagagagctggtgacactgagactttaaaagacataacagcccaggacagcgctgacattatttttttgattgacgggtccaacaatactggtagcgttaactttgctgtaattcttgatttcctcgtgaacctgctcgagaagttacccattggaacacagcaaattcgtgttggcgtggtgcagttttcagatgaaccccggactatgttttctctcgacacctattctacaaaagcccaagttctcggagcggttaaggcactaggattcgcaggtggtgaactggccaacatcgggttagctcttgacttcgtggtagagaaccattttaccagagctggtgggtcccgcgttgaggagggagtgccccaagtcttggttctgatttctgcgggcccatcatctgatgaaatacgatatggggtagttgcactcaagcaggcctctgtctttagctttggattgggcgcacaggccgcttctagagcagaactccagcacatcgctacagatgacaatttagtgttcacagtccccgagttccggtctttcggtgacctgcaagagaaactgctgccatacatcgtcggagtagcacagcgccacatagttctgaaacccccaacaatcgtgacacaagtgatagaagtaaacaaacgagacattgtgtttctagtggatggctcttccgccctaggattggctaactttaacgcaatcagagattttatcgccaaggtaatccaacgcttggaaatcggccaggatcttattcaggttgctgtggctcaatatgcggacacagtacgaccagagttttactttaacacccaccccacaaaaagagaggtgattaccgccgtcaggaaaatgaaaccactcgacgggtctgcactgtatacgggctccgcactcgattttgtgcgcaacaatcttttcacatcttctgccggatatagggccgccgagggaatcccaaaactgttagtcctgatcactggaggtaagtccctggacgaaatttcccaaccagctcaagagttaaaaagatcttccattatggccttcgcgataggaaataaaggggcggatcaggccgaactcgaagagattgcgttcgactcctcacttgtcttcattccagccgaattccgtgccgcacctctgcagggcatgctgccaggtctattagccccactccgtacccttagcgggacccccgaggttcatagtaataagagagacatcatatttctgctagatggttctgcaaacgtgggaaagacaaacttcccctacgttagggacttcgtaatgaatttagttaattctctcgacatcggcaacgacaacataagagttggattggtccagttctccgacacaccagttacggaattttcattaaacacctatcagaccaagtccgacatactgggacaccttcgacagctacaactgcagggcgggtccggcctcaacactggctctgccctatcttacgtatacgccaaccacttcaccgaggccggaggaagccgcattcgagaacacgtgccgcaactgctgttactgctaaccgctggccagagtgaggattcttacctgcaagctgctaacgccctgactcgagcgggtatcctaaccttctgtgtcggtgcctctcaggcaaataaggccgagctcgaacagatcgcttttaatccttctcttgtgtatctcatggacgacttttccagtttacccgcccttccacagcaactgatccagcccctgacaacctatgtttcagggggcgtggaagaggttcccctcgcccaacccgagagtaagcgtgatattctttttctgttcgacgggtcagctaaccttgtaggccagtttccagtcgtgcgcgactttctgtataagattatcgacgaattgaacgttaagccagagggtacgagaatagccgttgctcaatattctgacgatgtgaaggtggagtccagatttgatgagcatcaatcaaaaccagaaatcctgaatctggtcaaacgtatgaagattaaaacgggcaaggccctgaatctcgggtacgctctcgattacgcacagcgttatatatttgtcaaatctgccgggtctaggatcgaggatggcgttttgcagttcctggtgttattagtcgcagggcgctcctccgatcgagtcgatggcccagcgagcaatcttaagcagagcggtgtggtgccctttatatttcaagcaaagaacgccgacccggctgagctcgaacaaatcgttttaagccccgcgttcattttggctgctgagtccctgccaaaaattggagaccttcacccccaaatagttaacttgctaaaatctgtgcataacggcgcccctgcaccagtgagcggtgaaaaagatgtcgtctttctgctagatggtagcgaaggagtaagatccggatttcctctgctgaaggaatttgttcagagggtcgtcgagtccctggatgtaggccaggacagggtccgagtagccgtcgttcaatacagtgaccgaacaaggcctgaattttatctgaactcttatatgaacaaacaggatgtggtgaacgcagtgcggcagttaacacttctgggcggtcccacccccaacacaggagcagctttggaatttgtgttacggaatatactcgtctcttctgccggatccagaattacagagggggtgcctcaactattaatagtccttaccgctgaccgcagcggcgacgatgttagaaatcctagcgttgtggtgaagcggggaggtgcggtgccgataggaatcgggataggaaacgcagacattacagaaatgcagacaatatcctttataccagacttcgctgtagcaataccaacctttagacaattgggcactgttcagcaggtaatctcagaaagggtgacccagctgacccgagaagaactttctagactccaacccgtactacaaccccttccatccccaggcgtgggcggcaaacgagacgttgtgtttctaatcgacggctcacagtctgccggcccagagttccagtacgtgagaacccttatcgagaggctcgtggattacttggacgtcggcttcgacactacccgcgtagcggtgatccaattctctgacgacccaaaagtggaattcctcctgaacgcccactcttcaaaagacgaagtgcagaacgccgttcagcgcttaagacctaagggcgggcgacagattaacgtcgggaatgccctggaatatgtgagccggaatatatttaagcgccccttgggcagtagaattgaggaaggcgtgcctcaatttctcgtgcttattagttcaggaaaatctgacgacgaggttgacgatcccgcagtagaattaaaacagtttggagtggcgccatttaccatcgctaggaacgctgatcaggaagaattggtgaaaatctctctctctcccgagtacgtattctctgtaagcactttccgcgaacttccctcattagagcagaaacttctgacgcccatcaccacgctcacatccgaacagatccaaaaattgctggcctcgacaagataccctccccccgccgttgagtccgatgccgccgatatagtgttcttaatcgatagcagcgagggagtgcgtcccgatggcttcgcccacatccgggatttcgtttcaagaattgttcgtcgcctgaatatcggacctagtaaagtgagagtcggagttgtgcaatttagtaatgacgtctttcccgagttctatctcaagacgtatagatcccaggcgccggtcctcgacgccatccgacgacttcgcctccgcggcggcagccctctcaacactggtaaagccctcgaatttgtggcaaggaatttatttgttaagtcagccgggtctaggatagaggacggcgtgcctcaacacttggtgctggtcctgggtggaaagagccaggacgatgtctcgaggtttgcccaagttattcgaagttccgggattgtaagtctgggggttggagacagaaatatcgacagaactgagttgcagactatcacaaacgatcctagactggtcttcactgtccgcgaatttagagagcttccgaacattgaggaacggattatgaattcctttggaccttccgctgccactcctgctcccccaggggtcgatactccacctccatcacggcccgagaaaaagaaagctgacatcgtgttcctgctggacggatcaattaatttccgtagggattcctttcaggaggtgctgcggttcgtatcagaaatcgttgacacagtctacgaggacggcgacagcatccaggtcggtttagttcagtacaattctgatcctactgacgaattctttctaaaagatttttctacaaaacgtcagatcatcgatgcgattaacaaagtggtatataaagggggtcgacatgccaatacaaaggtcggactggaacatctcagagtcaaccatttcgttccagaagctgggtcccgcctcgaccagcgcgtcccccagatcgcatttgtcatcactggaggtaaatctgtagaagacgcacaggacgtttcccttgctctgactcaaaggggggtcaaagtttttgctgtaggagttcgaaatattgactccgaggaagtcggcaaaatcgcctcaaattcagccacagctttccgagtgggaaacgtacaagaattatcagagttatcagaacaggtgttagagactttgcacgacgccatgcatgaaaccttgtgccccggagtgacggatgccgctaaggcctgcaacctagacgtcattttgggatttgatggtagcagagatcagaacgtattcgtcgcacagaaagggttcgaatctaaagtggatgctattctcaatagaatctcccagatgcaccgggttagctgctccggtggacgctcaccgacagtgcgcgtctcagtcgtggccaatacgccctccggaccagtcgaggctttcgactttgatgaataccagcccgagatgctagaaaaattcaggaatatgagaagccaacacccctacgtactaaccgaggatacattaaaagtgtaccttaataagtttagacagagctcccctgattccgtcaaggtcgttatacacttcacagacggcgccgacggcgatcttgctgacctccacagagcctcagaaaatttgagacaagaaggcgtgagagcactcatcttagttggactagagagagtggtaaacctggagcgtctcatgcacctagaattcggcaggggctttatgtatgataggccgttaaggcttaacttattggatctggactacgaactagctgagcaactcgacaacatcgccgagaaagcttgctgcggggtgccttgtaagtgttcggggcagagaggagatcgcggtcctatcggcagtatcgggcccaaaggaattcccggcgaggacggctatagaggttatcctggagatgaaggtggccctggggagcgcggcccacctggcgtcaatggtactcagggcttccaaggatgtccaggacagaggggggtgaagggatcacgaggtttccctggagagaaaggggaagtaggtgaaatcggattagatggcctggacggggaggacggcgacaagggattaccagggtccagcggagaaaaagggaatccagggagaaggggtgataaaggtcctcgtggcgagaagggagagagaggcgatgtaggaatcagaggggatcccggtaaccctgggcaggacagccaggagcggggcccgaagggagagaccggcgacttagggcctatgggtgtcccagggagagacggcgtaccaggcggtcccggcgagacagggaagaacggtggcttcgggcgccggggaccacctggggctaaaggaaataagggcggacccggccaacctggctttgaaggcgaacaaggtacaagaggtgctcaaggccccgcgggaccggcaggacccccgggcctcatcggcgagcaaggtatcagcggtccacgcggcagtgggggtgccgccggggctcccggagaacgcggccgcacaggtcctctaggccggaaaggggaacctggagaacccgggccaaagggtggaatcggaaaccgcggaccaagaggtgagactggagatgacgggagagacggtgtgggctcagaaggccggcgagggaaaaaaggtgagcgcggctttccgggatatcccggtccaaaaggtaatcctggcgagcccgggctgaatgggactacaggacccaaaggaatcagggggagacggggcaacagtggacctcctggtatagtgggacagaagggagatccgggctatccaggcccagccggacctaaaggcaatcggggcgattctatagatcagtgcgctttaatccagagcataaaagacaagtgcccatgctgttatggcccccttgaatgccccgtctttccaaccgagcttgcatttgctctcgatacaagtgaaggcgtgaatcaagacacctttggtcgcatgagagacgttgtgctaagcattgtaaacgacctgactatcgcagagtccaattgcccaagaggcgcccgggtcgcagtcgtcacatacaacaacgaagtgaccacagagatccgctttgcagattctaaaagaaaatccgtactcctcgacaagataaaaaatttacaggtggccctgacgtcgaaacagcagtcgcttgagacagctatgtccttcgttgctagaaatacctttaagagagtgcggaatggatttttgatgagaaaggttgctgtattcttttctaacaccccaacccgtgcatcgccgcaactcagagaagctgttctaaagttgtctgacgctgggattacgcctctgtttctgacacgtcaggaggaccgccagcttattaacgcattacaaattaacaacaccgctgtcggccatgccctggttctgcccgctgggagagatctgaccgattttttagagaatgtgctcacctgccacgtgtgcctggacatttgcaacattgacccctcctgcggcttcggctcttggagaccatcattccgggataggagggccgccggatccgatgtggacatagacatggcctttattttagattctgctgaaaccacaaccttattccaattcaacgagatgaagaagtatatcgcctatctggtcagacaacttgacatgtcacccgatccaaaagccagccagcacttcgcccgggtagctgtcgtgcagcacgcacctagcgaaagcgtagacaatgcttcgatgccgcctgtgaaagtggagttcagtctcaccgactatggaagtaaggagaagctcgtggatttccttagtcgtgggatgactcagcttcaaggcacacgcgccttgggctccgctatcgaatataccatagagaatgtgttcgagtcagcgccaaatccaagggacctaaagatcgttgtacttatgctcactggagaagtgcctgaacagcaactggaggaagcacagagggtgatactgcaagcaaagtgtaaagggtatttcttcgtggtcctgggtattggtaggaaagtaaatattaaggaagtatacacttttgcatctgaaccaaatgatgtattcttcaagcttgtcgataagtctacagagctgaatgaagagcctctcatgagattcggacggctgctaccttccttcgtgagtagcgagaatgcattctatctgagccccgacatccgtaaacagtgcgattggtttcaaggagatcagcctaccaaaaatttagttaagttcggacacaaacaggttaacgtgccaaacaatgtcacatcttcccctacatcaaatcccgttacaacaactaaacccgtgactactactaagcccgtgacaacgacaacaaagccagtaactacaacaactaaacctgtcaccataatcaaccaaccttccgttaagcctgccgctgcaaaacccgcaccagcgaaaccagtggcagcaaagcctgtggctaccaagatggctaccgtacgcccacctgtagccgtgaaacccgccaccgccgcaaaacctgtcgcagccaagcctgccgcagttcgtccccccgcagccgctgccgctaagcccgtggccaccaagcctgaagttcctcgcccccaggccgctaaacctgccgccacaaagcccgccaccaccaaacctatggtcaagatgagcagagaggtgcaagtttttgagattacggaaaactcagcaaaacttcactgggagcgtgccgagccccctggcccgtatttctacgacctgacggtcactagtgcccacgaccagagcctcgttttaaagcagaatctgactgtcactgaccgtgttataggcggactacttgctggccaaacctaccatgtggccgttgtctgttatcttcgaagccaggtccgggccacataccacggtagcttctcaaccaaaaagtctcaaccgccacctcctcagccagcccgaagtgcaagttcgagtacaattaatttaatggtgagcactgaaccactggccctgactgaaacggacatctgcaaactacccaaagatgagggaacctgtcgtgacttcattctcaagtggtactatgatccaaatacaaaatcctgcgcacgcttttggtatgggggatgcggaggcaacgaaaataagttcggctcacagaaagaatgcgaaaaagtctgtgctccagtgctggcaaagccaggtgtgatttctgtaatgggtacttag

SEQ ID NO: 145679 - RNA, 9534 nt, Artificial Sequence
  derived and/or modified sequence
augcggaagcaucggcaucuuccccugguugccgucuuuugucuguuccucuccggcuucccuacaacacacgcacaacaacagcaggcggacgucaagaauggcgcugcagcugacaucaucuuccugguugauuccaguuggacaaucggcgaagaacacuuucaacuagugagagaauuccuguacgacgucgucaaaucacuggcuguaggggagaaugacuuucacuucgcacuuguucaguucaacggcaacccccauacagaguuccuguuaaacacuuaccggacaaagcaggagguccugucccacaucaguaacaugucuuauaucggugggacuaaucaaacaggcaaaggacuugaguacauuaugcagagccauuugaccaaggcggccgggaguagggccggagauggagucccacaggugauugucgugcugacagauggccauagcaaggauggucuggcccugccaagcgcugagcugaagucggccgacgugaacgucuucgccauugggguugaagaugcagaugagggcgcccuuaaagagaucgcuuccgagccgcugaauaugcauauguucaaucuggagaacuucacaucccugcacgauaucgucggaaauuuaguuuccugcgugcacuccagcgucagcccugagagagccggcgauacagaaacccucaaggauauaaccgcacaggauucugccgacaucaucuuucuaaucgacggaaguaauaauacgggaucuguaaacuuugcugucaucuuagacuuccuagucaaccugcuugaaaagcugccaaucgguacucagcagauccgcgugggagucgugcaguucucugacgagccaagaacaauguucucucuagacacguauaguacaaaagcccagguccuuggcgcagugaaggccuugggcuuugcgggcggcgagcucgcgaacauaggauuggcguuagauuucgucguggagaaucacuuuacccgcgccggcggaucccgcguugaagaaggcgugccccaaguccugguccuuauuagcgccgggccgagcuccgacgagauccgcuauggagugguagcgcuaaagcaggcuaguguuuucucauuuggauuaggggcucaagccgccucucgagcagaacuccaacauaucgccacugaugauaaccugguguuuaccgugccugaauuccggagcuuuggugaucuccaggagaagcuuuuacccuacauagucggaguugcucaacggcacauuguucugaagccuccaacuaucgugacccaggugauugagguuaauaagagagauaucguguuccugguggacggaucuucggcucuaggacucgccaauuuuaacgcaaucagagauuuuauugcuaagguaauucagcggcuggaaauaggccaagaucugauccaaguggccguugcccaguaugcugacaccguuaggcccgaauuuuacuuuaacacccaucccacaaaacgugaggucauuaccgcgguacgaaaaaugaagcccuuggacggaagcgcuuuguacaccggaagcgcucuggauuucgugcgcaacaaucucuucaccagcagcgccggcuaccgggccgcagaggggauccccaaacugcucguucugaucaccggagggaaaucucuugaugaaauuagucaaccggcacaagaacugaagaggucgaguaucauggcuuucgcuauugguaauaagggcgcagaucaagcagaacucgaggaaaucgccuuugauucuagcuugguauuuauuccggccgaauuuagagcagccccguugcagggaauguugcccgggcuucucgcuccgcugcguacuuugagugguacuccagagguccacuccaauaaaagagauauaauauucuuguuggauggcagugccaacguaggaaaaaccaauuuuccauacgugcgagacuuugugaugaaccuggucaacagccucgauauugggaaugacaauauuaggguagguuuaguacaauuuucggacacgcccgucacagaguuuucgcuuaauaccuaccagacuaagagcgacauccuuggacaccucagacaacuacaguugcagggcggauccggucuuaauaccgguuccgcccuguccuauguuuaugcaaaccauuucacugaagccggaggcuccagaaucagagaacacgugccgcaacugcuccugcugcucacagccgggcagagcgaagacaguuaccuccaggccgcuaacgcucugaccagggcuggcauccucacauucugcgucggagccagccaagcgaacaaggcagagcuggagcagauugccuucaauccuagucuuguguaccucauggacgacuucagcucgcugccugcccucccccagcaguugauucagccuuuaacuacguacgugagcgguggcgucgaggaagugccacuggcacaaccggaauccaagcgugauauacuguuuuuguuugauggcagcgcaaaucuugucggccaguuccccguggugcgggauuuccuauacaagaucaucgaugagcucaauguuaagcccgagggcacaaggaucgccguagcccaauacuccgaugaugugaaaguugagagcagauucgaugaacaccaguccaaaccggagauccuuaaucuggugaaacgcaugaaaauaaagacagguaaggcgcugaaccucggauaugcccuggacuacgcucagcgguacauuuuugugaagucugccgggagccgaaucgaggacggugugcuccaguuccuggugcuacuagucgccggcagaaguagcgacagagucgacgggccagccagcaaccucaagcaaaguggggucguaccuuuuaucuuccaggcuaaaaaugcugacccugcugaauuggagcagaucguucucagucccgcguucauacucgccgcagaaagucuucccaaaaucggagaccugcacccacaaauugucaaccuccugaaaagcguucauaacggagccccagcaccugucuccggagagaaggaugugguguucuuacucgaugggagcgaaggagugagaagcggguucccccuccuuaaggaauucguccagaggguaguggagagccucgauguuggucaggaucgagugcgcguggccguaguacaguacucugacaggacuaggccagaguucuaucugaauucauacaugaacaaacaggaugucgugaacgcgguucgucagcugacguugcugggcgggccaacacccaauacaggggcggcauuggaauucgugcuucggaacauacuagucaguagugcaggaagcaggaucaccgaggguguuccgcaacuacucauuguguugaccgcugaucgcuccggcgaugacguucguaauccuucugucgugguuaagcgcggcggcgcagucccgaucgguaucgguauuggcaacgcugauauuacugagaugcagaccauuaguuuuaucccagauuucgcuguagcuauccccacguuccgccagcugggaacaguccaacagguaaucuccgagcgggucacccagcugacucgagaagaauuaucgcgucugcagccaguacuucaaccucuaccuagucccggcguaggcggaaaacgcgaugugguguuucuaauagauggaucccagucugcaggaccugaauuccaguacguuaggacgcucaucgagagguuaguugacuaccuggacgucggcuucgacacuacacguguugcugugauucaguuuucugaugaucccaaaguagaauuccugcuuaaugcacauucaucaaaggaugaggugcagaaugcuguccaacggcugagaccuaaaggcgggagacagaucaacguuggaaacgcauuggaauacgucagccgcaauaucuucaagcggccccuugguagccgaauugaagagggggugccccaguuucugguucucaucucauccggaaaaagugaugacgagguugacgauccagccguggagcuuaagcaguucggagucgcccccuuuaccauugcccgaaaugcugaccaggaggaacuugucaagaucagcuugagcccugaauaugucuucucaguuuccacauucagggaacuucccagccuggagcaaaaauuguuaacaccaauuaccacacugacaucagaacaaauccagaaauuacuugccuccacaagguacccuccucccgccgucgaaucagacgccgccgacauuguauucuugauagacagcuccgagggcguccgucccgaugguuucgcccauaucagagacuuugucucuagaauuguucgccgauugaauauuggaccauccaaaguuagagugggugucguccaauuuaguaaugauguguucccggaguucuaucucaagaccuaccggucucaagccccaguccuagaugcgaucaggcggcugcgccuacggggcggcucuccccucaacaccgggaaagcuuuagaguuuguggcucggaaccuguuugucaagucggcuggcuccaggauagaagauggaguuccccagcaucuuguccucguauugggaggaaaaucucaggacgaugucucgcgguuugcgcagguuauccgcucuucuggcauuguuaguuugggagugggugaccgcaacaucgacagaaccgaauuacagaccaucacuaacgacccccgguugguuuuuaccgugagggaguuucgcgaacugcccaauauugaagaacgaaucaugaauagcuucggcccaucugcagccacuccagcucccccaggcguggauacaccuccucccucucgcccugagaagaagaaggccgauauugucuuccugcuggacggauccaucaacuuuagacgggauagcuuccaagagguccugcgauucgugagugagaucguggacaccguauacgaggauggugacucaauacagguugggcuggugcaguauaauagcgaccccaccgacgaguuuuuccuuaaagacuuuaguaccaaacgccagauuaucgaugcgaucaacaaaguggucuauaagggagggaggcacgcaaacacaaaggugggguuggagcaccuucggguuaaccacuucguaccagaagcaggguccaggcuagaucagcggguaccccaaaucgccuucguuauuacaggagggaagucugucgaggacgcccaagacgucucucucgcacugacccaacgcggggugaaagucuuugccguggggguucggaauauugacagcgaagaggugggaaagaucgccagcaacucugcaaccgccuuuaggguaggaaaugugcaggaguuaucugaacuaucugaacaagugcuugaaacuuugcaugaugccaugcaugaaacucugugccccggagugacugacgcugccaaagcuuguaaucucgaugucauccuggguuuugacggcagccgggaccagaaugucuucgucgcgcaaaaaggcuucgagaguaaaguugacgcaauccuaaacaggauuucacagaugcaccgcguuuccuguagcggcggucgcucuccaacugugagaguguccguaguggccaauacgccuucuggccccguggaggcuuucgacuucgaugaauaucagcccgaaaugcuggagaaauuucgcaacaugaggucccagcauccauacguccucacagaggacacacugaaaguuuaccuaaacaaauuucgacaguccuccccagauagugucaagguggucauucacuuuaccgauggggccgacggcgaccucgcagaccuucaccgggcguccgagaaucuaagacaggaggguguccgggcccugauucuggugggguuagagaggguggucaaccuagagcgucugaugcaccuggaguuugggagaggcuucauguacgaucgaccccugaggcugaaucugcuggaccucgacuacgaguuagccgagcagcuggacaacauugcugaaaaggccuguuguggggugcccuguaaauguagugggcaacgcggugaccgcgguccuauuggaucaaucggccccaagggaaucccgggcgaggauggcuacagagguuaccccggagacgaaggcggacccggcgagagggguccgccggggguaaacgguacacagggauuccagggaugucccgggcagcgaggcgugaaggggagccgggguuucccaggcgaaaagggcgaggucggugaaauuggacuggauggucuggauggagaggacggagauaaagggcugccuggguccucuggcgagaagggaaacccgggucguagaggugauaagggcccuaggggagagaagggagaacggggggacgugggcauuaggggcgaccccgggaauccuggccaagacucacaggagcgugggcccaaaggcgagacaggugacuuaggacccauggggguaccuggccgcgacggagucccaggcggccccggcgaaaccggaaagaacggcggauuuggacggcgaggcccccccggagcgaagggcaacaaagggggccccggccagcccggcuuugagggagaacagggcacccggggagcacagggacccgcaggaccugccggcccaccuggccucauaggcgagcaagguauuagcgguccacggggaaguggaggggccgcaggggcgcccggugaacgcggucgcacaggaccacuagggcgaaaaggcgaacccggcgagcccggcccaaagggagggauugguaacagagggccuagaggggagaccggggaugauggcagggauggugugggguccgaggggaggcguggaaagaagggugagagagguuuccccggcuacccugguccaaaagggaauccaggcgaaccgggccugaauggaacaacaggcccaaagggaaucagaggucgaaggggcaauucagggcccccaggcauugucggucagaagggcgacccagguuaucccggucccgccgggccaaaagggaaucggggagauucaaucgaccagugugcccuaauacaaagcaucaaagauaaguguccauguuguuaugguccuuuggagugucccguuuuccccacagaacuagccuuugcauuggacacuuccgaaggcgugaaucaagacacguuuggcagaaugcgcgacgucgucuugucuauugucaacgaucuuacuaucgcugaaucuaauugcccgcggggggcuagaguagcagucgugacauacaacaacgaggucacgacagaaauuagguucgcugauucaaaacguaagaguguucuucuggacaagaucaagaaucugcagguggcacuuacauccaagcagcagucccucgaaacggcaaugucauucguggccaggaauacuuucaagagaguucgcaaugguuuccucaugagaaaaguggcugucuucuuuucuaauacuccaacaagggcaucaccccagcugcgcgaggcaguacugaaauuauccgaugcgggaauaacgccauuauuucucacaagacaggaagacaggcagcuuauuaaugcccugcagauuaacaauacugccguuggucaugcacuuguguuaccugcaggccgugaucugaccgacuuccucgagaacguacuuacaugccaugugugccucgauauuuguaauaucgaccccaguugcggcuucggcucuuggagacccucauuucgggaucggcgggccgccgggucugauguagacaucgauauggcauucauucuagacagugcugagaccaccacgcucuuccaguucaacgagaugaaaaaguauaucgcguaccuggucagacaacuugacaugucaccggaucccaaagccagccaacacuuugcaagaguggcugucgugcaacaugcuccuucugagagcguagacaacgcaagcaugccaccugucaagguggaguucagcuuaacugauuauggcagcaaggaaaaacuggucgauuuccuuagcaggggaaugacccaauugcaggggaccagagcccuuggcuccgccauugaguacaccauugagaauguguucgaaucugcacccaacccaagagaucuuaaaaucgugguucucaugcucaccggcgaggucccugagcagcaacuagaagaagcucagagagugauccuccaagccaaguguaaaggcuacuuuuuuguuguccuggggauuggucgcaagguaaacaucaaagagguuuauacuuuugcuucugaacccaaugacguuuuuuucaagcuggucgauaagagcacugagcugaaugaggagccucugaugcgguucgggcgacuccucccuagcuucguuucaucagaaaaugcguucuaucucucuccugacauaagaaagcaaugugacugguuccagggggaccaacccaccaaaaaccugguaaaauuuggucauaagcagguaaacgugcccaacaacguuacaucaagccccaccaguaauccggucaccacaacaaaaccugucacuaccaccaagcccguuaccaccacaacuaagccagugacuacaacuacuaaacccgugacaaucauuaaucaaccgucuguaaaaccggcagccgcuaaaccugcucccgcuaagccuguugccgccaaaccagucgccacaaagauggccaccguacgcccucccgucgcagugaagcccgcgacugcugccaaaccuguggcggcuaaacccgccgcugugcgacccccugccgcugcagcggcuaaacccguugccacaaagccagaggugccccggccucaggcagccaagccagccgcaacaaagccugcuacuacgaagcccaugguaaaaaugucacgagaaguucaggucuuugagauaaccgaaaauuccgccaagcuccacugggaaagagcagagcccccuggccccuauuucuaugaucucaccguuacauccgcgcacgaucaaucacuggugcucaagcagaauuugaccgugacagauaggguaaucgguggccuccucgccggccaaacuuaccacgucgccguggucugcuauuugagaagccaggugagagcuacauaccacgguagcuuuaguacgaagaaaucacagccucccccaccgcagccugcgcggagugcgagcaguuccacgauuaauuugauggugucuacggaaccccuugcacugacugaaacggacaucuguaaacucccaaaggaugaagggacuugccgggauuuuauacugaagugguacuaugaucccaauaccaaaagcugugccagauuuugguacggaggguguggagggaacgagaauaaauucgggagccagaaggaaugcgagaaggucugugcaccuguguuagcuaaaccaggaguuauuuccguuaugggaacauag

SEQ ID NO: 145680 - RNA, 9534 nt, Artificial Sequence
  derived and/or modified sequence
augaggaaacacaggcaucucccacuggucgcugucuuuuguuuguuuuugucaggauucccaaccacgcacgcacagcagcagcaagcagacgugaaaaacggugcagcagccgacaucaucuuccugguugacuccuccuggaccauaggugaagaacacuuccagcucguccgcgaauuccuuuaugauguggucaagucccuggccguaggcgagaaugauuuccauuuugcucuugugcaguucaacggcaauccacauacagaauuuuugcugaauacuuaccguaccaaacaggagguucugucacauaucucaaacaugucuuauauugggggcacaaaucagacggggaaagggcuugaguauauuaugcagucacaccucaccaaggcggcaggcucucgcgccggcgacgguguuccucaaguuauugucguucugacagauggacacucuaaggacggucuggcucuucccagugcugaauugaaaucugcggacguuaauguauuugcuauaggcguggaagacgcugacgaaggagcauugaaggagauugcauccgagcccuugaacaugcauauguuuaaucucgagaacuuuacuucccugcacgacaucgucggcaauuugguauccugcguacacaguagugugagcccagagagagcuggugacacugagacuuuaaaagacauaacagcccaggacagcgcugacauuauuuuuuugauugacggguccaacaauacugguagcguuaacuuugcuguaauucuugauuuccucgugaaccugcucgagaaguuacccauuggaacacagcaaauucguguuggcguggugcaguuuucagaugaaccccggacuauguuuucucucgacaccuauucuacaaaagcccaaguucucggagcgguuaaggcacuaggauucgcagguggugaacuggccaacaucggguuagcucuugacuucgugguagagaaccauuuuaccagagcuggugggucccgcguugaggagggagugccccaagucuugguucugauuucugcgggcccaucaucugaugaaauacgauaugggguaguugcacucaagcaggccucugucuuuagcuuuggauugggcgcacaggccgcuucuagagcagaacuccagcacaucgcuacagaugacaauuuaguguucacaguccccgaguuccggucuuucggugaccugcaagagaaacugcugccauacaucgucggaguagcacagcgccacauaguucugaaacccccaacaaucgugacacaagugauagaaguaaacaaacgagacauuguguuucuaguggauggcucuuccgcccuaggauuggcuaacuuuaacgcaaucagagauuuuaucgccaagguaauccaacgcuuggaaaucggccaggaucuuauucagguugcuguggcucaauaugcggacacaguacgaccagaguuuuacuuuaacacccaccccacaaaaagagaggugauuaccgccgucaggaaaaugaaaccacucgacgggucugcacuguauacgggcuccgcacucgauuuugugcgcaacaaucuuuucacaucuucugccggauauagggccgccgagggaaucccaaaacuguuaguccugaucacuggagguaagucccuggacgaaauuucccaaccagcucaagaguuaaaaagaucuuccauuauggccuucgcgauaggaaauaaaggggcggaucaggccgaacucgaagagauugcguucgacuccucacuugucuucauuccagccgaauuccgugccgcaccucugcagggcaugcugccaggucuauuagccccacuccguacccuuagcgggacccccgagguucauaguaauaagagagacaucauauuucugcuagaugguucugcaaacgugggaaagacaaacuuccccuacguuagggacuucguaaugaauuuaguuaauucucucgacaucggcaacgacaacauaagaguuggauugguccaguucuccgacacaccaguuacggaauuuucauuaaacaccuaucagaccaaguccgacauacugggacaccuucgacagcuacaacugcagggcggguccggccucaacacuggcucugcccuaucuuacguauacgccaaccacuucaccgaggccggaggaagccgcauucgagaacacgugccgcaacugcuguuacugcuaaccgcuggccagagugaggauucuuaccugcaagcugcuaacgcccugacucgagcggguauccuaaccuucugugucggugccucucaggcaaauaaggccgagcucgaacagaucgcuuuuaauccuucucuuguguaucucauggacgacuuuuccaguuuacccgcccuuccacagcaacugauccagccccugacaaccuauguuucagggggcguggaagagguuccccucgcccaacccgagaguaagcgugauauucuuuuucuguucgacgggucagcuaaccuuguaggccaguuuccagucgugcgcgacuuucuguauaagauuaucgacgaauugaacguuaagccagaggguacgagaauagccguugcucaauauucugacgaugugaagguggaguccagauuugaugagcaucaaucaaaaccagaaauccugaaucuggucaaacguaugaagauuaaaacgggcaaggcccugaaucucggguacgcucucgauuacgcacagcguuauauauuugucaaaucugccgggucuaggaucgaggauggcguuuugcaguuccugguguuauuagucgcagggcgcuccuccgaucgagucgauggcccagcgagcaaucuuaagcagagcgguguggugcccuuuauauuucaagcaaagaacgccgacccggcugagcucgaacaaaucguuuuaagccccgcguucauuuuggcugcugagucccugccaaaaauuggagaccuucacccccaaauaguuaacuugcuaaaaucugugcauaacggcgccccugcaccagugagcggugaaaaagaugucgucuuucugcuagaugguagcgaaggaguaagauccggauuuccucugcugaaggaauuuguucagagggucgucgagucccuggauguaggccaggacaggguccgaguagccgucguucaauacagugaccgaacaaggccugaauuuuaucugaacucuuauaugaacaaacaggauguggugaacgcagugcggcaguuaacacuucugggcggucccacccccaacacaggagcagcuuuggaauuuguguuacggaauauacucgucucuucugccggauccagaauuacagagggggugccucaacuauuaauaguccuuaccgcugaccgcagcggcgacgauguuagaaauccuagcguuguggugaagcggggaggugcggugccgauaggaaucgggauaggaaacgcagacauuacagaaaugcagacaauauccuuuauaccagacuucgcuguagcaauaccaaccuuuagacaauugggcacuguucagcagguaaucucagaaagggugacccagcugacccgagaagaacuuucuagacuccaacccguacuacaaccccuuccauccccaggcgugggcggcaaacgagacguuguguuucuaaucgacggcucacagucugccggcccagaguuccaguacgugagaacccuuaucgagaggcucguggauuacuuggacgucggcuucgacacuacccgcguagcggugauccaauucucugacgacccaaaaguggaauuccuccugaacgcccacucuucaaaagacgaagugcagaacgccguucagcgcuuaagaccuaagggcgggcgacagauuaacgucgggaaugcccuggaauaugugagccggaauauauuuaagcgccccuugggcaguagaauugaggaaggcgugccucaauuucucgugcuuauuaguucaggaaaaucugacgacgagguugacgaucccgcaguagaauuaaaacaguuuggaguggcgccauuuaccaucgcuaggaacgcugaucaggaagaauuggugaaaaucucucucucucccgaguacguauucucuguaagcacuuuccgcgaacuucccucauuagagcagaaacuucugacgcccaucaccacgcucacauccgaacagauccaaaaauugcuggccucgacaagauacccuccccccgccguugaguccgaugccgccgauauaguguucuuaaucgauagcagcgagggagugcgucccgauggcuucgcccacauccgggauuucguuucaagaauuguucgucgccugaauaucggaccuaguaaagugagagucggaguugugcaauuuaguaaugacgucuuucccgaguucuaucucaagacguauagaucccaggcgccgguccucgacgccauccgacgacuucgccuccgcggcggcagcccucucaacacugguaaagcccucgaauuuguggcaaggaauuuauuuguuaagucagccgggucuaggauagaggacggcgugccucaacacuuggugcugguccuggguggaaagagccaggacgaugucucgagguuugcccaaguuauucgaaguuccgggauuguaagucuggggguuggagacagaaauaucgacagaacugaguugcagacuaucacaaacgauccuagacuggucuucacuguccgcgaauuuagagagcuuccgaacauugaggaacggauuaugaauuccuuuggaccuuccgcugccacuccugcucccccaggggucgauacuccaccuccaucacggcccgagaaaaagaaagcugacaucguguuccugcuggacggaucaauuaauuuccguagggauuccuuucaggaggugcugcgguucguaucagaaaucguugacacagucuacgaggacggcgacagcauccaggucgguuuaguucaguacaauucugauccuacugacgaauucuuucuaaaagauuuuucuacaaaacgucagaucaucgaugcgauuaacaaagugguauauaaagggggucgacaugccaauacaaaggucggacuggaacaucucagagucaaccauuucguuccagaagcugggucccgccucgaccagcgcgucccccagaucgcauuugucaucacuggagguaaaucuguagaagacgcacaggacguuucccuugcucugacucaaaggggggucaaaguuuuugcuguaggaguucgaaauauugacuccgaggaagucggcaaaaucgccucaaauucagccacagcuuuccgagugggaaacguacaagaauuaucagaguuaucagaacagguguuagagacuuugcacgacgccaugcaugaaaccuugugccccggagugacggaugccgcuaaggccugcaaccuagacgucauuuugggauuugaugguagcagagaucagaacguauucgucgcacagaaaggguucgaaucuaaaguggaugcuauucucaauagaaucucccagaugcaccggguuagcugcuccgguggacgcucaccgacagugcgcgucucagucguggccaauacgcccuccggaccagucgaggcuuucgacuuugaugaauaccagcccgagaugcuagaaaaauucaggaauaugagaagccaacaccccuacguacuaaccgaggauacauuaaaaguguaccuuaauaaguuuagacagagcuccccugauuccgucaaggucguuauacacuucacagacggcgccgacggcgaucuugcugaccuccacagagccucagaaaauuugagacaagaaggcgugagagcacucaucuuaguuggacuagagagagugguaaaccuggagcgucucaugcaccuagaauucggcaggggcuuuauguaugauaggccguuaaggcuuaacuuauuggaucuggacuacgaacuagcugagcaacucgacaacaucgccgagaaagcuugcugcggggugccuuguaaguguucggggcagagaggagaucgcgguccuaucggcaguaucgggcccaaaggaauucccggcgaggacggcuauagagguuauccuggagaugaagguggcccuggggagcgcggcccaccuggcgucaaugguacucagggcuuccaaggauguccaggacagaggggggugaagggaucacgagguuucccuggagagaaaggggaaguaggugaaaucggauuagauggccuggacggggaggacggcgacaagggauuaccaggguccagcggagaaaaagggaauccagggagaaggggugauaaagguccucguggcgagaagggagagagaggcgauguaggaaucagaggggaucccgguaacccugggcaggacagccaggagcggggcccgaagggagagaccggcgacuuagggccuaugggugucccagggagagacggcguaccaggcggucccggcgagacagggaagaacgguggcuucgggcgccggggaccaccuggggcuaaaggaaauaagggcggacccggccaaccuggcuuugaaggcgaacaagguacaagaggugcucaaggccccgcgggaccggcaggacccccgggccucaucggcgagcaagguaucagcgguccacgcggcagugggggugccgccggggcucccggagaacgcggccgcacagguccucuaggccggaaaggggaaccuggagaacccgggccaaaggguggaaucggaaaccgcggaccaagaggugagacuggagaugacgggagagacggugugggcucagaaggccggcgagggaaaaaaggugagcgcggcuuuccgggauaucccgguccaaaagguaauccuggcgagcccgggcugaaugggacuacaggacccaaaggaaucagggggagacggggcaacaguggaccuccugguauagugggacagaagggagauccgggcuauccaggcccagccggaccuaaaggcaaucggggcgauucuauagaucagugcgcuuuaauccagagcauaaaagacaagugcccaugcuguuauggcccccuugaaugccccgucuuuccaaccgagcuugcauuugcucucgauacaagugaaggcgugaaucaagacaccuuuggucgcaugagagacguugugcuaagcauuguaaacgaccugacuaucgcagaguccaauugcccaagaggcgcccgggucgcagucgucacauacaacaacgaagugaccacagagauccgcuuugcagauucuaaaagaaaauccguacuccucgacaagauaaaaaauuuacagguggcccugacgucgaaacagcagucgcuugagacagcuauguccuucguugcuagaaauaccuuuaagagagugcggaauggauuuuugaugagaaagguugcuguauucuuuucuaacaccccaacccgugcaucgccgcaacucagagaagcuguucuaaaguugucugacgcugggauuacgccucuguuucugacacgucaggaggaccgccagcuuauuaacgcauuacaaauuaacaacaccgcugucggccaugcccugguucugcccgcugggagagaucugaccgauuuuuuagagaaugugcucaccugccacgugugccuggacauuugcaacauugaccccuccugcggcuucggcucuuggagaccaucauuccgggauaggagggccgccggauccgauguggacauagacauggccuuuauuuuagauucugcugaaaccacaaccuuauuccaauucaacgagaugaagaaguauaucgccuaucuggucagacaacuugacaugucacccgauccaaaagccagccagcacuucgcccggguagcugucgugcagcacgcaccuagcgaaagcguagacaaugcuucgaugccgccugugaaaguggaguucagucucaccgacuauggaaguaaggagaagcucguggauuuccuuagucgugggaugacucagcuucaaggcacacgcgccuugggcuccgcuaucgaauauaccauagagaauguguucgagucagcgccaaauccaagggaccuaaagaucguuguacuuaugcucacuggagaagugccugaacagcaacuggaggaagcacagagggugauacugcaagcaaaguguaaaggguauuucuucgugguccuggguauugguaggaaaguaaauauuaaggaaguauacacuuuugcaucugaaccaaaugauguauucuucaagcuugucgauaagucuacagagcugaaugaagagccucucaugagauucggacggcugcuaccuuccuucgugaguagcgagaaugcauucuaucugagccccgacauccguaaacagugcgauugguuucaaggagaucagccuaccaaaaauuuaguuaaguucggacacaaacagguuaacgugccaaacaaugucacaucuuccccuacaucaaaucccguuacaacaacuaaacccgugacuacuacuaagcccgugacaacgacaacaaagccaguaacuacaacaacuaaaccugucaccauaaucaaccaaccuuccguuaagccugccgcugcaaaacccgcaccagcgaaaccaguggcagcaaagccuguggcuaccaagauggcuaccguacgcccaccuguagccgugaaacccgccaccgccgcaaaaccugucgcagccaagccugccgcaguucguccccccgcagccgcugccgcuaagcccguggccaccaagccugaaguuccucgcccccaggccgcuaaaccugccgccacaaagcccgccaccaccaaaccuauggucaagaugagcagagaggugcaaguuuuugagauuacggaaaacucagcaaaacuucacugggagcgugccgagcccccuggcccguauuucuacgaccugacggucacuagugcccacgaccagagccucguuuuaaagcagaaucugacugucacugaccguguuauaggcggacuacuugcuggccaaaccuaccauguggccguugucuguuaucuucgaagccagguccgggccacauaccacgguagcuucucaaccaaaaagucucaaccgccaccuccucagccagcccgaagugcaaguucgaguacaauuaauuuaauggugagcacugaaccacuggcccugacugaaacggacaucugcaaacuacccaaagaugagggaaccugucgugacuucauucucaagugguacuaugauccaaauacaaaauccugcgcacgcuuuugguaugggggaugcggaggcaacgaaaauaaguucggcucacagaaagaaugcgaaaaagucugugcuccagugcuggcaaagccaggugugauuucuguaauggguacuuag

SEQ ID NO: 145681 - protein, 3063 aa, Artificial Sequence
  derived and/or modified sequence
MRSRLPPALAALGAALLLSSIEAEVDPPSDLNFKIIDENTVHMSWAKPVDPIVGYRITVDPTTDGPTKEFTLSASTTETLLSELVPETEYVVTITSYDEVEESVPVIGQLTIQTGSSTKPVEKKPGKTEIQKCSVSAWTDLVFLVDGSWSVGRNNFKYILDFIAALVSAFDIGEEKTRVGVVQYSSDTRTEFNLNQYYQRDELLAAIKKIPYKGGNTMTGDAIDYLVKNTFTESAGARVGFPKVAIIITDGKSQDEVEIPARELRNVGVEVFSLGIKAADAKELKQIASTPSLNHVFNVANFDAIVDIQNEIISQVCSGVDEQLGELVSGEEVVEPPSNLIAMEVSSKYVKLNWNPSPSPVTGYKVILTPMTAGSRQHALSVGPQTTTLSVRDLSADTEYQISVSAMKGMTSSEPISIMEKTQPMKVQVECSRGVDIKADIVFLVDGSYSIGIANFVKVRAFLEVLVKSFEISPNRVQISLVQYSRDPHTEFTLKKFTKVEDIIEAINTFPYRGGSTNTGKAMTYVREKIFVPSKGSRSNVPKVMILITDGKSSDAFRDPAIKLRNSDVEIFAVGVKDAVRSELEAIASPPAETHVFTVEDFDAFQRISFELTQSICLRIEQELAAIKKKAYVPPKDLSFSEVTSYGFKTNWSPAGENVFSYHITYKEAAGDDEVTVVEPASSTSVVLSSLKPETLYLVNVTAEYEDGFSIPLAGEETTEEVKGAPRNLKVTDETTDSFKITWTQAPGRVLRYRIIYRPVAGGESREVTTPPNQRRRTLENLIPDTKYEVSVIPEYFSGPGTPLTGNAATEEVRGNPRDLRVSDPTTSTMKLSWSGAPGKVKQYLVTYTPVAGGETQEVTVRGDTTNTVLQGLKEGTQYALSVTALYASGAGDALFGEGTTLEERGSPQDLVTKDITDTSIGAYWTSAPGMVRGYRVSWKSLYDDVDTGEKNLPEDAIHTMIENLQPETKYRISVFATYSSGEGEPLTGDATTELSQDSKTLKVDEETENTMRVTWKPAPGKVVNYRVVYRPHGRGKQMVAKVPPTVTSTVLKRLQPQTTYDITVLPIYKMGEGKLRQGSGTTASRFKSPRNLKTSDPTMSSFRVTWEPAPGEVKGYKVTFHPTGDDRRLGELVVGPYDNTVVLEELRAGTTYKVNVFGMFDGGESSPLVGQEMTTLSDTTVMPILSSGMECLTRAEADIVLLVDGSWSIGRANFRTVRSFISRIVEVFDIGPKRVQIALAQYSGDPRTEWQLNAHRDKKSLLQAVANLPYKGGNTLTGMALNFIRQQNFRTQAGMRPRARKIGVLITDGKSQDDVEAPSKKLKDEGVELFAIGIKNADEVELKMIATDPDDTHAYNVADFESLSRIVDDLTINLCNSVKGPGDLEAPSNLVISERTHRSFRVSWTPPSDSVDRYKVEYYPVSGGKRQEFYVSRMETSTVLKDLKPETEYVVNVYSVVEDEYSEPLKGTEKTLPVPVVSLNIYDVGPTTMHVQWQPVGGATGYILSYKPVKDTEPTRPKEVRLGPTVNDMQLTDLVPNTEYAVTVQAVLHDLTSEPVTVREVTLPLPRPQDLKLRDVTHSTMNVFWEPVPGKVRKYIVRYKTPEEDVKEVEVDRSETSTSLKDLFSQTLYTVSVSAVHDEGESPPVTAQETTRPVPAPTNLKITEVTSEGFRGTWDHGASDVSLYRITWAPFGSSDKMETILNGDENTLVFENLNPNTIYEVSITAIYPDESESDDLIGSERTLPILTTQAPKSGPRNLQVYNATSNSLTVKWDPASGRVQKYRITYQPSTGEGNEQTTTIGGRQNSVVLQKLKPDTPYTITVSSLYPDGEGGRMTGRGKTKPLNTVRNLRVYDPSTSTLNVRWDHAEGNPRQYKLFYAPAAGGPEELVPIPGNTNYAILRNLQPDTSYTVTVVPVYTEGDGGRTSDTGRTLMRGLARNVQVYNPTPNSLDVRWDPAPGPVLQYRVVYSPVDGTRPSESIVVPGNTRMVHLERLIPDTLYSVNLVALYSDGEGNPSPAQGRTLPRSGPRNLRVFGETTNSLSVAWDHADGPVQQYRIIYSPTVGDPIDEYTTVPGRRNNVILQPLQPDTPYKITVIAVYEDGDGGHLTGNGRTVGLLPPQNIHISDEWYTRFRVSWDPSPSPVLGYKIVYKPVGSNEPMEAFVGEMTSYTLHNLNPSTTYDVNVYAQYDSGLSVPLTDQGTTLYLNVTDLKTYQIGWDTFCVKWSPHRAATSYRLKLSPADGTRGQEITVRGSETSHCFTGLSPDTDYGVTVFVQTPNLEGPGVSVKEHTTVKPTEAPTEPPTPPPPPTIPPARDVCKGAKADIVFLTDASWSIGDDNFNKVVKFIFNTVGGFDEISPAGIQVSFVQYSDEVKSEFKLNTYNDKALALGALQNIRYRGGNTRTGKALTFIKEKVLTWESGMRKNVPKVLVVVTDGRSQDEVKKAALVIQQSGFSVFVVGVADVDYNELANIASKPSERHVFIVDDFESFEKIEDNLITFVCETATSSCPLIYLDGYTSPGFKMLEAYNLTEKNFASVQGVSLESGSFPSYSAYRIQKNAFVNQPTADLHPNGLPPSYTIILLFRLLPETPSDPFAIWQITDRDYKPQVGVIADPSSKTLSFFNKDTRGEVQTVTFDTEEVKTLFYGSFHKVHIVVTSKSVKIYIDCYEIIEKDIKEAGNITTDGYEILGKLLKGERKSAAFQIQSFDIVCSPVWTSRDRCCDIPSRRDEGKCPAFPNSCTCTQDSVGPPGPPGPAGGPGAKGPRGERGISGAIGPPGPRGDIGPPGPQGPPGPQGPNGLSIPGEQGRQGMKGDAGEPGLPGRTGTPGLPGPPGPMGPPGDRGFTGKDGAMGPRGPPGPPGSPGSPGVTGPSGKPGKPGDHGRPGPSGLKGEKGDRGDIASQNMMRAVARQVCEQLISGQMNRFNQMLNQIPNDYQSSRNQPGPPGPPGPPGSAGARGEPGPGGRPGFPGTPGMQGPPGERGLPGEKGERGTGSSGPRGLPGPPGPQGESRTGPPGSTGSRGPPGPPGRPGNSGIRGPPGPPGYCDSSQCASIPYNGQGYPGSG

SEQ ID NO: 145682 - protein, 2987 aa, Artificial Sequence
  derived and/or modified sequence
MRSRLPPALAALGAALLLSSIEAEVDPPSDLNFKIIDENTVHMSWAKPVDPIVGYRITVDPTTDGPTKEFTLSASTTETLLSELVPETEYVVTITSYDEVEESVPVIGQLTIQTGSSTKPVEKKPGKTEIQKCSVSAWTDLVFLVDGSWSVGRNNFKYILDFIAALVSAFDIGEEKTRVGVVQYSSDTRTEFNLNQYYQRDELLAAIKKIPYKGGNTMTGDAIDYLVKNTFTESAGARVGFPKVAIIITDGKSQDEVEIPARELRNVGVEVFSLGIKAADAKELKQIASTPSLNHVFNVANFDAIVDIQNEIISQVCSGVDEQLGELVSGEEVVEPPSNLIAMEVSSKYVKLNWNPSPSPVTGYKVILTPMTAGSRQHALSVGPQTTTLSVRDLSADTEYQISVSAMKGMTSSEPISIMEKTQPMKVQVECSRGVDIKADIVFLVDGSYSIGIANFVKVRAFLEVLVKSFEISPNRVQISLVQYSRDPHTEFTLKKFTKVEDIIEAINTFPYRGGSTNTGKAMTYVREKIFVPSKGSRSNVPKVMILITDGKSSDAFRDPAIKLRNSDVEIFAVGVKDAVRSELEAIASPPAETHVFTVEDFDAFQRISFELTQSICLRIEQELAAIKKKAYVPPKDLSFSEVTSYGFKTNWSPAGENVFSYHITYKEAAGDDEVTVVEPASSTSVVLSSLKPETLYLVNVTAEYEDGFSIPLAGEETTEEVKGAPRNLKVTDETTDSFKITWTQAPGRVLRYRIIYRPVAGGESREVTTPPNQRRRTLENLIPDTKYEVSVIPEYFSGPGTPLTGNAATEEVRGNPRDLRVSDPTTSTMKLSWSGAPGKVKQYLVTYTPVAGGETQEVTVRGDTTNTVLQGLKEGTQYALSVTALYASGAGDALFGEGTTLEERGSPQDLVTKDITDTSIGAYWTSAPGMVRGYRVSWKSLYDDVDTGEKNLPEDAIHTMIENLQPETKYRISVFATYSSGEGEPLTGDATTELSQDSKTLKVDEETENTMRVTWKPAPGKVVNYRVVYRPHGRGKQMVAKVPPTVTSTVLKRLQPQTTYDITVLPIYKMGEGKLRQGSGTTASRFKSPRNLKTSDPTMSSFRVTWEPAPGEVKGYKVTFHPTGDDRRLGELVVGPYDNTVVLEELRAGTTYKVNVFGMFDGGESSPLVGQEMTTLSDTTVMPILSSGMECLTRAEADIVLLVDGSWSIGRANFRTVRSFISRIVEVFDIGPKRVQIALAQYSGDPRTEWQLNAHRDKKSLLQAVANLPYKGGNTLTGMALNFIRQQNFRTQAGMRPRARKIGVLITDGKSQDDVEAPSKKLKDEGVELFAIGIKNADEVELKMIATDPDDTHAYNVADFESLSRIVDDLTINLCNSVKGPGDLEAPSNLVISERTHRSFRVSWTPPSDSVDRYKVEYYPVSGGKRQEFYVSRMETSTVLKDLKPETEYVVNVYSVVEDEYSEPLKGTEKTLPVPVVSLNIYDVGPTTMHVQWQPVGGATGYILSYKPVKDTEPTRPKEVRLGPTVNDMQLTDLVPNTEYAVTVQAVLHDLTSEPVTVREVTLPLPRPQDLKLRDVTHSTMNVFWEPVPGKVRKYIVRYKTPEEDVKEVEVDRSETSTSLKDLFSQTLYTVSVSAVHDEGESPPVTAQETTRPVPAPTNLKITEVTSEGFRGTWDHGASDVSLYRITWAPFGSSDKMETILNGDENTLVFENLNPNTIYEVSITAIYPDESESDDLIGSERTLPILTTQAPKSGPRNLQVYNATSNSLTVKWDPASGRVQKYRITYQPSTGEGNEQTTTIGGRQNSVVLQKLKPDTPYTITVSSLYPDGEGGRMTGRGKTKPLNTVRNLRVYDPSTSTLNVRWDHAEGNPRQYKLFYAPAAGGPEELVPIPGNTNYAILRNLQPDTSYTVTVVPVYTEGDGGRTSDTGRTLMRGLARNVQVYNPTPNSLDVRWDPAPGPVLQYRVVYSPVDGTRPSESIVVPGNTRMVHLERLIPDTLYSVNLVALYSDGEGNPSPAQGRTLPRSGPRNLRVFGETTNSLSVAWDHADGPVQQYRIIYSPTVGDPIDEYTTVPGRRNNVILQPLQPDTPYKITVIAVYEDGDGGHLTGNGRTVGLLPPQNIHISDEWYTRFRVSWDPSPSPVLGYKIVYKPVGSNEPMEAFVGEMTSYTLHNLNPSTTYDVNVYAQYDSGLSVPLTDQGTTLYLNVTDLKTYQIGWDTFCVKWSPHRAATSYRLKLSPADGTRGQEITVRGSETSHCFTGLSPDTDYGVTVFVQTPNLEGPGVSVKEHTTVKPTEAPTEPPTPPPPPTIPPARDVCKGAKADIVFLTDASWSIGDDNFNKVVKFIFNTVGGFDEISPAGIQVSFVQYSDEVKSEFKLNTYNDKALALGALQNIRYRGGNTRTGKALTFIKEKVLTWESGMRKNVPKVLVVVTDGRSQDEVKKAALVIQQSGFSVFVVGVADVDYNELANIASKPSERHVFIVDDFESFEKIEDNLITFVCETATSSCPLIYLDGYTSPGFKMLEAYNLTEKNFASVQGVSLESGSFPSYSAYRIQKNAFVNQPTADLHPNGLPPSYTIILLFRLLPETPSDPFAIWQITDRDYKPQVGVIADPSSKTLSFFNKDTRGEVQTVTFDTEEVKTLFYGSFHKRDEGKCPAFPNSCTCTQDSVGPPGPPGPAGGPGAKGPRGERGISGAIGPPGPRGDIGPPGPQGPPGPQGPNGLSIPGEQGRQGMKGDAGEPGLPGRTGTPGLPGPPGPMGPPGDRGFTGKDGAMGPRGPPGPPGSPGSPGVTGPSGKPGKPGDHGRPGPSGLKGEKGDRGDIASQNMMRAVARQVCEQLISGQMNRFNQMLNQIPNDYQSSRNQPGPPGPPGPPGSAGARGEPGPGGRPGFPGTPGMQGPPGERGLPGEKGERGTGSSGPRGLPGPPGPQGESRTGPPGSTGSRGPPGPPGRPGNSGIRGPPGPPGYCDSSQCASIPYNGQGYPGSG

SEQ ID NO: 145683 - DNA, 9192 bp, Artificial Sequence
  derived and/or modified sequence
atgagaagcagactgccccccgccctggccgccctgggcgccgccctgctgctgagcagcatcgaggccgaggtggacccccccagcgacctgaacttcaagatcatcgacgagaacaccgtgcacatgagctgggccaagcccgtggaccccatcgtgggctacagaatcaccgtggaccccaccaccgacggccccaccaaggagttcaccctgagcgccagcaccaccgagaccctgctgagcgagctggtgcccgagaccgagtacgtggtgaccatcaccagctacgacgaggtggaggagagcgtgcccgtgatcggccagctgaccatccagaccggcagcagcaccaagcccgtggagaagaagcccggcaagaccgagatccagaagtgcagcgtgagcgcctggaccgacctggtgttcctggtggacggcagctggagcgtgggcagaaacaacttcaagtacatcctggacttcatcgccgccctggtgagcgccttcgacatcggcgaggagaagaccagagtgggcgtggtgcagtacagcagcgacaccagaaccgagttcaacctgaaccagtactaccagagagacgagctgctggccgccatcaagaagatcccctacaagggcggcaacaccatgaccggcgacgccatcgactacctggtgaagaacaccttcaccgagagcgccggcgccagagtgggcttccccaaggtggccatcatcatcaccgacggcaagagccaggacgaggtggagatccccgccagagagctgagaaacgtgggcgtggaggtgttcagcctgggcatcaaggccgccgacgccaaggagctgaagcagatcgccagcacccccagcctgaaccacgtgttcaacgtggccaacttcgacgccatcgtggacatccagaacgagatcatcagccaggtgtgcagcggcgtggacgagcagctgggcgagctggtgagcggcgaggaggtggtggagccccccagcaacctgatcgccatggaggtgagcagcaagtacgtgaagctgaactggaaccccagccccagccccgtgaccggctacaaggtgatcctgacccccatgaccgccggcagcagacagcacgccctgagcgtgggcccccagaccaccaccctgagcgtgagagacctgagcgccgacaccgagtaccagatcagcgtgagcgccatgaagggcatgaccagcagcgagcccatcagcatcatggagaagacccagcccatgaaggtgcaggtggagtgcagcagaggcgtggacatcaaggccgacatcgtgttcctggtggacggcagctacagcatcggcatcgccaacttcgtgaaggtgagagccttcctggaggtgctggtgaagagcttcgagatcagccccaacagagtgcagatcagcctggtgcagtacagcagagacccccacaccgagttcaccctgaagaagttcaccaaggtggaggacatcatcgaggccatcaacaccttcccctacagaggcggcagcaccaacaccggcaaggccatgacctacgtgagagagaagatcttcgtgcccagcaagggcagcagaagcaacgtgcccaaggtgatgatcctgatcaccgacggcaagagcagcgacgccttcagagaccccgccatcaagctgagaaacagcgacgtggagatcttcgccgtgggcgtgaaggacgccgtgagaagcgagctggaggccatcgccagcccccccgccgagacccacgtgttcaccgtggaggacttcgacgccttccagagaatcagcttcgagctgacccagagcatctgcctgagaatcgagcaggagctggccgccatcaagaagaaggcctacgtgccccccaaggacctgagcttcagcgaggtgaccagctacggcttcaagaccaactggagccccgccggcgagaacgtgttcagctaccacatcacctacaaggaggccgccggcgacgacgaggtgaccgtggtggagcccgccagcagcaccagcgtggtgctgagcagcctgaagcccgagaccctgtacctggtgaacgtgaccgccgagtacgaggacggcttcagcatccccctggccggcgaggagaccaccgaggaggtgaagggcgcccccagaaacctgaaggtgaccgacgagaccaccgacagcttcaagatcacctggacccaggcccccggcagagtgctgagatacagaatcatctacagacccgtggccggcggcgagagcagagaggtgaccaccccccccaaccagagaagaagaaccctggagaacctgatccccgacaccaagtacgaggtgagcgtgatccccgagtacttcagcggccccggcacccccctgaccggcaacgccgccaccgaggaggtgagaggcaaccccagagacctgagagtgagcgaccccaccaccagcaccatgaagctgagctggagcggcgcccccggcaaggtgaagcagtacctggtgacctacacccccgtggccggcggcgagacccaggaggtgaccgtgagaggcgacaccaccaacaccgtgctgcagggcctgaaggagggcacccagtacgccctgagcgtgaccgccctgtacgccagcggcgccggcgacgccctgttcggcgagggcaccaccctggaggagagaggcagcccccaggacctggtgaccaaggacatcaccgacaccagcatcggcgcctactggaccagcgcccccggcatggtgagaggctacagagtgagctggaagagcctgtacgacgacgtggacaccggcgagaagaacctgcccgaggacgccatccacaccatgatcgagaacctgcagcccgagaccaagtacagaatcagcgtgttcgccacctacagcagcggcgagggcgagcccctgaccggcgacgccaccaccgagctgagccaggacagcaagaccctgaaggtggacgaggagaccgagaacaccatgagagtgacctggaagcccgcccccggcaaggtggtgaactacagagtggtgtacagaccccacggcagaggcaagcagatggtggccaaggtgccccccaccgtgaccagcaccgtgctgaagagactgcagccccagaccacctacgacatcaccgtgctgcccatctacaagatgggcgagggcaagctgagacagggcagcggcaccaccgccagcagattcaagagccccagaaacctgaagaccagcgaccccaccatgagcagcttcagagtgacctgggagcccgcccccggcgaggtgaagggctacaaggtgaccttccaccccaccggcgacgacagaagactgggcgagctggtggtgggcccctacgacaacaccgtggtgctggaggagctgagagccggcaccacctacaaggtgaacgtgttcggcatgttcgacggcggcgagagcagccccctggtgggccaggagatgaccaccctgagcgacaccaccgtgatgcccatcctgagcagcggcatggagtgcctgaccagagccgaggccgacatcgtgctgctggtggacggcagctggagcatcggcagagccaacttcagaaccgtgagaagcttcatcagcagaatcgtggaggtgttcgacatcggccccaagagagtgcagatcgccctggcccagtacagcggcgaccccagaaccgagtggcagctgaacgcccacagagacaagaagagcctgctgcaggccgtggccaacctgccctacaagggcggcaacaccctgaccggcatggccctgaacttcatcagacagcagaacttcagaacccaggccggcatgagacccagagccagaaagatcggcgtgctgatcaccgacggcaagagccaggacgacgtggaggcccccagcaagaagctgaaggacgagggcgtggagctgttcgccatcggcatcaagaacgccgacgaggtggagctgaagatgatcgccaccgaccccgacgacacccacgcctacaacgtggccgacttcgagagcctgagcagaatcgtggacgacctgaccatcaacctgtgcaacagcgtgaagggccccggcgacctggaggcccccagcaacctggtgatcagcgagagaacccacagaagcttcagagtgagctggaccccccccagcgacagcgtggacagatacaaggtggagtactaccccgtgagcggcggcaagagacaggagttctacgtgagcagaatggagaccagcaccgtgctgaaggacctgaagcccgagaccgagtacgtggtgaacgtgtacagcgtggtggaggacgagtacagcgagcccctgaagggcaccgagaagaccctgcccgtgcccgtggtgagcctgaacatctacgacgtgggccccaccaccatgcacgtgcagtggcagcccgtgggcggcgccaccggctacatcctgagctacaagcccgtgaaggacaccgagcccaccagacccaaggaggtgagactgggccccaccgtgaacgacatgcagctgaccgacctggtgcccaacaccgagtacgccgtgaccgtgcaggccgtgctgcacgacctgaccagcgagcccgtgaccgtgagagaggtgaccctgcccctgcccagaccccaggacctgaagctgagagacgtgacccacagcaccatgaacgtgttctgggagcccgtgcccggcaaggtgagaaagtacatcgtgagatacaagacccccgaggaggacgtgaaggaggtggaggtggacagaagcgagaccagcaccagcctgaaggacctgttcagccagaccctgtacaccgtgagcgtgagcgccgtgcacgacgagggcgagagcccccccgtgaccgcccaggagaccaccagacccgtgcccgcccccaccaacctgaagatcaccgaggtgaccagcgagggcttcagaggcacctgggaccacggcgccagcgacgtgagcctgtacagaatcacctgggcccccttcggcagcagcgacaagatggagaccatcctgaacggcgacgagaacaccctggtgttcgagaacctgaaccccaacaccatctacgaggtgagcatcaccgccatctaccccgacgagagcgagagcgacgacctgatcggcagcgagagaaccctgcccatcctgaccacccaggcccccaagagcggccccagaaacctgcaggtgtacaacgccaccagcaacagcctgaccgtgaagtgggaccccgccagcggcagagtgcagaagtacagaatcacctaccagcccagcaccggcgagggcaacgagcagaccaccaccatcggcggcagacagaacagcgtggtgctgcagaagctgaagcccgacaccccctacaccatcaccgtgagcagcctgtaccccgacggcgagggcggcagaatgaccggcagaggcaagaccaagcccctgaacaccgtgagaaacctgagagtgtacgaccccagcaccagcaccctgaacgtgagatgggaccacgccgagggcaaccccagacagtacaagctgttctacgcccccgccgccggcggccccgaggagctggtgcccatccccggcaacaccaactacgccatcctgagaaacctgcagcccgacaccagctacaccgtgaccgtggtgcccgtgtacaccgagggcgacggcggcagaaccagcgacaccggcagaaccctgatgagaggcctggccagaaacgtgcaggtgtacaaccccacccccaacagcctggacgtgagatgggaccccgcccccggccccgtgctgcagtacagagtggtgtacagccccgtggacggcaccagacccagcgagagcatcgtggtgcccggcaacaccagaatggtgcacctggagagactgatccccgacaccctgtacagcgtgaacctggtggccctgtacagcgacggcgagggcaaccccagccccgcccagggcagaaccctgcccagaagcggccccagaaacctgagagtgttcggcgagaccaccaacagcctgagcgtggcctgggaccacgccgacggccccgtgcagcagtacagaatcatctacagccccaccgtgggcgaccccatcgacgagtacaccaccgtgcccggcagaagaaacaacgtgatcctgcagcccctgcagcccgacaccccctacaagatcaccgtgatcgccgtgtacgaggacggcgacggcggccacctgaccggcaacggcagaaccgtgggcctgctgcccccccagaacatccacatcagcgacgagtggtacaccagattcagagtgagctgggaccccagccccagccccgtgctgggctacaagatcgtgtacaagcccgtgggcagcaacgagcccatggaggccttcgtgggcgagatgaccagctacaccctgcacaacctgaaccccagcaccacctacgacgtgaacgtgtacgcccagtacgacagcggcctgagcgtgcccctgaccgaccagggcaccaccctgtacctgaacgtgaccgacctgaagacctaccagatcggctgggacaccttctgcgtgaagtggagcccccacagagccgccaccagctacagactgaagctgagccccgccgacggcaccagaggccaggagatcaccgtgagaggcagcgagaccagccactgcttcaccggcctgagccccgacaccgactacggcgtgaccgtgttcgtgcagacccccaacctggagggccccggcgtgagcgtgaaggagcacaccaccgtgaagcccaccgaggcccccaccgagccccccacccccccccccccccccaccatcccccccgccagagacgtgtgcaagggcgccaaggccgacatcgtgttcctgaccgacgccagctggagcatcggcgacgacaacttcaacaaggtggtgaagttcatcttcaacaccgtgggcggcttcgacgagatcagccccgccggcatccaggtgagcttcgtgcagtacagcgacgaggtgaagagcgagttcaagctgaacacctacaacgacaaggccctggccctgggcgccctgcagaacatcagatacagaggcggcaacaccagaaccggcaaggccctgaccttcatcaaggagaaggtgctgacctgggagagcggcatgagaaagaacgtgcccaaggtgctggtggtggtgaccgacggcagaagccaggacgaggtgaagaaggccgccctggtgatccagcagagcggcttcagcgtgttcgtggtgggcgtggccgacgtggactacaacgagctggccaacatcgccagcaagcccagcgagagacacgtgttcatcgtggacgacttcgagagcttcgagaagatcgaggacaacctgatcaccttcgtgtgcgagaccgccaccagcagctgccccctgatctacctggacggctacaccagccccggcttcaagatgctggaggcctacaacctgaccgagaagaacttcgccagcgtgcagggcgtgagcctggagagcggcagcttccccagctacagcgcctacagaatccagaagaacgccttcgtgaaccagcccaccgccgacctgcaccccaacggcctgccccccagctacaccatcatcctgctgttcagactgctgcccgagacccccagcgaccccttcgccatctggcagatcaccgacagagactacaagccccaggtgggcgtgatcgccgaccccagcagcaagaccctgagcttcttcaacaaggacaccagaggcgaggtgcagaccgtgaccttcgacaccgaggaggtgaagaccctgttctacggcagcttccacaaggtgcacatcgtggtgaccagcaagagcgtgaagatctacatcgactgctacgagatcatcgagaaggacatcaaggaggccggcaacatcaccaccgacggctacgagatcctgggcaagctgctgaagggcgagagaaagagcgccgccttccagatccagagcttcgacatcgtgtgcagccccgtgtggaccagcagagacagatgctgcgacatccccagcagaagagacgagggcaagtgccccgccttccccaacagctgcacctgcacccaggacagcgtgggcccccccggcccccccggccccgccggcggccccggcgccaagggccccagaggcgagagaggcatcagcggcgccatcggcccccccggccccagaggcgacatcggcccccccggcccccagggcccccccggcccccagggccccaacggcctgagcatccccggcgagcagggcagacagggcatgaagggcgacgccggcgagcccggcctgcccggcagaaccggcacccccggcctgcccggcccccccggccccatgggcccccccggcgacagaggcttcaccggcaaggacggcgccatgggccccagaggcccccccggcccccccggcagccccggcagccccggcgtgaccggccccagcggcaagcccggcaagcccggcgaccacggcagacccggccccagcggcctgaagggcgagaagggcgacagaggcgacatcgccagccagaacatgatgagagccgtggccagacaggtgtgcgagcagctgatcagcggccagatgaacagattcaaccagatgctgaaccagatccccaacgactaccagagcagcagaaaccagcccggcccccccggcccccccggcccccccggcagcgccggcgccagaggcgagcccggccccggcggcagacccggcttccccggcacccccggcatgcagggcccccccggcgagagaggcctgcccggcgagaagggcgagagaggcaccggcagcagcggccccagaggcctgcccggcccccccggcccccagggcgagagcagaaccggcccccccggcagcaccggcagcagaggcccccccggcccccccggcagacccggcaacagcggcatcagaggcccccccggcccccccggctactgcgacagcagccagtgcgccagcatcccctacaacggccagggctaccccggcagcggctag

SEQ ID NO: 145684 - DNA, 5700 bp, Artificial Sequence
  derived and/or modified sequence
atgagaagcagactgccccccgccctggccgccctgggcgccgccctgctgctgagcagcatcgaggccgagggcatggagtgcctgaccagagccgaggccgacatcgtgctgctggtggacggcagctggagcatcggcagagccaacttcagaaccgtgagaagcttcatcagcagaatcgtggaggtgttcgacatcggccccaagagagtgcagatcgccctggcccagtacagcggcgaccccagaaccgagtggcagctgaacgcccacagagacaagaagagcctgctgcaggccgtggccaacctgccctacaagggcggcaacaccctgaccggcatggccctgaacttcatcagacagcagaacttcagaacccaggccggcatgagacccagagccagaaagatcggcgtgctgatcaccgacggcaagagccaggacgacgtggaggcccccagcaagaagctgaaggacgagggcgtggagctgttcgccatcggcatcaagaacgccgacgaggtggagctgaagatgatcgccaccgaccccgacgacacccacgcctacaacgtggccgacttcgagagcctgagcagaatcgtggacgacctgaccatcaacctgtgcaacagcgtgaagggccccggcgacctggaggcccccagcaacctggtgatcagcgagagaacccacagaagcttcagagtgagctggaccccccccagcgacagcgtggacagatacaaggtggagtactaccccgtgagcggcggcaagagacaggagttctacgtgagcagaatggagaccagcaccgtgctgaaggacctgaagcccgagaccgagtacgtggtgaacgtgtacagcgtggtggaggacgagtacagcgagcccctgaagggcaccgagaagaccctgcccgtgcccgtggtgagcctgaacatctacgacgtgggccccaccaccatgcacgtgcagtggcagcccgtgggcggcgccaccggctacatcctgagctacaagcccgtgaaggacaccgagcccaccagacccaaggaggtgagactgggccccaccgtgaacgacatgcagctgaccgacctggtgcccaacaccgagtacgccgtgaccgtgcaggccgtgctgcacgacctgaccagcgagcccgtgaccgtgagagaggtgaccctgcccctgcccagaccccaggacctgaagctgagagacgtgacccacagcaccatgaacgtgttctgggagcccgtgcccggcaaggtgagaaagtacatcgtgagatacaagacccccgaggaggacgtgaaggaggtggaggtggacagaagcgagaccagcaccagcctgaaggacctgttcagccagaccctgtacaccgtgagcgtgagcgccgtgcacgacgagggcgagagcccccccgtgaccgcccaggagaccaccagacccgtgcccgcccccaccaacctgaagatcaccgaggtgaccagcgagggcttcagaggcacctgggaccacggcgccagcgacgtgagcctgtacagaatcacctgggcccccttcggcagcagcgacaagatggagaccatcctgaacggcgacgagaacaccctggtgttcgagaacctgaaccccaacaccatctacgaggtgagcatcaccgccatctaccccgacgagagcgagagcgacgacctgatcggcagcgagagaaccctgcccatcctgaccacccaggcccccaagagcggccccagaaacctgcaggtgtacaacgccaccagcaacagcctgaccgtgaagtgggaccccgccagcggcagagtgcagaagtacagaatcacctaccagcccagcaccggcgagggcaacgagcagaccaccaccatcggcggcagacagaacagcgtggtgctgcagaagctgaagcccgacaccccctacaccatcaccgtgagcagcctgtaccccgacggcgagggcggcagaatgaccggcagaggcaagaccaagcccctgaacaccgtgagaaacctgagagtgtacgaccccagcaccagcaccctgaacgtgagatgggaccacgccgagggcaaccccagacagtacaagctgttctacgcccccgccgccggcggccccgaggagctggtgcccatccccggcaacaccaactacgccatcctgagaaacctgcagcccgacaccagctacaccgtgaccgtggtgcccgtgtacaccgagggcgacggcggcagaaccagcgacaccggcagaaccctgatgagaggcctggccagaaacgtgcaggtgtacaaccccacccccaacagcctggacgtgagatgggaccccgcccccggccccgtgctgcagtacagagtggtgtacagccccgtggacggcaccagacccagcgagagcatcgtggtgcccggcaacaccagaatggtgcacctggagagactgatccccgacaccctgtacagcgtgaacctggtggccctgtacagcgacggcgagggcaaccccagccccgcccagggcagaaccctgcccagaagcggccccagaaacctgagagtgttcggcgagaccaccaacagcctgagcgtggcctgggaccacgccgacggccccgtgcagcagtacagaatcatctacagccccaccgtgggcgaccccatcgacgagtacaccaccgtgcccggcagaagaaacaacgtgatcctgcagcccctgcagcccgacaccccctacaagatcaccgtgatcgccgtgtacgaggacggcgacggcggccacctgaccggcaacggcagaaccgtgggcctgctgcccccccagaacatccacatcagcgacgagtggtacaccagattcagagtgagctgggaccccagccccagccccgtgctgggctacaagatcgtgtacaagcccgtgggcagcaacgagcccatggaggccttcgtgggcgagatgaccagctacaccctgcacaacctgaaccccagcaccacctacgacgtgaacgtgtacgcccagtacgacagcggcctgagcgtgcccctgaccgaccagggcaccaccctgtacctgaacgtgaccgacctgaagacctaccagatcggctgggacaccttctgcgtgaagtggagcccccacagagccgccaccagctacagactgaagctgagccccgccgacggcaccagaggccaggagatcaccgtgagaggcagcgagaccagccactgcttcaccggcctgagccccgacaccgactacggcgtgaccgtgttcgtgcagacccccaacctggagggccccggcgtgagcgtgaaggagcacaccaccgtgaagcccaccgaggcccccaccgagccccccacccccccccccccccccaccatcccccccgccagagacgtgtgcaagggcgccaaggccgacatcgtgttcctgaccgacgccagctggagcatcggcgacgacaacttcaacaaggtggtgaagttcatcttcaacaccgtgggcggcttcgacgagatcagccccgccggcatccaggtgagcttcgtgcagtacagcgacgaggtgaagagcgagttcaagctgaacacctacaacgacaaggccctggccctgggcgccctgcagaacatcagatacagaggcggcaacaccagaaccggcaaggccctgaccttcatcaaggagaaggtgctgacctgggagagcggcatgagaaagaacgtgcccaaggtgctggtggtggtgaccgacggcagaagccaggacgaggtgaagaaggccgccctggtgatccagcagagcggcttcagcgtgttcgtggtgggcgtggccgacgtggactacaacgagctggccaacatcgccagcaagcccagcgagagacacgtgttcatcgtggacgacttcgagagcttcgagaagatcgaggacaacctgatcaccttcgtgtgcgagaccgccaccagcagctgccccctgatctacctggacggctacaccagccccggcttcaagatgctggaggcctacaacctgaccgagaagaacttcgccagcgtgcagggcgtgagcctggagagcggcagcttccccagctacagcgcctacagaatccagaagaacgccttcgtgaaccagcccaccgccgacctgcaccccaacggcctgccccccagctacaccatcatcctgctgttcagactgctgcccgagacccccagcgaccccttcgccatctggcagatcaccgacagagactacaagccccaggtgggcgtgatcgccgaccccagcagcaagaccctgagcttcttcaacaaggacaccagaggcgaggtgcagaccgtgaccttcgacaccgaggaggtgaagaccctgttctacggcagcttccacaaggtgcacatcgtggtgaccagcaagagcgtgaagatctacatcgactgctacgagatcatcgagaaggacatcaaggaggccggcaacatcaccaccgacggctacgagatcctgggcaagctgctgaagggcgagagaaagagcgccgccttccagatccagagcttcgacatcgtgtgcagccccgtgtggaccagcagagacagatgctgcgacatccccagcagaagagacgagggcaagtgccccgccttccccaacagctgcacctgcacccaggacagcgtgggcccccccggcccccccggccccgccggcggccccggcgccaagggccccagaggcgagagaggcatcagcggcgccatcggcccccccggccccagaggcgacatcggcccccccggcccccagggcccccccggcccccagggccccaacggcctgagcatccccggcgagcagggcagacagggcatgaagggcgacgccggcgagcccggcctgcccggcagaaccggcacccccggcctgcccggcccccccggccccatgggcccccccggcgacagaggcttcaccggcaaggacggcgccatgggccccagaggcccccccggcccccccggcagccccggcagccccggcgtgaccggccccagcggcaagcccggcaagcccggcgaccacggcagacccggccccagcggcctgaagggcgagaagggcgacagaggcgacatcgccagccagaacatgatgagagccgtggccagacaggtgtgcgagcagctgatcagcggccagatgaacagattcaaccagatgctgaaccagatccccaacgactaccagagcagcagaaaccagcccggcccccccggcccccccggcccccccggcagcgccggcgccagaggcgagcccggccccggcggcagacccggcttccccggcacccccggcatgcagggcccccccggcgagagaggcctgcccggcgagaagggcgagagaggcaccggcagcagcggccccagaggcctgcccggcccccccggcccccagggcgagagcagaaccggcccccccggcagcaccggcagcagaggcccccccggcccccccggcagacccggcaacagcggcatcagaggcccccccggcccccccggctactgcgacagcagccagtgcgccagcatcccctacaacggccagggctaccccggcagcggctag

SEQ ID NO: 145685 - DNA, 8964 bp, Artificial Sequence
  derived and/or modified sequence
atgagaagcagactgccccccgccctggccgccctgggcgccgccctgctgctgagcagcatcgaggccgaggtggacccccccagcgacctgaacttcaagatcatcgacgagaacaccgtgcacatgagctgggccaagcccgtggaccccatcgtgggctacagaatcaccgtggaccccaccaccgacggccccaccaaggagttcaccctgagcgccagcaccaccgagaccctgctgagcgagctggtgcccgagaccgagtacgtggtgaccatcaccagctacgacgaggtggaggagagcgtgcccgtgatcggccagctgaccatccagaccggcagcagcaccaagcccgtggagaagaagcccggcaagaccgagatccagaagtgcagcgtgagcgcctggaccgacctggtgttcctggtggacggcagctggagcgtgggcagaaacaacttcaagtacatcctggacttcatcgccgccctggtgagcgccttcgacatcggcgaggagaagaccagagtgggcgtggtgcagtacagcagcgacaccagaaccgagttcaacctgaaccagtactaccagagagacgagctgctggccgccatcaagaagatcccctacaagggcggcaacaccatgaccggcgacgccatcgactacctggtgaagaacaccttcaccgagagcgccggcgccagagtgggcttccccaaggtggccatcatcatcaccgacggcaagagccaggacgaggtggagatccccgccagagagctgagaaacgtgggcgtggaggtgttcagcctgggcatcaaggccgccgacgccaaggagctgaagcagatcgccagcacccccagcctgaaccacgtgttcaacgtggccaacttcgacgccatcgtggacatccagaacgagatcatcagccaggtgtgcagcggcgtggacgagcagctgggcgagctggtgagcggcgaggaggtggtggagccccccagcaacctgatcgccatggaggtgagcagcaagtacgtgaagctgaactggaaccccagccccagccccgtgaccggctacaaggtgatcctgacccccatgaccgccggcagcagacagcacgccctgagcgtgggcccccagaccaccaccctgagcgtgagagacctgagcgccgacaccgagtaccagatcagcgtgagcgccatgaagggcatgaccagcagcgagcccatcagcatcatggagaagacccagcccatgaaggtgcaggtggagtgcagcagaggcgtggacatcaaggccgacatcgtgttcctggtggacggcagctacagcatcggcatcgccaacttcgtgaaggtgagagccttcctggaggtgctggtgaagagcttcgagatcagccccaacagagtgcagatcagcctggtgcagtacagcagagacccccacaccgagttcaccctgaagaagttcaccaaggtggaggacatcatcgaggccatcaacaccttcccctacagaggcggcagcaccaacaccggcaaggccatgacctacgtgagagagaagatcttcgtgcccagcaagggcagcagaagcaacgtgcccaaggtgatgatcctgatcaccgacggcaagagcagcgacgccttcagagaccccgccatcaagctgagaaacagcgacgtggagatcttcgccgtgggcgtgaaggacgccgtgagaagcgagctggaggccatcgccagcccccccgccgagacccacgtgttcaccgtggaggacttcgacgccttccagagaatcagcttcgagctgacccagagcatctgcctgagaatcgagcaggagctggccgccatcaagaagaaggcctacgtgccccccaaggacctgagcttcagcgaggtgaccagctacggcttcaagaccaactggagccccgccggcgagaacgtgttcagctaccacatcacctacaaggaggccgccggcgacgacgaggtgaccgtggtggagcccgccagcagcaccagcgtggtgctgagcagcctgaagcccgagaccctgtacctggtgaacgtgaccgccgagtacgaggacggcttcagcatccccctggccggcgaggagaccaccgaggaggtgaagggcgcccccagaaacctgaaggtgaccgacgagaccaccgacagcttcaagatcacctggacccaggcccccggcagagtgctgagatacagaatcatctacagacccgtggccggcggcgagagcagagaggtgaccaccccccccaaccagagaagaagaaccctggagaacctgatccccgacaccaagtacgaggtgagcgtgatccccgagtacttcagcggccccggcacccccctgaccggcaacgccgccaccgaggaggtgagaggcaaccccagagacctgagagtgagcgaccccaccaccagcaccatgaagctgagctggagcggcgcccccggcaaggtgaagcagtacctggtgacctacacccccgtggccggcggcgagacccaggaggtgaccgtgagaggcgacaccaccaacaccgtgctgcagggcctgaaggagggcacccagtacgccctgagcgtgaccgccctgtacgccagcggcgccggcgacgccctgttcggcgagggcaccaccctggaggagagaggcagcccccaggacctggtgaccaaggacatcaccgacaccagcatcggcgcctactggaccagcgcccccggcatggtgagaggctacagagtgagctggaagagcctgtacgacgacgtggacaccggcgagaagaacctgcccgaggacgccatccacaccatgatcgagaacctgcagcccgagaccaagtacagaatcagcgtgttcgccacctacagcagcggcgagggcgagcccctgaccggcgacgccaccaccgagctgagccaggacagcaagaccctgaaggtggacgaggagaccgagaacaccatgagagtgacctggaagcccgcccccggcaaggtggtgaactacagagtggtgtacagaccccacggcagaggcaagcagatggtggccaaggtgccccccaccgtgaccagcaccgtgctgaagagactgcagccccagaccacctacgacatcaccgtgctgcccatctacaagatgggcgagggcaagctgagacagggcagcggcaccaccgccagcagattcaagagccccagaaacctgaagaccagcgaccccaccatgagcagcttcagagtgacctgggagcccgcccccggcgaggtgaagggctacaaggtgaccttccaccccaccggcgacgacagaagactgggcgagctggtggtgggcccctacgacaacaccgtggtgctggaggagctgagagccggcaccacctacaaggtgaacgtgttcggcatgttcgacggcggcgagagcagccccctggtgggccaggagatgaccaccctgagcgacaccaccgtgatgcccatcctgagcagcggcatggagtgcctgaccagagccgaggccgacatcgtgctgctggtggacggcagctggagcatcggcagagccaacttcagaaccgtgagaagcttcatcagcagaatcgtggaggtgttcgacatcggccccaagagagtgcagatcgccctggcccagtacagcggcgaccccagaaccgagtggcagctgaacgcccacagagacaagaagagcctgctgcaggccgtggccaacctgccctacaagggcggcaacaccctgaccggcatggccctgaacttcatcagacagcagaacttcagaacccaggccggcatgagacccagagccagaaagatcggcgtgctgatcaccgacggcaagagccaggacgacgtggaggcccccagcaagaagctgaaggacgagggcgtggagctgttcgccatcggcatcaagaacgccgacgaggtggagctgaagatgatcgccaccgaccccgacgacacccacgcctacaacgtggccgacttcgagagcctgagcagaatcgtggacgacctgaccatcaacctgtgcaacagcgtgaagggccccggcgacctggaggcccccagcaacctggtgatcagcgagagaacccacagaagcttcagagtgagctggaccccccccagcgacagcgtggacagatacaaggtggagtactaccccgtgagcggcggcaagagacaggagttctacgtgagcagaatggagaccagcaccgtgctgaaggacctgaagcccgagaccgagtacgtggtgaacgtgtacagcgtggtggaggacgagtacagcgagcccctgaagggcaccgagaagaccctgcccgtgcccgtggtgagcctgaacatctacgacgtgggccccaccaccatgcacgtgcagtggcagcccgtgggcggcgccaccggctacatcctgagctacaagcccgtgaaggacaccgagcccaccagacccaaggaggtgagactgggccccaccgtgaacgacatgcagctgaccgacctggtgcccaacaccgagtacgccgtgaccgtgcaggccgtgctgcacgacctgaccagcgagcccgtgaccgtgagagaggtgaccctgcccctgcccagaccccaggacctgaagctgagagacgtgacccacagcaccatgaacgtgttctgggagcccgtgcccggcaaggtgagaaagtacatcgtgagatacaagacccccgaggaggacgtgaaggaggtggaggtggacagaagcgagaccagcaccagcctgaaggacctgttcagccagaccctgtacaccgtgagcgtgagcgccgtgcacgacgagggcgagagcccccccgtgaccgcccaggagaccaccagacccgtgcccgcccccaccaacctgaagatcaccgaggtgaccagcgagggcttcagaggcacctgggaccacggcgccagcgacgtgagcctgtacagaatcacctgggcccccttcggcagcagcgacaagatggagaccatcctgaacggcgacgagaacaccctggtgttcgagaacctgaaccccaacaccatctacgaggtgagcatcaccgccatctaccccgacgagagcgagagcgacgacctgatcggcagcgagagaaccctgcccatcctgaccacccaggcccccaagagcggccccagaaacctgcaggtgtacaacgccaccagcaacagcctgaccgtgaagtgggaccccgccagcggcagagtgcagaagtacagaatcacctaccagcccagcaccggcgagggcaacgagcagaccaccaccatcggcggcagacagaacagcgtggtgctgcagaagctgaagcccgacaccccctacaccatcaccgtgagcagcctgtaccccgacggcgagggcggcagaatgaccggcagaggcaagaccaagcccctgaacaccgtgagaaacctgagagtgtacgaccccagcaccagcaccctgaacgtgagatgggaccacgccgagggcaaccccagacagtacaagctgttctacgcccccgccgccggcggccccgaggagctggtgcccatccccggcaacaccaactacgccatcctgagaaacctgcagcccgacaccagctacaccgtgaccgtggtgcccgtgtacaccgagggcgacggcggcagaaccagcgacaccggcagaaccctgatgagaggcctggccagaaacgtgcaggtgtacaaccccacccccaacagcctggacgtgagatgggaccccgcccccggccccgtgctgcagtacagagtggtgtacagccccgtggacggcaccagacccagcgagagcatcgtggtgcccggcaacaccagaatggtgcacctggagagactgatccccgacaccctgtacagcgtgaacctggtggccctgtacagcgacggcgagggcaaccccagccccgcccagggcagaaccctgcccagaagcggccccagaaacctgagagtgttcggcgagaccaccaacagcctgagcgtggcctgggaccacgccgacggccccgtgcagcagtacagaatcatctacagccccaccgtgggcgaccccatcgacgagtacaccaccgtgcccggcagaagaaacaacgtgatcctgcagcccctgcagcccgacaccccctacaagatcaccgtgatcgccgtgtacgaggacggcgacggcggccacctgaccggcaacggcagaaccgtgggcctgctgcccccccagaacatccacatcagcgacgagtggtacaccagattcagagtgagctgggaccccagccccagccccgtgctgggctacaagatcgtgtacaagcccgtgggcagcaacgagcccatggaggccttcgtgggcgagatgaccagctacaccctgcacaacctgaaccccagcaccacctacgacgtgaacgtgtacgcccagtacgacagcggcctgagcgtgcccctgaccgaccagggcaccaccctgtacctgaacgtgaccgacctgaagacctaccagatcggctgggacaccttctgcgtgaagtggagcccccacagagccgccaccagctacagactgaagctgagccccgccgacggcaccagaggccaggagatcaccgtgagaggcagcgagaccagccactgcttcaccggcctgagccccgacaccgactacggcgtgaccgtgttcgtgcagacccccaacctggagggccccggcgtgagcgtgaaggagcacaccaccgtgaagcccaccgaggcccccaccgagccccccacccccccccccccccccaccatcccccccgccagagacgtgtgcaagggcgccaaggccgacatcgtgttcctgaccgacgccagctggagcatcggcgacgacaacttcaacaaggtggtgaagttcatcttcaacaccgtgggcggcttcgacgagatcagccccgccggcatccaggtgagcttcgtgcagtacagcgacgaggtgaagagcgagttcaagctgaacacctacaacgacaaggccctggccctgggcgccctgcagaacatcagatacagaggcggcaacaccagaaccggcaaggccctgaccttcatcaaggagaaggtgctgacctgggagagcggcatgagaaagaacgtgcccaaggtgctggtggtggtgaccgacggcagaagccaggacgaggtgaagaaggccgccctggtgatccagcagagcggcttcagcgtgttcgtggtgggcgtggccgacgtggactacaacgagctggccaacatcgccagcaagcccagcgagagacacgtgttcatcgtggacgacttcgagagcttcgagaagatcgaggacaacctgatcaccttcgtgtgcgagaccgccaccagcagctgccccctgatctacctggacggctacaccagccccggcttcaagatgctggaggcctacaacctgaccgagaagaacttcgccagcgtgcagggcgtgagcctggagagcggcagcttccccagctacagcgcctacagaatccagaagaacgccttcgtgaaccagcccaccgccgacctgcaccccaacggcctgccccccagctacaccatcatcctgctgttcagactgctgcccgagacccccagcgaccccttcgccatctggcagatcaccgacagagactacaagccccaggtgggcgtgatcgccgaccccagcagcaagaccctgagcttcttcaacaaggacaccagaggcgaggtgcagaccgtgaccttcgacaccgaggaggtgaagaccctgttctacggcagcttccacaagagagacgagggcaagtgccccgccttccccaacagctgcacctgcacccaggacagcgtgggcccccccggcccccccggccccgccggcggccccggcgccaagggccccagaggcgagagaggcatcagcggcgccatcggcccccccggccccagaggcgacatcggcccccccggcccccagggcccccccggcccccagggccccaacggcctgagcatccccggcgagcagggcagacagggcatgaagggcgacgccggcgagcccggcctgcccggcagaaccggcacccccggcctgcccggcccccccggccccatgggcccccccggcgacagaggcttcaccggcaaggacggcgccatgggccccagaggcccccccggcccccccggcagccccggcagccccggcgtgaccggccccagcggcaagcccggcaagcccggcgaccacggcagacccggccccagcggcctgaagggcgagaagggcgacagaggcgacatcgccagccagaacatgatgagagccgtggccagacaggtgtgcgagcagctgatcagcggccagatgaacagattcaaccagatgctgaaccagatccccaacgactaccagagcagcagaaaccagcccggcccccccggcccccccggcccccccggcagcgccggcgccagaggcgagcccggccccggcggcagacccggcttccccggcacccccggcatgcagggcccccccggcgagagaggcctgcccggcgagaagggcgagagaggcaccggcagcagcggccccagaggcctgcccggcccccccggcccccagggcgagagcagaaccggcccccccggcagcaccggcagcagaggcccccccggcccccccggcagacccggcaacagcggcatcagaggcccccccggcccccccggctactgcgacagcagccagtgcgccagcatcccctacaacggccagggctaccccggcagcggctag

SEQ ID NO: 145686 - DNA, 9192 bp, Artificial Sequence
  derived and/or modified sequence
atgcggtcgagacttccacctgcattagcggctctgggggcggctcttctcctgtcctctattgaggcagaagtggatccaccaagtgatttaaattttaagatcatcgatgaaaatacggttcacatgagctgggctaagcctgtagatccaatcgttggttatcgaataaccgtcgatccaactaccgacggacccacaaaggaatttactctgtccgcctccacaaccgagaccctgcttagcgaattggttccggaaactgagtacgtagtcactatcacatcctatgacgaggttgaggaatccgtgcccgtgattggacaactgaccatccagaccgggtccagcaccaagcctgtggagaaaaaacctgggaaaaccgaaatacaaaagtgcagcgtctctgcttggacagatctggtgttcttggtggacggttcgtggtccgtagggagaaacaacttcaaatatattctggattttatcgctgcattggtgtccgcctttgatattggggaagagaaaacccgagtaggagtcgtgcagtactcatcggatacgagaactgagtttaatcttaatcagtactatcagagggatgagttgttggccgctatcaagaagatcccatataaaggcggaaacactatgacaggtgacgctatcgattatcttgtaaagaatacattcactgagtccgcaggagcacgcgtgggctttccaaaggtagctatcattatcaccgacggaaagagtcaggatgaagtggaaattcctgcccgagagttgcggaatgtaggtgtggaggtcttcagtctagggattaaggcagcggatgccaaagaactaaaacagatcgcctctacgcctagcctcaaccacgtattcaacgtcgctaactttgatgcaattgtcgacatccagaacgagatcattagccaggtgtgttccggcgtggatgagcaactcggggaattagtatccggtgaagaagtcgtcgagccccccagcaacctgattgctatggaagtctctagcaagtacgtaaaactgaactggaatccatctcctagtcctgtgacaggatacaaagtgattctaacccccatgacagccgggtctagacagcatgctctatcagtcggcccccaaactactactctttcagtgcgggacctctcagccgacacggaataccagatctcagtcagcgccatgaagggcatgactagttctgagcctatatcaattatggagaagactcagcctatgaaggtacaagttgagtgtagccgcggtgtggacatcaaggctgacattgtgttcctcgtggatggcagctacagtatcggcatcgctaattttgtgaaagtcagggcctttcttgaggtgttagtgaaatccttcgagatcagccccaacagggtccagatcagtctcgtacagtacagccgcgacccacacacagagttcacccttaaaaaattcacaaaagtggaagacatcatcgaagcaatcaatacctttccttacaggggcgggagtacaaacaccggaaaggcaatgacctacgtgagggagaagatctttgtgccgtctaaaggatcccgcagcaacgtgcccaaagtgatgatactgattactgatggaaagtcatcagacgcattcagagacccggcaatcaagctcagaaattcagatgtcgagatctttgcagtgggggttaaggacgcagtgcgatcagaattggaggcaattgcctcaccccctgccgaaacacacgtgttcacagtggaggattttgatgcttttcaacgcatctcctttgagctcacacagtctatctgcctgcgcatcgaacaagagctagctgcaataaagaagaaagcttatgtgcctcctaaagatctgtcattctccgaggtgacttcttacggattcaagacaaactggtcacccgcgggggaaaacgtctttagttaccatatcacatataaggaggccgcaggggacgacgaggtcaccgtcgtggaaccagcctcatccaccagcgttgtcctgtcgtccctgaaaccagagaccctttacctcgtgaatgtcacagccgaatacgaggacggcttctcaattcctctcgcaggggaagaaactaccgaggaggtaaaaggagcacccaggaatctcaaggtcaccgatgagaccacagattcctttaagatcacatggactcaagcccctgggcgggtactgcgatacagaatcatttacaggccagtggccggcggcgagtccagagaagttacaacgccgcctaaccagcgtagaaggacattggagaatctgattccagatacaaaatacgaagtaagcgtgattcccgagtactttagtggcccaggtaccccgctgacaggaaacgccgctacagaagaggtccggggcaacccccgcgaccttagggtgagcgaccccaccaccagcaccatgaagttatcatggtcaggagctccgggtaaagtaaagcagtacctcgtgacctacaccccagtcgccgggggcgagacccaggaggtgaccgttagaggcgacaccaccaacaccgtcctgcagggattgaaggagggcactcagtacgctctgtcagtgaccgctctgtacgcaagcggggctggggacgccttattcggagagggaacgactctcgaagagagaggctctccacaggatctcgttactaaagacattactgacacatccattggcgcatattggacatctgcacctgggatggtaaggggttacagggtctcctggaagtctttatacgacgatgttgatactggagaaaagaatttaccagaagatgccatccatacaatgattgagaacttgcagccagagacaaagtatcggatctctgtcttcgcaacctattcctcgggggagggcgagccactgaccggagacgcaaccacagagcttagccaggattcaaaaactctgaaagttgacgaagaaacagagaatacaatgcgcgtgacctggaaacctgcaccaggcaaagtggtcaattatcgtgtggtataccgcccacatggtagaggaaagcagatggttgccaaagtaccacccaccgtgactagcactgtcctcaaaagacttcagccccaaacgacctacgacatcactgtgctccctatttacaagatgggtgagggaaaacttaggcaggggtctggtaccaccgcatccagattcaagtccccacgcaacctgaagacttctgatcctaccatgtcttcctttagggttacttgggaaccagctccaggtgaagtgaaggggtacaaagtgacctttcatcctacgggagacgaccggagactcggcgaattggtagtgggaccttatgataataccgtggtgctcgaggagctgagagctggcactacgtataaagttaatgtgttcggcatgtttgacggcggtgagagctcacctttagttggacaggagatgacaaccctgagtgacacaaccgtgatgcctatcttgtccagcggcatggagtgcctcacgagagccgaagcggacatcgtgctgctcgtggatgggtcttggagtattgggcgcgctaatttcagaaccgttcggtcattcatctccaggattgtcgaggtgtttgacatcgggccaaaaagggtgcagattgcgctggctcagtactctggggatcctcggacagagtggcagctgaacgcgcacagggacaagaagagtctcttgcaggcagtagccaatctcccctacaagggcggtaacacgctcactggcatggcactgaacttcatcaggcaacagaactttagaactcaagcagggatgaggcctcgggcgaggaaaatcggggtgctcattaccgacgggaagagccaggatgatgtggaggccccttcaaagaagttaaaagatgaaggggtcgaactgttcgctatcggaatcaagaatgccgacgaagtcgagctcaagatgattgctactgaccccgacgacactcatgcatataacgttgcagactttgaatccctaagcaggatcgtcgacgatctcaccattaacctgtgtaattccgtgaaaggcccaggggatcttgaggccccgtccaaccttgttattagtgagcgcactcacagatcattcagagtgtcgtggacaccaccaagcgatagtgttgacaggtataaggttgagtactacccagttagcggaggtaaaagacaggagttctatgtgtccaggatggaaacgtcgaccgtgctgaaggaccttaagcctgagactgaatatgtggtcaacgtgtactcggtggtggaggacgagtactctgaaccacttaaggggaccgagaaaactttacctgtacccgtcgtctcgctcaacatttacgatgtcggcccgactacaatgcatgtgcaatggcaaccagtcggaggcgccacgggctacattctctcctataagccggtcaaggatactgagcccacgcgacctaaagaagtgagactcggtccaactgtgaacgatatgcagttaactgatctggtgccgaacaccgaatacgctgtgacagtccaggcagtgctgcacgacctgaccagcgagccagtgaccgtgcgcgaagtgactctgccactgccccgtccccaggatcttaaattgagggacgtgacacatagcactatgaatgtcttctgggaacctgtcccagggaaggtgagaaaatatatcgtgcgctacaagaccccagaggaagacgtaaaagaagttgaggtggacaggtctgaaaccagcacatctctgaaggatctcttcagccagactctatatacggtgtctgtttcagcggtgcacgacgagggggaatcaccacccgtgaccgcacaggagactaccaggccagtgcctgcgccgacaaacttgaagattacagaagtcacttcagaaggctttcgtggcacatgggatcacggagcttcggatgtatcactttataggattacatgggctccgttcggatccagtgataagatggagacgatcctgaacggcgatgagaacaccctggtatttgagaacctcaatccaaacacaatctatgaggtcagcattaccgcaatctaccccgacgagagtgagagcgatgatcttattgggtccgagaggactctgcctatactgaccactcaggccccaaagtcaggaccccgcaatctgcaggtgtacaacgcgacaagtaactccctgactgtgaaatgggaccctgctagcgggagagtgcagaaataccgcataacctatcaaccaagtactggcgagggcaatgagcagacaacaaccatcggcgggcgacagaactcagttgtcctacagaagctgaagcctgataccccatatacgattaccgtgagtagcctctaccctgacggagaaggcggtcggatgacaggccggggtaagaccaaaccactgaataccgttagaaatctgcgggtctacgacccctccactagcaccctcaatgtacgctgggatcacgccgaaggtaatcctagacaatataagctgttctacgcacctgccgctggaggacctgaggagctggttccaatcccaggaaacacaaattacgcgatcctccgcaatctccagcccgacacatcttatacagtgacagtggtacccgtatataccgaaggtgacgggggtagaacttcagacactggccgtactctcatgagaggactcgcccgaaatgtacaggtctacaatccaactccgaacagtcttgatgtccgatgggatccagccccgggcccagtcctgcagtacagagtggtgtacagcccagtggatggcactaggccgtccgaatccattgtcgtgcccgggaacacgcgaatggtgcatctggaacgcctaatccccgacacactgtacagcgttaatcttgtcgcactatatagtgatggcgaaggcaatcccagcccggcccagggacgaaccctgccccgcagtggaccccgcaacttacgagtgttcggcgagactacaaactctctcagcgtggcttgggaccacgccgatggtcccgtgcaacagtacaggatcatctatagtcccacagttggcgacccgattgacgaatacacgactgtgcccggacgcagaaacaatgtaattctgcaacccctgcaacctgataccccctacaagataaccgttatcgccgtgtatgaggatggtgatggaggccatctcacaggaaacggcagaaccgtggggttgctccccccccaaaatatacatattagcgatgaatggtatactcggtttagggtgtcatgggacccatctccaagcccagtgctgggctacaaaatcgtgtataaacctgtgggcagcaacgagcccatggaggccttcgtcggggagatgacaagctataccctgcataacctgaatccaagcacaacctatgatgtcaacgtatatgcacagtacgactcaggtctatcggtgcctcttactgatcagggcaccaccctttatttaaatgttaccgacttgaagacctatcagatcggctgggataccttctgtgttaagtggtccccacacagggcagccaccagctaccgcctgaagttgtcgccagccgacggcaccagaggccaggagattaccgtgcgagggtcagagacaagccactgtttcaccgggctctcccctgacaccgactacggggtgaccgtctttgtccagactccaaatctcgagggacccggggtgtctgtgaaggaacacacaacagtgaaacctaccgaagctcccactgagcccccgaccccgcctcccccccccactattccacccgctcgagacgtgtgtaaaggcgcaaaagcagatatcgtgtttctgacggatgccagttggtccataggtgatgataacttcaataaggttgtgaagtttatatttaatactgtcggcggatttgacgagatctcacctgctggtatccaggtctcatttgtgcagtattcagatgaagtgaaaagcgaatttaagctgaatacctataacgataaggccctggccctcggagctctgcagaatatccgataccggggtggcaataccagaacaggcaaggccctcactttcatcaaggaaaaggtgctgacctgggaatctggtatgcggaagaatgtccccaaggtcctcgtcgtcgtgacagatgggcgcagccaagacgaagtgaagaaggctgcattggttattcagcagtcaggcttcagcgtcttcgtggtgggagtggctgatgttgactataatgaactggctaacatcgcttcaaagccttcggagagacacgtgtttatcgttgacgactttgagtctttcgagaagattgaggataacctcatcacgtttgtttgcgaaactgctacctcgagttgccccttgatttatttagacggctacaccagcccaggatttaagatgctagaagcctacaatcttaccgaaaagaatttcgcctccgtgcaaggcgtgtcacttgagagcgggagttttcccagttactcagcttaccgtatccagaagaacgctttcgttaaccagcccaccgccgatctccatcccaacggattgccaccctcgtacaccataattctgctgttccgtctcctccccgagacaccaagtgatccttttgcaatctggcaaattacggacagggactacaagccacaggtgggcgtgatagcagaccccagctcaaaaactctctctttcttcaataaagacacccgcggcgaagtgcagactgtaacattcgacacagaggaggttaagaccctgttttacgggtcttttcacaaggtccatattgtggtgacgagtaagtctgtcaagatctacatcgattgttatgaaataattgagaaagatatcaaagaggccggtaacattactacggatggctacgaaatacttggcaaactactgaagggtgagagaaaatcagccgcctttcagatccagtccttcgatatcgtgtgttcccccgtgtggacctcaagagacagatgctgtgatattccctcacggagagacgagggaaaatgtcctgcttttcccaattcctgtacatgtacccaggactctgtaggcccccccggcccgcctggacccgctggaggacccggtgcaaaaggcccccgtggcgagaggggtataagcggtgccatcggaccaccaggcccgcgcggcgatattggacctcccgggccccaaggcccaccaggcccacagggacccaatggcctgtctattcctggtgaacagggtcgacaggggatgaagggcgatgccggggaacctggactgccaggcaggacagggacaccaggacttcccggccctcctggaccaatgggtccccccggggatcgaggctttactggcaaggatggggctatgggcccgagaggaccccccggaccccccggttcacccggcagtccgggcgtaacagggccatcaggaaaacccggtaaaccaggggatcacggaagaccaggcccaagtgggttgaagggggaaaagggagatcgaggagatatcgcctcacaaaatatgatgcgcgctgtagcgcgccaggtgtgcgaacagctaataagcgggcaaatgaataggttcaaccagatgttaaaccagataccaaatgattatcagtctagtcgaaatcagcccggaccaccaggtcctcctggaccgcccggctcggccggtgcaagaggagaacccggacctggtggacggcccggattccctggtacaccaggtatgcagggcccgccaggagagagaggcttgcctggggagaagggtgaacgcgggaccggatcctcgggcccacggggactgcctggcccacccggccctcagggagaatcaagaactggcccacccgggtcaacgggctcgagagggcctcccggaccgccggggaggccaggaaactcaggcatccggggccctcccggcccacccggatattgcgactcctcacagtgtgcgagtatcccgtacaatggacagggttatccaggcagtggctag

SEQ ID NO: 145687 - DNA, 5700 bp, Artificial Sequence
  derived and/or modified sequence
atgaggagtcggctccccccagcactcgccgccctgggagcagccctgcttctcagctccatcgaagctgaaggaatggaatgcctcaccagggccgaagccgatatagttttgctggtggacgggagctggtcaataggtagggccaactttcggaccgtgaggagtttcatctccaggatcgtggaggtgtttgacatcggccccaaaagggtgcagatcgccctggcccagtacagtggagatccacggacagagtggcagctgaatgcacaccgggacaaaaagtctctcctccaggcagtggcaaacttgccatacaagggcgggaacacccttacgggcatggccctgaattttatcaggcagcaaaattttcgaacacaggctggcatgaggccccgagcaagaaagattggggtgctaataaccgatgggaaaagccaggacgacgtcgaagcaccctccaagaagttaaaagatgagggggttgaactgtttgcaatcggcatcaaaaacgccgatgaggtggagcttaaaatgatcgcgactgatcccgatgacacccacgcctacaatgtggcggatttcgaaagtctgagtcgaatcgtcgacgatctcactatcaacctgtgtaactcagtgaaaggtccgggtgacctggaggccccatctaatctggtcatttctgaacggacgcatcgctcgttccgcgtgtcatggaccccaccatcagactctgttgatcgatataaagttgaatactatcccgttagcggtggcaagcgccaggagttctatgtcagcagaatggagacctccaccgtcctcaaagatctgaaacctgagaccgagtacgtggtgaacgtttatagtgtcgtagaggacgagtattccgagccactaaagggcaccgagaaaacacttcctgtgcccgtcgtgtctctgaacatttatgacgttggacctacaaccatgcacgttcagtggcagccagtgggcggggctaccgggtatatcctttcgtacaagccagtgaaggataccgaacccactcggccgaaagaagtgagactggggccaaccgttaatgacatgcagctgaccgacctagtaccaaacacagagtatgccgtcaccgtccaagctgttctgcacgaccttacaagcgaacctgtaaccgtgagagaggtcacgctgcctcttcctagaccgcaggacctcaagctgcgtgacgttactcacagtacgatgaacgttttttgggagcccgtcccagggaaggttcgcaaatacatcgtaagatacaaaactccagaggaggacgtgaaggaagttgaggtcgaccgctccgagacctcaaccagtctcaaggacctcttctcccagaccctgtatactgtgtccgtatccgcagtccatgacgagggggagtccccaccggtgacagctcaagaaacaacccggccagtcccagccccaactaatctgaagatcactgaagtgacatcagagggctttcgcggtacatgggaccacggagcctctgacgtgagcctctaccgtattacttgggcccctttcgggagcagtgacaaaatggagactattctcaacggagatgagaacaccttggtgtttgaaaatttaaatccaaatactatttatgaagtgtcaattactgccatatatccagacgagtcggagtcagacgaccttatagggagtgagcgcactcttcctatattgacaacccaggcccccaagtccgggccgcggaatctccaggtttataatgccacaagcaattccctgaccgttaagtgggaccccgctagtgggagagtccaaaagtatcgcataacgtaccagccctcaacaggggaaggtaacgaacagaccaccactatcggcggccgccagaattccgttgtgctgcaaaagctcaaacctgatacaccctacacaatcactgtgagtagcttataccctgatggagaggggggccgcatgacaggccgagggaagactaaaccactcaacacagtacggaacttgcgcgtgtatgacccaagcacttccactttaaacgtgcggtgggaccacgcggaggggaacccccggcaatacaagcttttttacgctccagcagctggaggacctgaggaactggtgcccatccccgggaataccaactacgctatcctcaggaacctccagccagacacatcatataccgttactgtggtgccagtttacactgaaggtgacgggggccggacttctgatacagggcggaccctgatgcggggcctggcaagaaacgttcaagtctacaatccaactcctaactccttggacgtaaggtgggatcccgcacccggtcccgttctacagtacagagttgtgtacagccccgtggacggcactaggcctagtgagtcaattgtagtaccaggcaacactaggatggtccacctagaacggttaatcccagacacactgtactccgtgaacctggtggcactgtattccgatggggaggggaatccctccccagctcagggtcgcacacttccgcgatctgggcctcggaatctgagagtcttcggcgaaactacaaacagcctgtccgtcgcctgggatcatgcagatggcccagtgcagcaatatagaatcatttacagcccaacagttggagaccctatcgatgagtatacaaccgtcccagggcgccgaaataacgttatcttgcagcctctgcaacctgataccccttacaagataactgtgatcgcagtgtacgaagacggagatggagggcaccttaccggcaatggcagaacagtaggcttgctccccccacagaatattcacatctccgacgagtggtatacacgatttagggtatcttgggatccttctcccagtcccgtgcttggatataaaatcgtgtataaacccgtaggatccaacgaaccaatggaggctttcgttggcgagatgacaagctatactttgcataacctgaatccttctaccacctacgacgtcaacgtgtatgcacaatacgactcgggcctgtcagttccactaactgatcagggcactactctgtatttgaatgtgaccgatctcaagacctaccaaatcggctgggacacattttgcgtgaaatggagcccacacagggcagcaaccagctacagactgaagctctctccggccgatggcacacgcggtcaagaaatcaccgtgagaggctcagaaacgagtcactgtttcacaggactctctcccgacaccgattatggcgtcaccgtctttgtgcaaacccccaacctagagggtcccggagtctctgtcaaagagcatactaccgtaaagccaacagaagccccgacagagcctcccactcccccacctccacccactatccctcccgccagggacgtctgtaagggggccaaggcagatatagttttcctgaccgacgcgtcctggtctataggagacgacaacttcaataaggtggtcaagttcatattcaatacagtgggcgggtttgacgagatttcaccagcagggatccaggttagcttcgtacagtacagcgatgaggttaagtccgaattcaagctgaacacttataatgataaagctcttgcacttggagctctgcagaatattaggtacagaggtggtaacacccgaactggcaaagcattgacctttattaaagaaaaggtcttgacttgggaatcggggatgcgtaagaatgtgcccaaggtgcttgtggtggtaaccgacggaaggtcccaggatgaggtgaagaaggctgctttagtgatacagcaatctggatttagtgtgttcgtcgttggcgtggctgacgtggactacaacgagctagcaaacattgcatctaagccatctgagaggcatgttttcattgtggacgattttgagtcctttgagaagattgaagacaaccttatcaccttcgtctgtgagaccgcgactagctcgtgcccgttaatctatctagacggctataccagccctggcttcaaaatgctggaagcctacaatctgacagagaaaaacttcgcctccgtccagggggtttcactggagtccggctccttcccaagctattccgcctaccggattcagaaaaacgcctttgtcaatcagcctaccgccgacctgcaccccaatggcctgcctccgtcctataccattatactgctgtttaggctgctgcccgagacccccagtgatccatttgctatctggcaaattaccgacagagattacaaaccacaagtaggcgtcatcgctgacccatcatcaaagaccctgtcattcttcaataaagatactcgcggcgaagtccagacagtgacattcgacaccgaagaggttaagactctattctacggcagctttcacaaggtgcatattgtggtcaccagcaaatcagtcaaaatttacatcgactgctacgaaataatagagaaggatatcaaagaggccggcaatataacaacggacggatatgaaattctcggtaagctactgaagggtgagagaaagtctgctgcctttcaaatccagtcctttgatattgtctgtagccctgtctggacctcaagggacagatgttgtgatattccctctcgaagggatgaaggcaagtgcccagcctttcctaatagttgcacgtgcacccaggactctgttggaccaccaggacccccgggccctgccggtggtcctggtgccaaaggccccagaggcgagcggggtatctcaggcgccatcggaccccctggaccacgcggggacatcgggccccccggtccccagggacctccaggtccgcagggcccaaacggcctgtctatccccggagagcaggggagacagggaatgaaaggcgacgctggcgagcctggactgcctggcaggacaggtaccccggggctgcctggccctcccggaccgatgggaccccctggtgatcggggcttcaccggaaaagacggcgcaatgggaccacgaggtccgcctgggcctccgggtagcccaggcagccctggagtgactggacccagtggaaagccgggtaagcctggcgatcacggacggcctggcccctccggcctgaagggcgagaagggcgaccgcggcgacattgcaagccaaaacatgatgagagctgtggctcgccaggtttgcgagcagctcatttcaggtcagatgaatcggttcaatcagatgctgaaccaaatccccaacgactaccagtcaagtcggaatcagcctgggcctcccggcccacccggacctcccgggtcggcaggagccaggggagagcctggcccagggggtcgacctggctttccaggcacccctgggatgcaaggccctcctggtgagcggggccttcctggcgagaagggcgaacgaggaacagggagtagcggccctcgaggccttcccggaccacccggcccacaaggagaatctcggaccggtccaccgggtagcactgggtcaagggggcctcccgggccacctggcaggccagggaactccggcattcggggcccccccggccctccagggtactgtgactctagccagtgcgctagtatcccctataatgggcagggataccctggttccggctag

SEQ ID NO: 145688 - DNA, 8964 bp, Artificial Sequence
  derived and/or modified sequence
atgcggtcccgattaccccccgctctggccgcattgggggccgctctgttactttcttcaatcgaagctgaagtggatcccccaagtgacctcaattttaaaatcattgacgagaacactgtccatatgtcctgggcgaaaccagtggatcccatcgttggctacagaatcacagttgaccctacaacagatggacccaccaaggaatttacgcttagtgcctcaacaaccgagaccctgctatccgagctagttcctgagaccgagtatgttgttacaataacctcatatgatgaagtcgaagaatctgtgcccgtcatcggccagctgaccatccagacaggctccagcacgaagcccgttgaaaagaagcctggaaagaccgagattcaaaagtgctccgttagtgcctggaccgatttagttttccttgtggacggaagttggtcagtcgggcgtaacaacttcaagtacatactggatttcatcgcggcccttgtctcagcgtttgacattggtgaggaaaagactcgggtcggcgtggtgcagtactcctctgacactagaactgaatttaaccttaaccagtattatcagagagatgagctgctagccgcaataaagaagattccatacaaaggcgggaatacaatgactggggatgcaatagactacttggtcaagaatacatttaccgaaagcgccggagctagggttggtttccccaaagtggctatcattataaccgacgggaagagccaagatgaagtggagatcccagcccgtgagctccgtaatgtcggggtggaagtgttctctctcggcatcaaagcagccgacgctaaggagttaaaacagattgcttcaaccccttccctgaaccatgtgttcaacgtcgcgaatttcgatgccattgtggacattcagaacgaaattatttcccaggtgtgctccggtgtggatgagcagctgggtgagctcgtgagtggcgaggaggtcgtcgagcccccttccaatctcatcgccatggaggtctccagtaaatacgtcaagcttaactggaatccttcccctagtcctgtgaccggatataaagtgatactgacacctatgaccgccggaagtcggcaacatgctttatccgtcggccctcagaccaccacactgtccgtgcgtgacttatctgccgacaccgagtatcagatctctgtttcagcgatgaaaggcatgacttcttcggagccaatctctatcatggaaaagacgcagcccatgaaggtccaggtggaatgttcaaggggtgtagacatcaaggcagacatcgtgttcctggtcgatggctcttactctatcggtatcgcgaattttgtcaaggtgcgcgctttcctggaagtgctagtcaagtctttcgagatatctccgaacagggttcagatcagcctagttcagtactccagagatccccatacagagttcactcttaagaagttcaccaaggtagaggatattatcgaagccataaacaccttcccttaccgcgggggttctacaaataccggtaaggccatgacttatgtccgtgaaaaaattttcgtgccttccaaaggaagtaggtcaaatgtacctaaggtgatgatcctgatcaccgacggcaagagctccgacgcgttccgggacccagccatcaagctgcggaatagtgacgtcgagatttttgcagtgggggttaaagacgccgtgaggtccgaattagaagctatagcttctccgccggcagagacccacgttttcaccgtcgaagatttcgacgcctttcagaggatctcttttgagctaactcagagcatttgtctccgcatagagcaggaattggccgccataaaaaaaaaagcctacgtgcctcctaaggacctgtcgttttctgaggtgaccagctatggcttcaaaactaactggtcacccgcaggtgaaaacgtattttcgtatcacattacctacaaggaggcggccggagacgacgaggtgacagtggtcgaaccggccagcagtaccagtgtggtgctgagcagcctgaaaccggaaacactttaccttgtgaatgtgacagccgaatatgaagacggcttttctattccactggcaggcgaggagacaactgaggaggtcaagggcgcccctcgtaacctgaaggtgaccgatgagacaacagactcttttaagattacttggacccaggcacctggtagggtcctgaggtacagaatcatctaccgccccgtagctggaggggagtcacgtgaagtcacgacaccaccaaaccagcgccgaaggaccttggagaatttgatccccgacactaagtacgaggtctccgtgattcctgagtacttctccggtcctggaacacccctaacgggcaacgctgctacggaggaagtgaggggcaaccctcgagaccttcgggtttccgaccctaccaccagcacaatgaagctctcttggtctggtgctcccggcaaagtgaagcagtacctggtcacctacacccccgtcgcaggaggcgagacacaagaagtcacagtgagaggcgatactacaaacaccgtactccagggactaaaggagggcacgcagtacgcccttagcgtaaccgcactatacgcttctggcgctggggacgcactgtttggcgaagggacaactcttgaggaaagaggatcgcctcaagacctggttacaaaagacattaccgacacatccataggtgcctactggaccagcgctccaggaatggtcaggggctaccgggtcagttggaagtctctgtatgatgacgttgataccggggaaaaaaacctgcctgaagacgccatccatactatgattgaaaacctgcaacccgagacaaaatacaggatttccgtgttcgctacatattcatccggagagggtgaaccccttacaggagacgccacaaccgaactgtctcaagactccaaaacactcaaagtcgacgaggaaacagagaacactatgcgggtcacatggaaacccgccccaggcaaagtcgttaattatcgcgtagtgtaccgacctcacggtagagggaaacagatggtggccaaagtcccacccacagtcacctccacagtgttgaagcgtttgcagccccagactacatacgacatcaccgtgctgccgatttacaaaatgggggagggaaagctgcgccaaggctcaggaacgaccgcctcacgtttcaaatcacctaggaatctgaagacctctgatcctacaatgtcttcattcagggtgacttgggagcccgcacctggtgaggttaagggttataaggtgacttttcacccaactggagatgacaggcggcttggagagctggttgtcgggccctacgacaacactgtcgtgcttgaggaattacgtgccggcactacttataaggtgaatgtctttggcatgttcgatggcggtgagagttcacccttggtcggccaggagatgaccaccttgtcagacacgactgttatgcccatattgtcttctggaatggagtgtcttacccgagcggaggcagatatcgtgctgctggttgatggatcttggtcgatagggcgggctaactttcggacagtccgcagttttatttctcggattgtcgaggtcttcgacatcggacccaaacgagtccaaattgcactggcgcagtacagtggtgaccctcggactgaatggcaactgaatgcccatcgagacaagaagtctctcctgcaggccgttgctaacctgccctacaagggtggtaatacactgacagggatggctctgaattttatcagacaacagaatttccgcacgcaggccggcatgaggcctcgcgcacgcaagatcggcgttttgataacagacgggaaatctcaagatgatgtggaggcacctagcaagaaacttaaggacgagggggtggagttgtttgctattggaatcaaaaatgccgatgaagtcgagctgaagatgatagccactgaccctgacgacacacatgcctataacgtggccgactttgagagtctgtctcggattgtcgatgatttaacaatcaatctatgtaattcagtcaaaggcccgggggatctggaggcacctagtaacttggtgatctccgaacgtactcatcgcagcttcagagtcagttggacacctccgtcggattccgttgaccggtataaagtggagtactatccagtgagcggcggcaaaaggcaagagttctacgtttccaggatggaaactagtacagtcctgaaggatttgaaacccgagacggaatacgtggtgaatgtttactctgtggtggaggatgaatattcagaacctttgaagggaaccgagaagactctacccgtccccgttgtaagcctgaatatatatgacgtaggtccgacaacaatgcatgtgcagtggcagcctgtggggggggctaccgggtatatacttagctacaaacccgtcaaggatacagagcctactagacctaaggaagtgaggctgggccctactgtgaatgacatgcagctgaccgatctcgttcccaacacggagtatgccgtgaccgtgcaggcagtgttacatgacctgactagcgagccagtgaccgtgcgtgaggtgacattgcccctcccacgcccacaagacctgaagctgcgggacgtaacccactcaacaatgaacgttttttgggaaccggtcccggggaaagttaggaaatacatagtgcggtataagacccctgaagaggacgtgaaggaagtggaggtagaccgcagcgagacctcgacaagcctcaaggacctcttttcccagactttgtatactgtctcagttagcgctgtccacgacgaaggggaaagtccacccgtgacagcacaggagacgacaaggcccgtgcctgccccaacgaaccttaaaatcacggaggtgacatctgaaggcttcaggggaacctgggaccacggagccagcgacgtgagtttgtaccggatcacttgggccccctttgggagtagcgataagatggagaccatcctgaatggtgatgaaaataccctggtatttgaaaacctgaaccccaacaccatatacgaagtttcgataacagctatctacccggatgagtcagagtctgacgatctgatcggcagtgaaagaaccctgccaatcctgactacacaggcgcccaagtcaggtccccggaatctgcaggtgtacaacgccacctctaactcattaactgtgaagtgggaccccgcatctggcagagttcagaagtaccgtataacctatcaaccctctacaggagaagggaacgagcagacgactactattggaggtcgccagaacagcgtggtcctgcagaaattgaagccagacaccccatatacaataaccgtctcttctttgtatcccgatggagaaggggggcggatgactggaagaggaaaaaccaagcccttaaatactgttaggaatctgcgagtatacgacccatccacgtctacccttaacgtacgctgggatcacgccgagggaaacccgagacagtataaactgttttacgcaccagccgccggcgggcctgaggagctggttccaattcctgggaacaccaactatgctatcctgcggaacttgcagccagataccagttataccgtgacagttgtacccgtatatacagaaggtgatggcggtcggactagcgacaccggaagaactcttatgcgcggtctcgctagaaatgtgcaggtgtacaatcccacacctaactccctcgatgtgaggtgggaccctgctccagggcccgtactgcaatacagggtggtctatagccccgtggacggcactcggccctccgaaagtatcgttgtgcctgggaacacccggatggttcacctggaacggcttattcccgacaccctgtacagcgtcaacttagtggcactctatagtgatggggaaggtaatccgagccccgcacaggggagaaccctgcccagaagcgggcctcggaacctgagagtgtttggggagactacgaacagcttgtctgtggcgtgggatcacgccgatggaccagtgcaacagtaccgtatcatctacagtccgacagtgggagaccccattgatgaatacacaaccgtgccaggacgccggaataacgttatactccaacccctccagccagatactccatacaagataacagtgattgcggtatatgaagacggcgacgggggtcacctgacggggaatggccgaaccgtggggttgctaccaccacagaatatccatatttcagacgaatggtacactcgattccgggtcagctgggatccctcgccgtctcccgtgctgggctataagatcgtatacaagcccgtaggatctaacgaacccatggaggccttcgtgggtgagatgacaagctacacgctccataacctgaatccctccaccacgtatgacgtcaacgtctacgctcagtatgacagtggccttagcgttcctttgaccgaccagggtaccacattataccttaatgtgacagatcttaagacttatcagattggttgggacactttttgtgttaaatggtcaccacacagggccgctacctcgtatagactgaaactgtccccagcggacggtacccgtggtcaggagattaccgtgcgtggaagtgagacttcgcactgcttcactgggctaagcccagatactgactacggtgtaaccgtgtttgtccagacccccaacttagagggccctggggtgtctgtgaaggagcatactactgtgaaaccaactgaggccccaacagaaccccccacacctccaccgcctcccacaattccccccgccagggatgtctgcaagggggccaaggccgacattgtcttcctgacagacgcttcctggtcaatcggggatgataatttcaataaagtggtgaaattcatctttaacaccgtcggagggttcgacgagatctccccagccggaatccaggtgtccttcgttcagtactctgatgaagtgaagagcgagtttaaactaaatacatacaacgacaaagcgctagccctgggagcgttgcaaaacatcagataccgtggtggaaacaccagaaccgggaaagccctgacctttattaaagaaaaggtgctcacctgggagtccggaatgagaaagaacgtccccaaggtactggttgtcgtaacagacggacgatcacaggacgaagtcaagaaggccgctttagttatccagcagagtggcttttccgtgttcgtggtcggcgtcgctgatgtcgactacaatgagctggcaaatattgcatccaaaccctcagagcgccatgtgttcatcgtggacgactttgaaagctttgagaagatcgaggataacctgatcacttttgtgtgcgagactgctacctcttcctgccctctcatttaccttgacggatatacatcccctggcttcaagatgctcgaggcatacaacctgaccgaaaaaaacttcgcctctgtgcaaggggtcagccttgaatccggaagctttccaagctactccgcttatcgaatacagaagaatgctttcgttaatcagcctactgcagacctgcaccctaacggcttgcccccatcctacactatcatcctgctgtttagactgttgccagagacacccagcgatccattcgctatatggcagattaccgacagagactacaaaccccaggttggtgttatcgcggacccatcttccaagaccctgtcctttttcaataaggacactcgtggtgaggtgcaaacggtgacgttcgacacggaggaagtcaagacccttttctacggtagctttcataaacgtgacgaaggtaaatgccccgccttccccaactcttgcacttgcactcaggactcagttgggccacctgggccccctggacccgcgggtggtccaggagccaagggcccccgcggagagcgcggcatttctggagcgatcggaccaccgggcccccgaggcgacatcggtcctccaggcccacaggggccgccaggaccacagggacctaacgggctgtctattcccggcgaacaagggaggcaggggatgaagggcgacgctggcgagcccggtctccccggacggactggcactcccggcttaccaggtcctcccgggcctatgggaccaccgggggatcggggctttaccggaaaagatggtgctatggggcctcgcgggccacccgggcccccaggcagtcccggatcccctggcgtgacgggtccatctgggaaacccggcaagccgggcgaccacggaagacccggaccaagtggccttaaaggcgagaagggtgatagaggtgatattgcctctcagaatatgatgagggctgtagctagacaggtctgcgagcagttgatcagtggacagatgaatcggttcaatcagatgctaaaccagattcctaacgattatcaatcgtcacggaaccagcctgggccccccggccctccaggcccaccaggctcagcaggcgcccgcggcgagcctggtccagggggccggcccggattccctggcacaccaggcatgcagggacctcctggggagcgcggtcttcccggggagaagggggagagggggaccggaagttctggacctagaggtttacccggaccccctggaccacagggtgaatcaaggactggaccacctggttccactggctctaggggccctcctggcccccctggacggccaggaaacagcggaattaggggccctccagggccccctggctattgtgactccagtcaatgtgcctccataccctataacggacaggggtatcccggctctgggtag

SEQ ID NO: 145689 - DNA, 9192 bp, Artificial Sequence
  derived and/or modified sequence
atgaggagccggctgcccccagccctggccgccctgggcgccgccctgctgctgagcagcattgaagctgaggtggaccccccaagtgacctgaacttcaagatcattgatgagaacacagtgcacatgtcctgggccaagcctgtggaccccatcgtgggctaccgcatcaccgtggaccccaccacagatggccccaccaaggagttcaccctgagcgccagcaccacagagaccctgctgtctgagctggtgcctgagacagaatatgtggtgaccatcaccagctatgatgaggtggaggagagcgtgcctgtgattggccagctgaccatccagacaggcagcagcaccaagcctgtggagaagaagccaggcaagacagagatccagaagtgcagcgtgtctgcctggacagacctggtgttcctggtggatggctcctggagcgtgggcaggaacaacttcaagtacatcctggacttcatcgccgccctggtgtctgcctttgacatcggggaggagaagaccagggtgggcgtggtgcagtacagcagtgacaccaggacagagttcaacctgaaccagtactaccagagagatgagctgctggccgccatcaagaagatcccctacaagggcggcaacaccatgactggagatgccatcgactacctggtgaagaacaccttcacagagagcgctggggcccgggtgggcttccccaaggtggccatcatcatcacagatggcaagagccaggatgaggtggagatcccagcccgggagctgagaaatgtgggcgtggaggtgttcagcctgggcatcaaggctgctgatgccaaggagctgaagcagatcgccagcacccccagcctgaaccacgtgttcaacgtggccaactttgatgccatcgtggacatccagaatgagatcatcagccaggtgtgcagcggcgtggatgagcagctgggggagctggtgtctggagaggaggtggtggagccccccagcaacctgattgccatggaggtgagcagcaaatatgtgaagctgaactggaaccccagccccagccctgtgacaggctacaaggtgatcctgacccccatgacagctggcagccggcagcacgccctgtctgtgggcccccagaccaccaccctgtctgtgcgggacctgtctgctgacacagagtaccagatctctgtgtctgccatgaagggcatgaccagcagcgagcccatcagcatcatggagaagacccagcccatgaaggtgcaggtggagtgcagccggggcgtggacatcaaggctgacatcgtgttcctggtggatggcagctacagcattggaattgccaactttgtgaaggtgcgggccttcctggaggtgctggtgaagagctttgagatcagccccaacagagtgcagatcagcctggtgcagtacagccgggacccccacacagagttcaccctgaagaagttcaccaaggtggaggacatcatcgaggccatcaacaccttcccctaccggggcggcagcaccaacacaggcaaggccatgacctacgtgcgggagaagatctttgtgcccagcaagggcagccgcagcaatgtgcccaaggtgatgatcctgatcacagatggcaagagcagtgatgccttccgggaccctgccatcaagctgaggaacagtgatgtggagatctttgctgtgggcgtgaaggatgctgtgcgctctgagctggaggccatcgccagccccccagctgagacccacgtgttcaccgtggaggactttgatgccttccagaggatcagctttgagctgacccagagcatctgcctgcgcatcgagcaggagctggccgccatcaagaagaaggcctacgtgccccccaaggacctgtccttcagcgaggtgaccagctatggcttcaagaccaactggagccctgctggagaaaatgtgttctcctaccacatcacctacaaggaggccgctggagatgatgaggtgacagtggtggagcccgccagcagcacctctgtggtgctgagcagcctgaagccagagaccctgtacctggtgaatgtgacagcagaatatgaagatggcttcagcatccccctggccggggaggagaccacagaggaggtgaagggggcccccaggaacctgaaggtgacagatgagaccacagacagcttcaagatcacctggacccaggcccctggccgggtgctgcgctaccgcatcatctacagacctgtggccggcggggagagccgggaggtgaccaccccacccaaccagaggaggaggaccctggagaacctgatcccagacaccaagtatgaggtgtctgtcatccctgagtacttcagcggccctggcacccccctgactggaaatgctgccacagaggaggtgcggggcaacccccgggacctgcgggtgtctgaccccaccaccagcaccatgaagctgtcctggagcggggcccctgggaaggtgaagcagtacctggtgacctacacccctgtggccggcggggagacccaggaggtgacagtgcggggggacaccaccaacacagtgctgcagggcctgaaggagggcacccagtatgccctgtctgtgacagccctgtatgccagcggggctggagatgccctgtttggagagggcaccaccctggaggagcggggcagcccccaggacctggtgaccaaggacatcacagacaccagcattggagcctactggaccagcgcccctggcatggtgcggggctacagagtgtcctggaagagcctgtatgatgatgtggacaccggggagaagaacctgcctgaagatgccatccacaccatgattgagaacctgcagcctgagaccaagtaccgcatctctgtgtttgccacctacagcagtggagagggggagcccctgactggagatgccaccacagagctgagccaggacagcaagaccctgaaggtggatgaggagacagagaacaccatgagggtgacctggaagccagcccctgggaaggtggtgaactacagagtggtgtaccggccccacggccggggcaagcagatggtggccaaggtgccccccaccgtgaccagcacagtgctgaagaggctgcagccccagaccacctatgacatcaccgtgctgcccatctacaagatgggagagggcaagctgcggcagggcagcggcaccacagccagccgcttcaagagccccaggaacctgaagaccagtgaccccaccatgagcagcttccgggtgacctgggagcccgcccctggagaggtgaagggctacaaggtgaccttccaccccactggagatgaccggcggctgggggagctggtggtgggcccctatgacaacacagtggtgctggaggagctgcgggccggcaccacctacaaggtgaatgtgtttggcatgtttgatggaggagagagcagccccctggtgggccaggagatgaccaccctgagtgacaccaccgtgatgcccatcctgagcagcggcatggagtgcctgaccagggctgaggccgacatcgtgctgctggtggatggctcctggagcatcggccgggccaacttcagaacagtgcgctccttcatcagcagaattgtggaggtgtttgatattggccccaagagggtgcagatcgccctggcccagtacagcggggaccccaggacagagtggcagctgaatgcccaccgggacaagaagagcctgctgcaggccgtggccaacctgccctacaagggcggcaacaccctgaccggcatggccctgaacttcatccggcagcagaacttccgcacccaggccggcatgaggccccgggccaggaagattggagtgctgatcacagatggcaagagccaggatgatgtggaggcccccagcaagaagctgaaggatgaaggagtggagctgtttgccatcggcatcaagaatgctgatgaggtggagctgaagatgattgccacagatcctgatgacacccacgcctacaacgtggccgactttgagagcctgagcagaattgtggatgacctgaccatcaacctgtgcaacagcgtgaagggccctggggacctggaggcccccagcaacctggtgatcagcgagaggacccacaggagcttccgggtgtcctggaccccacccagcgacagcgtggaccgctacaaggtggagtactaccctgtgtctgggggcaagaggcaggagttctacgtgtccaggatggagaccagcacagtgctgaaggacctgaagccagagacagaatatgtggtgaatgtgtacagcgtggtggaggatgagtacagcgagcccctgaagggcacagagaagaccctgcctgtgcctgtggtgtccctgaacatctatgatgtgggccccaccaccatgcacgtgcagtggcagcctgtgggcggggccaccggctacatcctgagctacaagcctgtgaaggacacagagcccacccggcccaaggaggtgcggctgggccccaccgtgaatgacatgcagctgacagacctggtgcccaacacagaatatgctgtgacagtgcaggccgtgctgcatgacctgaccagcgagcctgtgacagtgcgggaggtgaccctgcccctgccccggccccaggacctgaagctgagagatgtgacccacagcaccatgaatgtgttctgggagcctgtgcctgggaaggtgaggaagtacatcgtgcgctacaagaccccagaagaagatgtgaaggaggtggaggtggacagaagtgagaccagcaccagcctgaaggacctcttcagccagaccctgtacacagtgtctgtgtctgctgtgcatgatgaaggagagagcccccctgtgacagcccaggagaccaccaggcctgtgcctgcccccaccaacctgaagatcacagaggtgaccagcgagggcttccggggcacctgggaccatggagccagtgatgtgtccctgtaccgcatcacctgggcccccttcggcagcagtgacaagatggagaccatcctgaatggagatgagaacaccctggtgtttgagaacctgaaccccaacaccatctatgaggtgtccatcacagccatctacccagatgagagcgagagtgatgacctgattggcagcgagaggaccctgcccatcctgaccacccaggcccccaagagcggccccaggaacctgcaggtgtacaatgccaccagcaacagcctgactgtgaagtgggaccctgccagcggccgggtgcagaagtaccgcatcacctaccagcccagcactggagagggcaatgagcagaccaccaccatcggcggccggcagaacagcgtggtgctgcagaagctgaagccagacaccccctacaccatcaccgtgagcagcctgtacccagatggagagggcggccgcatgacaggccggggcaagaccaagcccctgaacacagtgaggaacctgcgggtgtatgaccccagcaccagcaccctgaatgtgcgctgggaccatgctgagggcaacccccggcagtacaagctgttctacgccccagctgctgggggccctgaggagctggtgcccatccctggcaacaccaactatgccatcctgaggaacctgcagcctgacaccagctacacagtgacagtggtgcctgtgtacacagaaggagatggcggccgcaccagtgacaccggccgcaccctgatgaggggcctggccagaaatgtgcaggtgtacaaccccacccccaacagcctggatgtgcgctgggaccctgcccctggccctgtgctgcagtacagagtggtgtacagccctgtggatggcacccggcccagcgagagcatcgtggtgcccggcaacaccaggatggtgcacctggagcggctcatcccagacaccctgtacagcgtgaacctggtggccctgtacagtgatggagagggcaaccccagccctgcccagggccgcaccctgcccaggagcggccccaggaacctgcgggtgtttggagagaccaccaacagcctgtctgtggcctgggaccacgcagatggccctgtgcagcagtaccgcatcatctacagccccaccgtgggggaccccattgatgagtacaccaccgtgcccggcagaagaaataatgtcatcctgcagcccctgcagcctgacaccccctacaagatcaccgtgattgctgtgtatgaagatggagatggcggccacctgactggaaatggccgcacagtgggcctgctgcccccccagaacatccacatcagtgatgagtggtacacccgcttccgggtgtcctgggaccccagccccagccctgtgctgggctacaagatcgtgtacaagcctgtgggcagcaatgagcccatggaggcctttgtgggggagatgaccagctacaccctgcacaacctgaaccccagcaccacctatgatgtgaatgtgtatgcccagtatgacagcggcctgtctgtgcccctgacagaccagggcaccaccctgtacctgaatgtgacagacctgaagacctaccagatcggctgggacaccttctgtgtgaagtggagcccccacagagctgccaccagctaccgcctgaagctgagccctgcagatggcacccggggccaggagatcaccgtgcggggcagcgagaccagccactgcttcaccggcctgagcccagacacagattatggagtgacagtgtttgtgcagacccccaacctggagggccctggggtgtctgtgaaggagcacaccaccgtgaagcccacagaggcccccacagagccccccaccccacctcctccacccaccatccccccagccagagatgtgtgcaagggggccaaggctgacatcgtgttcctgacagatgcctcctggagcattggagatgacaacttcaacaaggtggtgaagttcatcttcaacacagtgggcggctttgatgagatcagccctgctggcatccaggtgtcctttgtgcagtacagtgatgaggtgaagtctgagttcaagctgaacacctacaatgacaaggccctggccctgggcgccctgcagaacatccgctaccggggcggcaacaccaggacaggcaaggccctgaccttcatcaaggagaaggtgctgacctgggagagcggcatgaggaagaatgtgcccaaggtgctggtggtggtgacagatggccgcagccaggatgaggtgaagaaggccgccctggtgatccagcagagcggcttctctgtgtttgtggtgggcgtggctgatgtggactacaatgagctggccaacatcgccagcaagcccagcgagagacatgtgttcatcgtggatgactttgagagctttgagaagattgaggacaacctgatcacctttgtgtgtgaaacagccaccagcagctgccccctcatctacctggatggctacaccagccctggcttcaagatgctggaggcctacaacctgacagagaagaactttgcctctgtgcagggcgtgtccctggagagcggcagcttccccagctacagcgcctaccgcatccagaagaatgcctttgtgaaccagcccacagctgacctgcaccccaacggcctgccccccagctacaccatcatcctgctcttccggctgctgcctgagacccccagcgacccctttgccatctggcagatcacagaccgggactacaagccccaggtgggcgtgattgctgaccccagcagcaagaccctgtccttcttcaacaaggacaccagaggagaggtgcagacagtgacctttgacacagaggaggtgaagaccctcttctacggcagcttccacaaggtgcacatcgtggtgaccagcaagtctgtgaagatctacatcgactgctatgagatcatcgagaaggacatcaaggaggccggcaacatcaccacagatggctatgagatcctgggcaagctgctgaagggggagaggaagtctgctgccttccagatccagagctttgacatcgtgtgcagccctgtgtggaccagccgggaccgctgctgtgacatccccagcagaagagatgagggcaaatgtcctgccttccccaacagctgcacctgcacccaggacagcgtgggccccccaggccccccaggccctgctgggggccctggggccaagggccccagaggagagcggggcatcagcggggccatcggccccccaggccccaggggggacatcggccccccaggcccccagggccccccaggcccccagggccccaacggcctgagcatccctggagagcagggccggcagggcatgaagggagatgctggggagcccggcctgcccggccgcacaggcaccccaggcctgcccggccccccaggccccatgggccccccaggggaccggggcttcaccgggaaggatggagccatgggcccccggggccccccaggccccccaggcagccctggcagccctggggtgacaggccccagcggcaagccaggcaagccaggggaccacggccggcccggccccagcggcctgaagggggagaagggggacagaggagacatcgccagccagaacatgatgagagctgtggcccggcaggtgtgtgagcagctgatcagcggccagatgaaccgcttcaaccagatgctgaaccagatccccaatgactaccagagcagcaggaaccagcccggccccccaggccccccaggccccccaggcagcgctggggcccggggggagcccggccctgggggccggcccggcttccctggcaccccaggcatgcagggccccccaggagagcggggcctgcctggagagaagggggagcggggcaccggcagcagcggcccccggggcctgcccggccccccaggcccccagggcgagagcaggactggacctcctggcagcacaggcagccggggccccccaggccccccaggccggcccggcaacagcggcatccggggccccccaggccccccaggctactgtgacagcagccagtgtgccagcatcccctacaacggccagggctacccaggcagcggctag

SEQ ID NO: 145690 - DNA, 5700 bp, Artificial Sequence
  derived and/or modified sequence
atgaggagccggctgcccccagccctggccgccctgggcgccgccctgctgctgagcagcattgaagctgagggcatggagtgcctgaccagggctgaggccgacatcgtgctgctggtggatggctcctggagcatcggccgggccaacttcagaacagtgcgctccttcatcagcagaattgtggaggtgtttgatattggccccaagagggtgcagatcgccctggcccagtacagcggggaccccaggacagagtggcagctgaatgcccaccgggacaagaagagcctgctgcaggccgtggccaacctgccctacaagggcggcaacaccctgaccggcatggccctgaacttcatccggcagcagaacttccgcacccaggccggcatgaggccccgggccaggaagattggagtgctgatcacagatggcaagagccaggatgatgtggaggcccccagcaagaagctgaaggatgaaggagtggagctgtttgccatcggcatcaagaatgctgatgaggtggagctgaagatgattgccacagatcctgatgacacccacgcctacaacgtggccgactttgagagcctgagcagaattgtggatgacctgaccatcaacctgtgcaacagcgtgaagggccctggggacctggaggcccccagcaacctggtgatcagcgagaggacccacaggagcttccgggtgtcctggaccccacccagcgacagcgtggaccgctacaaggtggagtactaccctgtgtctgggggcaagaggcaggagttctacgtgtccaggatggagaccagcacagtgctgaaggacctgaagccagagacagaatatgtggtgaatgtgtacagcgtggtggaggatgagtacagcgagcccctgaagggcacagagaagaccctgcctgtgcctgtggtgtccctgaacatctatgatgtgggccccaccaccatgcacgtgcagtggcagcctgtgggcggggccaccggctacatcctgagctacaagcctgtgaaggacacagagcccacccggcccaaggaggtgcggctgggccccaccgtgaatgacatgcagctgacagacctggtgcccaacacagaatatgctgtgacagtgcaggccgtgctgcatgacctgaccagcgagcctgtgacagtgcgggaggtgaccctgcccctgccccggccccaggacctgaagctgagagatgtgacccacagcaccatgaatgtgttctgggagcctgtgcctgggaaggtgaggaagtacatcgtgcgctacaagaccccagaagaagatgtgaaggaggtggaggtggacagaagtgagaccagcaccagcctgaaggacctcttcagccagaccctgtacacagtgtctgtgtctgctgtgcatgatgaaggagagagcccccctgtgacagcccaggagaccaccaggcctgtgcctgcccccaccaacctgaagatcacagaggtgaccagcgagggcttccggggcacctgggaccatggagccagtgatgtgtccctgtaccgcatcacctgggcccccttcggcagcagtgacaagatggagaccatcctgaatggagatgagaacaccctggtgtttgagaacctgaaccccaacaccatctatgaggtgtccatcacagccatctacccagatgagagcgagagtgatgacctgattggcagcgagaggaccctgcccatcctgaccacccaggcccccaagagcggccccaggaacctgcaggtgtacaatgccaccagcaacagcctgactgtgaagtgggaccctgccagcggccgggtgcagaagtaccgcatcacctaccagcccagcactggagagggcaatgagcagaccaccaccatcggcggccggcagaacagcgtggtgctgcagaagctgaagccagacaccccctacaccatcaccgtgagcagcctgtacccagatggagagggcggccgcatgacaggccggggcaagaccaagcccctgaacacagtgaggaacctgcgggtgtatgaccccagcaccagcaccctgaatgtgcgctgggaccatgctgagggcaacccccggcagtacaagctgttctacgccccagctgctgggggccctgaggagctggtgcccatccctggcaacaccaactatgccatcctgaggaacctgcagcctgacaccagctacacagtgacagtggtgcctgtgtacacagaaggagatggcggccgcaccagtgacaccggccgcaccctgatgaggggcctggccagaaatgtgcaggtgtacaaccccacccccaacagcctggatgtgcgctgggaccctgcccctggccctgtgctgcagtacagagtggtgtacagccctgtggatggcacccggcccagcgagagcatcgtggtgcccggcaacaccaggatggtgcacctggagcggctcatcccagacaccctgtacagcgtgaacctggtggccctgtacagtgatggagagggcaaccccagccctgcccagggccgcaccctgcccaggagcggccccaggaacctgcgggtgtttggagagaccaccaacagcctgtctgtggcctgggaccacgcagatggccctgtgcagcagtaccgcatcatctacagccccaccgtgggggaccccattgatgagtacaccaccgtgcccggcagaagaaataatgtcatcctgcagcccctgcagcctgacaccccctacaagatcaccgtgattgctgtgtatgaagatggagatggcggccacctgactggaaatggccgcacagtgggcctgctgcccccccagaacatccacatcagtgatgagtggtacacccgcttccgggtgtcctgggaccccagccccagccctgtgctgggctacaagatcgtgtacaagcctgtgggcagcaatgagcccatggaggcctttgtgggggagatgaccagctacaccctgcacaacctgaaccccagcaccacctatgatgtgaatgtgtatgcccagtatgacagcggcctgtctgtgcccctgacagaccagggcaccaccctgtacctgaatgtgacagacctgaagacctaccagatcggctgggacaccttctgtgtgaagtggagcccccacagagctgccaccagctaccgcctgaagctgagccctgcagatggcacccggggccaggagatcaccgtgcggggcagcgagaccagccactgcttcaccggcctgagcccagacacagattatggagtgacagtgtttgtgcagacccccaacctggagggccctggggtgtctgtgaaggagcacaccaccgtgaagcccacagaggcccccacagagccccccaccccacctcctccacccaccatccccccagccagagatgtgtgcaagggggccaaggctgacatcgtgttcctgacagatgcctcctggagcattggagatgacaacttcaacaaggtggtgaagttcatcttcaacacagtgggcggctttgatgagatcagccctgctggcatccaggtgtcctttgtgcagtacagtgatgaggtgaagtctgagttcaagctgaacacctacaatgacaaggccctggccctgggcgccctgcagaacatccgctaccggggcggcaacaccaggacaggcaaggccctgaccttcatcaaggagaaggtgctgacctgggagagcggcatgaggaagaatgtgcccaaggtgctggtggtggtgacagatggccgcagccaggatgaggtgaagaaggccgccctggtgatccagcagagcggcttctctgtgtttgtggtgggcgtggctgatgtggactacaatgagctggccaacatcgccagcaagcccagcgagagacatgtgttcatcgtggatgactttgagagctttgagaagattgaggacaacctgatcacctttgtgtgtgaaacagccaccagcagctgccccctcatctacctggatggctacaccagccctggcttcaagatgctggaggcctacaacctgacagagaagaactttgcctctgtgcagggcgtgtccctggagagcggcagcttccccagctacagcgcctaccgcatccagaagaatgcctttgtgaaccagcccacagctgacctgcaccccaacggcctgccccccagctacaccatcatcctgctcttccggctgctgcctgagacccccagcgacccctttgccatctggcagatcacagaccgggactacaagccccaggtgggcgtgattgctgaccccagcagcaagaccctgtccttcttcaacaaggacaccagaggagaggtgcagacagtgacctttgacacagaggaggtgaagaccctcttctacggcagcttccacaaggtgcacatcgtggtgaccagcaagtctgtgaagatctacatcgactgctatgagatcatcgagaaggacatcaaggaggccggcaacatcaccacagatggctatgagatcctgggcaagctgctgaagggggagaggaagtctgctgccttccagatccagagctttgacatcgtgtgcagccctgtgtggaccagccgggaccgctgctgtgacatccccagcagaagagatgagggcaaatgtcctgccttccccaacagctgcacctgcacccaggacagcgtgggccccccaggccccccaggccctgctgggggccctggggccaagggccccagaggagagcggggcatcagcggggccatcggccccccaggccccaggggggacatcggccccccaggcccccagggccccccaggcccccagggccccaacggcctgagcatccctggagagcagggccggcagggcatgaagggagatgctggggagcccggcctgcccggccgcacaggcaccccaggcctgcccggccccccaggccccatgggccccccaggggaccggggcttcaccgggaaggatggagccatgggcccccggggccccccaggccccccaggcagccctggcagccctggggtgacaggccccagcggcaagccaggcaagccaggggaccacggccggcccggccccagcggcctgaagggggagaagggggacagaggagacatcgccagccagaacatgatgagagctgtggcccggcaggtgtgtgagcagctgatcagcggccagatgaaccgcttcaaccagatgctgaaccagatccccaatgactaccagagcagcaggaaccagcccggccccccaggccccccaggccccccaggcagcgctggggcccggggggagcccggccctgggggccggcccggcttccctggcaccccaggcatgcagggccccccaggagagcggggcctgcctggagagaagggggagcggggcaccggcagcagcggcccccggggcctgcccggccccccaggcccccagggcgagagcaggactggacctcctggcagcacaggcagccggggccccccaggccccccaggccggcccggcaacagcggcatccggggccccccaggccccccaggctactgtgacagcagccagtgtgccagcatcccctacaacggccagggctacccaggcagcggctag

SEQ ID NO: 145691 - DNA, 8964 bp, Artificial Sequence
  derived and/or modified sequence
atgaggagccggctgcccccagccctggccgccctgggcgccgccctgctgctgagcagcattgaagctgaggtggaccccccaagtgacctgaacttcaagatcattgatgagaacacagtgcacatgtcctgggccaagcctgtggaccccatcgtgggctaccgcatcaccgtggaccccaccacagatggccccaccaaggagttcaccctgagcgccagcaccacagagaccctgctgtctgagctggtgcctgagacagaatatgtggtgaccatcaccagctatgatgaggtggaggagagcgtgcctgtgattggccagctgaccatccagacaggcagcagcaccaagcctgtggagaagaagccaggcaagacagagatccagaagtgcagcgtgtctgcctggacagacctggtgttcctggtggatggctcctggagcgtgggcaggaacaacttcaagtacatcctggacttcatcgccgccctggtgtctgcctttgacatcggggaggagaagaccagggtgggcgtggtgcagtacagcagtgacaccaggacagagttcaacctgaaccagtactaccagagagatgagctgctggccgccatcaagaagatcccctacaagggcggcaacaccatgactggagatgccatcgactacctggtgaagaacaccttcacagagagcgctggggcccgggtgggcttccccaaggtggccatcatcatcacagatggcaagagccaggatgaggtggagatcccagcccgggagctgagaaatgtgggcgtggaggtgttcagcctgggcatcaaggctgctgatgccaaggagctgaagcagatcgccagcacccccagcctgaaccacgtgttcaacgtggccaactttgatgccatcgtggacatccagaatgagatcatcagccaggtgtgcagcggcgtggatgagcagctgggggagctggtgtctggagaggaggtggtggagccccccagcaacctgattgccatggaggtgagcagcaaatatgtgaagctgaactggaaccccagccccagccctgtgacaggctacaaggtgatcctgacccccatgacagctggcagccggcagcacgccctgtctgtgggcccccagaccaccaccctgtctgtgcgggacctgtctgctgacacagagtaccagatctctgtgtctgccatgaagggcatgaccagcagcgagcccatcagcatcatggagaagacccagcccatgaaggtgcaggtggagtgcagccggggcgtggacatcaaggctgacatcgtgttcctggtggatggcagctacagcattggaattgccaactttgtgaaggtgcgggccttcctggaggtgctggtgaagagctttgagatcagccccaacagagtgcagatcagcctggtgcagtacagccgggacccccacacagagttcaccctgaagaagttcaccaaggtggaggacatcatcgaggccatcaacaccttcccctaccggggcggcagcaccaacacaggcaaggccatgacctacgtgcgggagaagatctttgtgcccagcaagggcagccgcagcaatgtgcccaaggtgatgatcctgatcacagatggcaagagcagtgatgccttccgggaccctgccatcaagctgaggaacagtgatgtggagatctttgctgtgggcgtgaaggatgctgtgcgctctgagctggaggccatcgccagccccccagctgagacccacgtgttcaccgtggaggactttgatgccttccagaggatcagctttgagctgacccagagcatctgcctgcgcatcgagcaggagctggccgccatcaagaagaaggcctacgtgccccccaaggacctgtccttcagcgaggtgaccagctatggcttcaagaccaactggagccctgctggagaaaatgtgttctcctaccacatcacctacaaggaggccgctggagatgatgaggtgacagtggtggagcccgccagcagcacctctgtggtgctgagcagcctgaagccagagaccctgtacctggtgaatgtgacagcagaatatgaagatggcttcagcatccccctggccggggaggagaccacagaggaggtgaagggggcccccaggaacctgaaggtgacagatgagaccacagacagcttcaagatcacctggacccaggcccctggccgggtgctgcgctaccgcatcatctacagacctgtggccggcggggagagccgggaggtgaccaccccacccaaccagaggaggaggaccctggagaacctgatcccagacaccaagtatgaggtgtctgtcatccctgagtacttcagcggccctggcacccccctgactggaaatgctgccacagaggaggtgcggggcaacccccgggacctgcgggtgtctgaccccaccaccagcaccatgaagctgtcctggagcggggcccctgggaaggtgaagcagtacctggtgacctacacccctgtggccggcggggagacccaggaggtgacagtgcggggggacaccaccaacacagtgctgcagggcctgaaggagggcacccagtatgccctgtctgtgacagccctgtatgccagcggggctggagatgccctgtttggagagggcaccaccctggaggagcggggcagcccccaggacctggtgaccaaggacatcacagacaccagcattggagcctactggaccagcgcccctggcatggtgcggggctacagagtgtcctggaagagcctgtatgatgatgtggacaccggggagaagaacctgcctgaagatgccatccacaccatgattgagaacctgcagcctgagaccaagtaccgcatctctgtgtttgccacctacagcagtggagagggggagcccctgactggagatgccaccacagagctgagccaggacagcaagaccctgaaggtggatgaggagacagagaacaccatgagggtgacctggaagccagcccctgggaaggtggtgaactacagagtggtgtaccggccccacggccggggcaagcagatggtggccaaggtgccccccaccgtgaccagcacagtgctgaagaggctgcagccccagaccacctatgacatcaccgtgctgcccatctacaagatgggagagggcaagctgcggcagggcagcggcaccacagccagccgcttcaagagccccaggaacctgaagaccagtgaccccaccatgagcagcttccgggtgacctgggagcccgcccctggagaggtgaagggctacaaggtgaccttccaccccactggagatgaccggcggctgggggagctggtggtgggcccctatgacaacacagtggtgctggaggagctgcgggccggcaccacctacaaggtgaatgtgtttggcatgtttgatggaggagagagcagccccctggtgggccaggagatgaccaccctgagtgacaccaccgtgatgcccatcctgagcagcggcatggagtgcctgaccagggctgaggccgacatcgtgctgctggtggatggctcctggagcatcggccgggccaacttcagaacagtgcgctccttcatcagcagaattgtggaggtgtttgatattggccccaagagggtgcagatcgccctggcccagtacagcggggaccccaggacagagtggcagctgaatgcccaccgggacaagaagagcctgctgcaggccgtggccaacctgccctacaagggcggcaacaccctgaccggcatggccctgaacttcatccggcagcagaacttccgcacccaggccggcatgaggccccgggccaggaagattggagtgctgatcacagatggcaagagccaggatgatgtggaggcccccagcaagaagctgaaggatgaaggagtggagctgtttgccatcggcatcaagaatgctgatgaggtggagctgaagatgattgccacagatcctgatgacacccacgcctacaacgtggccgactttgagagcctgagcagaattgtggatgacctgaccatcaacctgtgcaacagcgtgaagggccctggggacctggaggcccccagcaacctggtgatcagcgagaggacccacaggagcttccgggtgtcctggaccccacccagcgacagcgtggaccgctacaaggtggagtactaccctgtgtctgggggcaagaggcaggagttctacgtgtccaggatggagaccagcacagtgctgaaggacctgaagccagagacagaatatgtggtgaatgtgtacagcgtggtggaggatgagtacagcgagcccctgaagggcacagagaagaccctgcctgtgcctgtggtgtccctgaacatctatgatgtgggccccaccaccatgcacgtgcagtggcagcctgtgggcggggccaccggctacatcctgagctacaagcctgtgaaggacacagagcccacccggcccaaggaggtgcggctgggccccaccgtgaatgacatgcagctgacagacctggtgcccaacacagaatatgctgtgacagtgcaggccgtgctgcatgacctgaccagcgagcctgtgacagtgcgggaggtgaccctgcccctgccccggccccaggacctgaagctgagagatgtgacccacagcaccatgaatgtgttctgggagcctgtgcctgggaaggtgaggaagtacatcgtgcgctacaagaccccagaagaagatgtgaaggaggtggaggtggacagaagtgagaccagcaccagcctgaaggacctcttcagccagaccctgtacacagtgtctgtgtctgctgtgcatgatgaaggagagagcccccctgtgacagcccaggagaccaccaggcctgtgcctgcccccaccaacctgaagatcacagaggtgaccagcgagggcttccggggcacctgggaccatggagccagtgatgtgtccctgtaccgcatcacctgggcccccttcggcagcagtgacaagatggagaccatcctgaatggagatgagaacaccctggtgtttgagaacctgaaccccaacaccatctatgaggtgtccatcacagccatctacccagatgagagcgagagtgatgacctgattggcagcgagaggaccctgcccatcctgaccacccaggcccccaagagcggccccaggaacctgcaggtgtacaatgccaccagcaacagcctgactgtgaagtgggaccctgccagcggccgggtgcagaagtaccgcatcacctaccagcccagcactggagagggcaatgagcagaccaccaccatcggcggccggcagaacagcgtggtgctgcagaagctgaagccagacaccccctacaccatcaccgtgagcagcctgtacccagatggagagggcggccgcatgacaggccggggcaagaccaagcccctgaacacagtgaggaacctgcgggtgtatgaccccagcaccagcaccctgaatgtgcgctgggaccatgctgagggcaacccccggcagtacaagctgttctacgccccagctgctgggggccctgaggagctggtgcccatccctggcaacaccaactatgccatcctgaggaacctgcagcctgacaccagctacacagtgacagtggtgcctgtgtacacagaaggagatggcggccgcaccagtgacaccggccgcaccctgatgaggggcctggccagaaatgtgcaggtgtacaaccccacccccaacagcctggatgtgcgctgggaccctgcccctggccctgtgctgcagtacagagtggtgtacagccctgtggatggcacccggcccagcgagagcatcgtggtgcccggcaacaccaggatggtgcacctggagcggctcatcccagacaccctgtacagcgtgaacctggtggccctgtacagtgatggagagggcaaccccagccctgcccagggccgcaccctgcccaggagcggccccaggaacctgcgggtgtttggagagaccaccaacagcctgtctgtggcctgggaccacgcagatggccctgtgcagcagtaccgcatcatctacagccccaccgtgggggaccccattgatgagtacaccaccgtgcccggcagaagaaataatgtcatcctgcagcccctgcagcctgacaccccctacaagatcaccgtgattgctgtgtatgaagatggagatggcggccacctgactggaaatggccgcacagtgggcctgctgcccccccagaacatccacatcagtgatgagtggtacacccgcttccgggtgtcctgggaccccagccccagccctgtgctgggctacaagatcgtgtacaagcctgtgggcagcaatgagcccatggaggcctttgtgggggagatgaccagctacaccctgcacaacctgaaccccagcaccacctatgatgtgaatgtgtatgcccagtatgacagcggcctgtctgtgcccctgacagaccagggcaccaccctgtacctgaatgtgacagacctgaagacctaccagatcggctgggacaccttctgtgtgaagtggagcccccacagagctgccaccagctaccgcctgaagctgagccctgcagatggcacccggggccaggagatcaccgtgcggggcagcgagaccagccactgcttcaccggcctgagcccagacacagattatggagtgacagtgtttgtgcagacccccaacctggagggccctggggtgtctgtgaaggagcacaccaccgtgaagcccacagaggcccccacagagccccccaccccacctcctccacccaccatccccccagccagagatgtgtgcaagggggccaaggctgacatcgtgttcctgacagatgcctcctggagcattggagatgacaacttcaacaaggtggtgaagttcatcttcaacacagtgggcggctttgatgagatcagccctgctggcatccaggtgtcctttgtgcagtacagtgatgaggtgaagtctgagttcaagctgaacacctacaatgacaaggccctggccctgggcgccctgcagaacatccgctaccggggcggcaacaccaggacaggcaaggccctgaccttcatcaaggagaaggtgctgacctgggagagcggcatgaggaagaatgtgcccaaggtgctggtggtggtgacagatggccgcagccaggatgaggtgaagaaggccgccctggtgatccagcagagcggcttctctgtgtttgtggtgggcgtggctgatgtggactacaatgagctggccaacatcgccagcaagcccagcgagagacatgtgttcatcgtggatgactttgagagctttgagaagattgaggacaacctgatcacctttgtgtgtgaaacagccaccagcagctgccccctcatctacctggatggctacaccagccctggcttcaagatgctggaggcctacaacctgacagagaagaactttgcctctgtgcagggcgtgtccctggagagcggcagcttccccagctacagcgcctaccgcatccagaagaatgcctttgtgaaccagcccacagctgacctgcaccccaacggcctgccccccagctacaccatcatcctgctcttccggctgctgcctgagacccccagcgacccctttgccatctggcagatcacagaccgggactacaagccccaggtgggcgtgattgctgaccccagcagcaagaccctgtccttcttcaacaaggacaccagaggagaggtgcagacagtgacctttgacacagaggaggtgaagaccctcttctacggcagcttccacaagagagatgagggcaaatgtcctgccttccccaacagctgcacctgcacccaggacagcgtgggccccccaggccccccaggccctgctgggggccctggggccaagggccccagaggagagcggggcatcagcggggccatcggccccccaggccccaggggggacatcggccccccaggcccccagggccccccaggcccccagggccccaacggcctgagcatccctggagagcagggccggcagggcatgaagggagatgctggggagcccggcctgcccggccgcacaggcaccccaggcctgcccggccccccaggccccatgggccccccaggggaccggggcttcaccgggaaggatggagccatgggcccccggggccccccaggccccccaggcagccctggcagccctggggtgacaggccccagcggcaagccaggcaagccaggggaccacggccggcccggccccagcggcctgaagggggagaagggggacagaggagacatcgccagccagaacatgatgagagctgtggcccggcaggtgtgtgagcagctgatcagcggccagatgaaccgcttcaaccagatgctgaaccagatccccaatgactaccagagcagcaggaaccagcccggccccccaggccccccaggccccccaggcagcgctggggcccggggggagcccggccctgggggccggcccggcttccctggcaccccaggcatgcagggccccccaggagagcggggcctgcctggagagaagggggagcggggcaccggcagcagcggcccccggggcctgcccggccccccaggcccccagggcgagagcaggactggacctcctggcagcacaggcagccggggccccccaggccccccaggccggcccggcaacagcggcatccggggccccccaggccccccaggctactgtgacagcagccagtgtgccagcatcccctacaacggccagggctacccaggcagcggctag

SEQ ID NO: 145692 - DNA, 9192 bp, Artificial Sequence
  derived and/or modified sequence
atgcggagccggctgccccccgccctggccgccctgggcgccgccttgctgttgagcagtattgaggccgaggtggatcccccctccgatctcaatttcaaaatcatcgacgagaataccgtgcacatgtcttgggccaagccagtggatcctatcgtgggctacaggatcaccgtggaccctaccacagatgggccaactaaggagtttacgctgtctgcgtctaccacagagacactcctgagcgaacttgtgccagaaaccgagtacgtggtgacaattacgtcatacgatgaggtggaagaaagcgtgcctgtgattggacagttaactattcaaacggggtcatccaccaaaccagtggaaaaaaaaccaggcaaaacggaaatacagaagtgctcagtcagcgcctggactgatttagtgtttctcgttgatgggagttggagcgtcggccggaacaactttaagtacatcctggattttatcgccgccctggtttccgccttcgacataggggaagagaagacgagggtcggcgtggttcaatactccagtgataccaggacagaattcaatcttaaccagtattatcagagagacgaacttctcgcagctatcaagaagatcccgtacaagggaggtaataccatgaccggggacgctatagattacctggtgaaaaatactttcacagagtctgcaggcgcaagagtggggtttccaaaggtcgctattatcataacggatggaaagtcccaagatgaggtcgagattccagctcgcgagctgcgcaacgtgggcgtggaggtgtttagccttggtattaaagccgccgatgctaaggaactcaaacagattgcctccactccttctttgaaccatgtattcaacgttgcaaattttgacgccatcgtggatatccagaacgaaatcatatcacaagtgtgctcgggcgtggacgaacagcttggggagttagtaagcggcgaagaggtcgtggaaccacccagcaatttgatagcaatggaggtgtctagcaagtacgtaaaactaaactggaacccctcaccttcccctgtgacaggctataaggtaatcctgactcccatgaccgcaggctccagacagcacgcgttaagtgtagggcctcagactactacactgtctgtcagggatctgagtgccgatactgaatatcaaatctctgtttccgccatgaagggaatgaccagtagtgaacccatatccatcatggagaaaacccaaccaatgaaggttcaggtagagtgtagcaggggggtagacatcaaagctgatatcgtttttcttgtggacgggtcctattccattggaattgctaactttgtcaaagtgcgagcgtttttggaggttctcgttaagtcattcgagatctccccgaatcgggtgcaaatctcgttggtacagtattcaagagacccccacaccgagtttacccttaagaagtttactaaagttgaggatataattgaagccatcaatacatttccttatcgcgggggttctactaacacaggcaaggcgatgacttacgtgagggagaaaattttcgtgcctagcaagggtagccgttccaatgtgccaaaggtgatgatcctaataacagacggcaaatcttccgatgcgttccgtgaccctgccatcaaactgcgcaactccgatgtggagatctttgccgtgggggtgaaagatgcggtaaggagtgagcttgaagccattgcctctccgccggctgaaactcatgtgttcaccgtggaagatttcgacgccttccagagaatttctttcgaacttactcagtctatatgtttgcggattgaacaggagctggcagccataaaaaaaaaggcctatgttcctcctaaagacctgtcgttctccgaggtgacttcctacggcttcaagacaaactggtctccggccggggaaaatgtcttctcataccatattacttataaagaagccgcaggcgacgacgaggttacagtagtagagcccgcatctagcacctccgtcgtgctgtcttcattgaagccagaaactctatacctcgtaaacgtgaccgccgaatatgaggacggcttcagcatacctttagccggcgaagaaacaaccgaggaagtgaagggagcacctcgcaacctgaaagtcaccgacgaaactaccgatagcttcaagatcacctggacgcaggctccaggacgcgtacttaggtacaggattatatatcggcccgtcgccggcggagaatccagagaggttactacgccacctaatcaaaggagaagaacgctcgagaacctgatacccgacactaagtatgaagtaagtgtgatccccgaatacttttctgggccgggaacaccgcttacggggaacgctgcaaccgaggaggtacgcggcaaccctagggacctcagagtttccgatccaacgacttcgacaatgaagttaagctggtctggtgccccaggcaaggttaagcagtaccttgttacttatacaccagtggccggcggagagacacaggaagttaccgtccggggagacacgaccaacaccgtgctgcaggggctgaaagaggggacacagtacgctttgtcggtgactgccttatacgcatccggtgctggtgacgccctatttggtgaaggcaccacattggaggaacgcgggtctcctcaggacctggtaaccaaggatatcactgacacgtcaatcggagcctattggacatcagcccctgggatggtgcgcgggtatagggtgagttggaagtccctatatgacgatgtcgacacaggtgagaagaacctgccagaagacgctattcacaccatgatcgagaacctccaaccggaaacaaagtacaggataagtgtgttcgcaacttattcatccggagaaggcgaacctttaactggcgatgcaacaacagagctctcccaagattccaagaccctgaaggtcgacgaagagacagagaacactatgcgcgtgacatggaaacctgcacctggcaaagtggttaattaccgggtggtttacaggccccacgggcggggaaaacagatggtggcaaaagttccacctactgttacttctacggtgctgaagcgcctccaaccacagacaacctatgatatcacagttctgccaatctacaaaatgggggaaggcaaactgaggcagggttccgggactacagccagccgatttaaatcacccaggaaccttaagactagtgaccccaccatgtcttcgtttcgagtgacatgggaacccgctccaggcgaggtcaagggatacaaggtaactttccaccccaccggtgacgatcgccggcttggagaactggtcgttggcccatatgacaatacagtagtgctggaagaactacgggcgggaaccacttacaaggtaaacgtattcggaatgtttgatggcggggaaagttctccgctggtagggcaagagatgaccacattatccgatacaacagttatgccaattcttagcagcggaatggagtgtttgactcgtgcagaagctgacattgtcctgcttgtggatggatcctggtctattggtagagctaactttagaaccgtgagatcatttatcagtcgcatcgtggaggtattcgatatcgggcccaaacgagtacagatcgccctggcacagtattcaggcgaccctcggaccgagtggcaattaaatgctcatcgcgataagaaatctctgctccaagcagtagcaaatttaccctacaaaggggggaacaccctgaccggtatggccctgaactttatccgtcaacagaatttcaggacccaagctggtatgagacctcgcgcccggaaaataggcgtcctgataacggacgggaaatcacaggacgatgtggaggctccgtctaaaaaacttaaggatgagggggtggagctattcgctatcggtattaaaaatgctgatgaggtagaacttaagatgattgcaacagatcctgacgatacgcacgcttataatgttgctgactttgagtcgctttctcggattgtcgacgacctcaccattaatctctgtaactccgtgaaagggcccggagatctggaggccccctcaaatctggttatctctgaacggacacatcggagttttcgagtgtcgtggacccctccctcagacagcgttgatagatataaggtcgagtactatccagtttcaggaggcaaacgacaggaattctatgtgtcacgaatggagacaagcacagtccttaaagaccttaagccggagacagagtacgtggtaaatgtttactccgtggtggaggatgaatatagcgagcccttaaaggggactgaaaagaccctgcctgtgcccgtggtttcgcttaacatttacgatgtcgggcccaccacaatgcacgtgcaatggcagccagtaggtggcgccacgggctatatcttgagctacaagcccgtgaaggacaccgaaccaacacggcccaaagaggtccgtcttggcccgacagtgaatgacatgcagctcactgatctggtccccaataccgaatatgcagtgacagtacaagcagtgctgcacgatctaacctccgagcccgtcactgtgagagaagtgacactgccgctgcctcgtccgcaggacttgaagctgcgagacgtgacccactctaccatgaatgtgttttgggaacccgtccccggtaaagtccgcaagtacatcgtccgctacaagacacctgaggaggatgtgaaagaagtggaagttgatcgcagtgagacctcaacatcattgaaggatttgttcagtcaaacattgtacaccgtttccgtcagcgcagtgcatgatgagggcgagtcaccacctgttacagctcaggagaccacacgacccgtcccagcccctacaaacctaaaaataacagaggtgacttcagagggcttcagaggcacatgggaccatggggcatctgacgtatccttatatcggatcacttgggctccgttcggctcgtctgataagatggagaccatcctcaacggcgacgaaaacacactggtttttgagaatctgaatcccaataccatttacgaggtgagtataacagcaatttatccagacgagtccgagagcgacgatctcattggaagcgaacggacactccctatcttgacaacacaggctcctaagtcaggacctcgcaatctgcaggtgtataatgccactagcaacagcttaaccgtgaaatgggatccagccagcggtcgagtgcaaaagtatcgcattacataccagcctagtaccggcgaagggaacgaacagacaactacgatcggcggcagacagaattcggtcgttctccaaaaacttaagccagacacaccttacactatcactgttagcagtctgtacccggatggggaggggggtcgaatgacagggcgcggcaaaacgaagcctctcaatacagttcgcaatttacgggtttatgaccctagcacttccactctgaacgtgcggtgggaccatgcggagggtaatccccgacagtacaaattgttctatgcccccgccgccggcggaccagaagagctagtcccaataccagggaacactaattatgctatccttcgcaacttacaacccgacacgtcatacacagtgacagttgtccccgtgtacacggaaggcgacggcggcaggacctccgacactggtagaactctgatgagagggttggctaggaatgtccaggtttacaaccccacaccaaacagtcttgacgtgagatgggatcccgccccgggaccagtgctgcagtaccgggtggtgtactctcccgtcgatggcactaggccctctgagagtatagtggtccccggtaacacacggatggtccacctcgaacggctaatccctgacacactatattctgtgaacctagtggcactctattctgatggggagggcaacccctcccccgcgcagggcagaacgctgccacgcagcggacctcgcaacttacgagtgttcggagagaccacgaattccctctccgttgcctgggatcacgctgacgggccagtgcaacagtaccgtattatctacagtccaacagtaggcgatcctatcgatgagtatacgactgtgccagggagaagaaataatgtgatcctgcagccactgcaacctgacactccatataagatcaccgttatagcagtgtacgaggacggcgatggagggcatctgacaggaaatggtcgcaccgtgggtctgctgcctccacagaacatccatatcagcgatgaatggtacactaggttccgcgtctcctgggacccctccccttcccccgtcctgggttacaagatcgtttataagcccgtgggcagcaatgagcccatggaggcctttgttggcgagatgacgagctacaccctccacaatctgaacccctcaaccacctatgacgtgaacgtgtatgcccagtatgattccggactctccgttcccttgaccgatcagggtactaccctttacctcaacgtgaccgacctgaagacctatcaaatcgggtgggatacattctgcgtaaagtggtccccacaccgagccgctacaagttataggctgaagctttctccagcggacggaacaagaggtcaggagattacggttcggggctccgaaaccagccattgcttcacaggtctgtcccccgacacagactatggagtcacggtgttcgtgcaaaccccgaacctggagggccccggagtttccgttaaagagcacaccaccgttaagcctaccgaggcacccactgaaccaccaaccccacccccgcctccaacaattccacctgcccgtgatgtatgcaaaggcgccaaggctgatatagtgtttctgactgacgcctcttggtctattggagacgacaatttcaacaaagtggtgaaattcattttcaatacagttggaggcttcgatgagatctcgcccgccggcatacaggtgagctttgtgcagtactccgacgaggtcaagagtgaattcaaactgaacacctataatgacaaagcattagccttgggagcccttcagaatatcaggtatagaggaggcaacacgaggaccgggaaagcgctgacctttataaaggagaaagtcctgacctgggagagtggtatgcggaagaatgtgcccaaggttttagtagtagtgaccgatgggcgtagtcaggatgaagtgaagaaggctgcactggttattcagcaatctggcttttctgtgtttgtggtgggggtggcggatgtcgattacaacgaactggccaacatcgcctctaagccatcagagcgccacgttttcattgtcgacgattttgaatctttcgaaaagatagaagacaatctgattacattcgtgtgcgaaacagccacatcatcctgtccactgatctacctggacggctatacaagtcctggtttcaagatgctcgaagcatacaatctaacagagaagaatttcgccagtgtgcagggcgtgtccctcgaatcggggtctttcccctcctactccgcttaccggatccaaaaaaacgcctttgtgaaccaacccaccgccgatcttcatcctaatggcctcccgcccagttatactataatactgctctttagattgctgcccgaaacgcccagcgacccattcgccatctggcaaatcacggatcgtgattacaagccccaagtgggagtgatcgcagacccaagctccaagacattgagtttttttaataaagatactcgcggggaagtccaaacagtcacgttcgacacagaggaagtaaagacattattttacggctcatttcacaaagtacacatagtggtaacctcaaaaagtgttaaaatctacatagactgttatgaaatcattgaaaaggacattaaagaagccggcaacattacaacagatgggtatgaaattctgggaaagctgctgaaaggcgaacgcaaatctgccgctttccaaattcagtcctttgacattgtctgtagcccagtttggaccagccgcgatagatgttgtgacataccttcaagacgagatgaaggcaaatgtcctgctttcccaaatagctgcacctgcacccaggattccgtgggcccacccgggcctccgggcccggcaggcgggcccggagcgaaggggccccgcggcgagcgtgggatctccggagccatcggtcctcccgggcctcggggcgatattggccctcctggaccccagggtcctcccggccctcaaggtccaaacggcctctcaattcctggggagcagggaagacagggaatgaagggggatgcgggagagccgggtctgccagggaggaccggcacgccaggcctgcctgggccacccggtccaatggggccgcctggtgatagaggttttaccggaaaagacggggctatgggacctcgcggacctcccgggccaccgggatctcctggctctcccggcgttaccggcccatcagggaagccaggtaaaccaggggatcacggtcggccagggccctcaggacttaagggcgaaaagggtgaccgcggggacattgccagccagaatatgatgagagccgttgcacggcaggtatgcgaacagctcatttccgggcagatgaaccgcttcaaccagatgctaaatcagattcccaacgactatcagtcttctagaaaccaaccaggacccccaggcccaccaggacccccaggaagcgcgggcgccaggggtgaacctgggcccggtggccgcccgggtttcccaggcacgcccggaatgcagggtccccctggtgagcgcggattgcctggagaaaagggagaaaggggcaccggttcttctgggcccagggggttacccggcccaccaggcccacagggcgaatcccgtactggtcccccaggatcaaccggaagccgaggcccccccgggccccccggtcgacctggcaattcaggcatccgcgggccaccaggtcctcccggttactgtgatagcagtcagtgtgcttccatcccctacaatggtcagggctaccctggaagtggttag

SEQ ID NO: 145693 - DNA, 5700 bp, Artificial Sequence
  derived and/or modified sequence
atgcggagccggctgccccccgccctggccgccctgggcgccgccctccttctgtcatcaattgaggccgagggcatggagtgcttaacgagagccgaggcagacattgtgttgctcgtcgacggatcctggtccattggtagggctaactttcgcaccgtgagatccttcatcagtcggatcgtcgaagtgtttgatatcggccccaagagagtgcagattgcactggcacagtatagcggagatcccagaaccgagtggcaactcaatgcacaccgcgacaagaagtcgctcctgcaggccgtggctaatctgccctacaagggcggtaacactcttacaggaatggccctgaattttatccgtcaacagaacttcagaacccaggctgggatgagaccacgagccaggaaaatcggcgttctgatcacagatggcaagtctcaggatgacgtggaggcccccagcaagaaactgaaggacgagggcgttgagctcttcgcgatcggcatcaagaacgccgatgaagtggagctcaagatgatcgccactgatcccgatgacacacatgcctataacgttgccgatttcgagtccctttcgcgcatcgtcgacgatctgacgattaacctgtgtaattctgtgaaagggccaggcgatctcgaggccccatcaaacctggttatatccgaacgcactcacaggagcttcagagtctcctggacccctccgtccgacagtgtggatcgctataaggttgagtattatcctgtttcaggtggcaagagacaggagttctacgtctcgagaatggaaacttcaacagtcttaaaggacttgaagccagagaccgagtacgtagttaacgtgtactccgtggtagaagacgagtattcggagcccctgaagggcacagagaaaactttgcctgtgccggtggtgtccctgaatatctacgatgttggccctaccaccatgcatgtgcaatggcagcccgttggaggcgctaccgggtatattctgagttacaagcccgttaaagataccgagcccaccagacccaaggaagttcgcctaggtcctactgtgaatgacatgcagcttacggatttggtgccaaatacagagtacgcggtaacagttcaggccgtgcttcacgacttaacttctgagccagtcaccgtgagggaagtgacactgcctcttcctcgtccgcaggatttgaagcttcgtgatgtgacccatagtactatgaatgtattttgggaacccgtccctgggaaagtgaggaagtatatcgtgcggtacaagacgcccgaagaggacgtaaaagaggttgaagtcgaccgatccgagacgagtacgtcgctgaaagacctcttctcccagaccttatacaccgtgtccgtgagcgcagttcacgacgagggggaaagtcctccagtgacagcacaggaaaccacacgtcctgtgccagcacccacgaacctgaagatcaccgaggtaacctctgagggatttcggggaacctgggaccacggtgcatctgatgtttctttgtatcgtatcacttgggcaccttttggcagttccgacaaaatggaaaccatactgaacggtgatgagaatacattggtgttcgagaaccttaacccgaatactatctacgaggtgagcattaccgcgatatatccagatgaatccgaatcagatgacctgattggatcagagagaaccctgccaatactgactactcaggcccctaagtctggcccacgtaacctgcaggtgtacaatgctaccagtaatagcctgacagtgaagtgggacccagccagcggccgggtccagaaatatcgaattacctatcagccatctacaggggaggggaatgaacagactactacaatcggcggccgccaaaacagtgttgtgcttcagaaactgaaaccagatactccatacacaataacagtcagcagtctttaccccgatggggaaggcggccgaatgaccggcagggggaagactaaacctctcaacacagtgcgaaatctacgagtttacgatccatctacatcaactttgaacgtgcgctgggaccacgccgaggggaaccccagacagtataaactcttttatgcccccgctgccggcggcccagaggagctggtgcccatcccaggcaacacgaattatgccatcttgagaaacctgcagcctgataccagttatacagtcacggtggtgcctgtgtatacagaaggtgacggaggacgtacttccgataccggcagaacgcttatgcgagggctggcgaggaacgtgcaggtctataaccctactcccaatagcttggatgtgaggtgggatccagcgcccgggccagtgctccagtatcgcgtggtttactccccggtcgatggtacccgcccaagtgaatctatcgtggtgccaggaaacactaggatggtccatcttgaacggctcattcctgacaccctctactcggttaatttggtggccttatattctgacggggagggcaaccctagtccggcgcagggcagaacactgcccaggtccggcccccggaatctgcgagtctttggcgagacgacaaattcactgagcgtggcttgggaccatgcggacggcccagtccagcaatatcggattatctactcaccaaccgtgggcgaccccatcgatgagtacaccactgtcccaggaaggagaaataacgtaatcctacaacctctccaacccgacactccctacaaaatcaccgtcattgcagtctacgaggacggtgatggtggccatctcacgggtaatggtcgaaccgtcggcctgttgccgccacagaacattcatatatctgacgagtggtacacccggtttcgcgtgagctgggatcccagcccaagtcctgttttgggttacaagatcgtgtacaagcccgtgggcagcaacgagcctatggaggcgtttgtaggcgaaatgacttcatacactctccataacctgaatccgagtactacctatgatgtgaatgtgtacgcccagtacgattcaggcctgtcggtgcccctgactgatcaggggaccaccctctacctgaatgtaaccgacctcaaaacataccagattggctgggatactttctgtgttaagtggagtccgcaccgcgcggccacgagctatagactgaagctgagcccagctgatgggacccgaggacaggaaatcaccgtacgcggatctgagacctcacactgcttcaccggcctctcccccgataccgactatggggtgacggtttttgtccagacgccgaaccttgaaggcccgggagtgtctgtgaaggagcacacgaccgtcaaaccgaccgaagcccccacagaacctcccacgccaccacctccaccaaccattcctcctgccagggacgtgtgtaagggggctaaagccgatattgtgtttctcacggatgcctcctggtcaatcggagacgataactttaacaaagttgtcaaattcatcttcaacacagtgggggggttcgatgaaattagccctgccggaattcaggtcagcttcgtgcagtattccgatgaagtgaaaagcgaattcaaactgaatacgtacaacgacaaagcgcttgcactgggggccctgcaaaatatcaggtatcgaggtgggaatacacgcacaggcaaagctctaacatttattaaagagaaggtattgacatgggagtccggaatgcggaagaatgtcccaaaagtcctcgtggttgtgacggatggacgtagtcaggacgaagtgaagaaagccgcactcgtaatccagcaatctggcttttcagtgttcgtggtcggtgtggcggatgtggattataacgagttggccaacatcgcatccaaacctagtgaaagacatgtgttcatcgtggatgattttgaaagctttgaaaaaattgaggataacctaatcactttcgtgtgcgagacagccacctccagctgccccctgatttatttagacggctacacctctccagggtttaagatgttagaggcttacaacctcacggagaaaaacttcgccagtgtccagggggtcagtcttgagtccggctcttttccaagctacagtgcctaccgcatccagaaaaatgccttcgtgaaccagcctacagccgatctgcacccgaatggactgcctcctagttacactataatccttcttttccggcttttaccagagactcccagcgacccctttgcaatatggcagataaccgatagagattataaaccgcaggtcggagtgatcgccgacccaagtagcaagacactttctttcttcaacaaagatactagaggtgaagttcagactgttacgtttgacacagaggaagtgaaaaccttattttatggcagctttcataaggtccacattgtagttacttcaaaaagtgtgaaaatctacatcgactgctacgagattattgaaaaggacattaaggaggccggcaatattaccaccgatgggtacgagattctgggtaagctgttaaagggcgaaaggaagtctgccgcctttcagatacagtcttttgatatcgtttgcagtccagtctggacctcaagggatagatgttgtgatattcccagtcgaagggatgaaggaaaatgccccgctttccctaactcatgcacttgcacacaggacagtgttggcccgcctggaccccctgggcccgccggagggcctggcgctaaaggtccgaggggcgaacggggtatcagtggggcgattggacctcctggtccaagaggagacattggtccccctgggcctcagggtccacctggacctcagggtcccaacggcttgagcattcctggcgagcagggaaggcagggcatgaaaggcgacgccggagagcccggtcttccaggacggacaggcacacccggcctgccaggccctcccggccctatgggaccacccggcgaccggggctttaccgggaaagacggtgcaatgggcccccggggtcctcccggaccacccggctctccaggcagccccggggtcaccgggcccagcggtaagcctggcaagcccggcgaccacggcagacccggccctagcggcctaaagggcgaaaaaggcgacaggggcgacattgcctcccaaaacatgatgcgagcagttgctcgtcaggtgtgcgagcaactgatcagcggacagatgaaccggttcaatcagatgctgaaccagatcccgaacgactaccagtcgtcccgcaaccagccaggcccacccggccctcccggaccacccggatcggccggggccaggggagaacctgggcccggcggtcgacccggtttccccggtaccccgggaatgcagggaccgcccggcgagcgaggcctgcctggtgagaagggtgagcgtggaacagggtcctcaggccccagggggctgcctgggcctcccgggcctcagggcgagtcacggaccggcccacccggatctacaggcagtcggggaccccctggacctccaggtcggcctggcaatagcggaatcagagggccacctgggccaccaggctactgcgactcttcccagtgcgcgtcaataccatataacggacagggctaccccggctcaggctag

SEQ ID NO: 145694 - DNA, 8964 bp, Artificial Sequence
  derived and/or modified sequence
atgcggagccggctgccccccgccctggccgccctgggcgccgccctcctattgagctctatcgaagcagaggtggaccctccctccgacttaaacttcaagatcatcgatgaaaatacagttcacatgtcttgggcaaagccagtggacccaatcgttggctatcgaattactgtggaccccacaactgacgggcctacgaaggaattcacactatcagcaagtacgacagaaacactgctcagtgagttggtgccagaaacagagtatgtggtcactattacaagttacgacgaggtcgaagaaagcgtacccgtgattggccagctgacaatccagacaggatcatctactaagccagtcgaaaagaaacccggtaaaaccgaaattcagaaatgttctgtgagtgcctggactgacttagtatttcttgtcgatgggtcctggagtgtggggcgtaacaattttaaatatattttagactttatagcagctctggtctccgcgtttgatattggagaggaaaaaaccagagtgggagttgtccagtacagttccgacacccgcaccgagtttaatctgaatcaatactaccagagggacgagttactcgctgctattaaaaagattccgtacaaaggcggaaatactatgaccggagatgctattgactatctggttaagaacacgtttacggaaagtgccggagcgagagtcggatttccgaaggtggccattatcatcaccgacggcaaaagccaagatgaagttgagattcccgctagggagctgcgaaatgtcggggtggaagtattcagccttggaattaaggccgccgatgctaaagagctgaaacagatcgctagtaccccaagtctgaaccacgtgttcaatgtggccaatttcgatgcaatcgtggacatccagaacgagatcatctcacaggtctgcagtggcgtggacgagcagctgggtgaactggtgagcggggaagaagttgtggaaccaccaagtaacctaattgccatggaagtgtctagtaaatatgtgaaactgaactggaaccccagcccctcgcctgttacagggtacaaggtgatcctgacacccatgacagctggatcccggcaacatgcgttgtctgtgggaccgcaaaccacaacgctgtctgttcgggatctgtccgctgacacggaataccagattagcgtaagtgctatgaagggtatgacgagttccgaaccgatttcgatcatggaaaagactcagccgatgaaggtgcaggtggagtgtagccgcggagtggatattaaagcggatattgtgtttttagttgacggatcctattccatcggaattgccaacttcgtcaaggtacgggcctttctggaagtcctcgtaaagagctttgagataagcccaaatcgagtccagattagcctcgtgcaatattcacgggatccccacaccgaatttaccctgaagaagttcacgaaggtggaggatataattgaggcgattaataccttcccttatagaggaggctccacaaacactggaaaggcgatgacatacgtccgggaaaaaatttttgtgcccagcaaaggctccagatctaatgtccctaaagtcatgatcctgataacggacggtaagagcagtgacgccttccgggatccagcaattaagctacggaacagcgatgtagaaatcttcgcagtgggagtgaaggacgcagtaaggtccgaacttgaggctatcgcgtctcccccagccgaaactcatgtcttcaccgttgaggactttgacgcatttcagcgcatctcttttgagctcacgcaatctatttgtttaaggatcgagcaagagttggcagccattaagaaaaaagcttatgttcctcctaaagatctctccttcagtgaggtgacctcctacggattcaagacgaactggagccccgcaggcgaaaacgttttctcatatcatattacttacaaggaagccgcaggggacgacgaggtaaccgtggtggagccagctagttccaccagtgtggtgctttcgagcctgaagccagaaacactgtatctggttaacgtgacggccgagtatgaggatggtttttctatcccactcgctggggaagagacaaccgaggaagtgaaaggggctcctagaaacctgaaagtcacagatgaaactactgacagcttcaagatcacttggacccaggcacccggtagagtgctccgctaccgcatcatttatcggccagtcgctggcggggagtctcgggaagtgacaactcctcctaaccagaggcgcaggacgctggaaaacctaatccctgataccaagtacgaggtctcggtgattccagagtatttctcaggtccaggaacccccctgaccgggaatgccgctacggaggaagttcggggtaaccccagagatttgagggtctcagatcccaccacctccactatgaaactgtcatggagcggcgcaccaggcaaggtcaaacaatatctagttacttacaccccagtggccggcggagaaacacaggaggtgactgtcagaggggatacaaccaatactgtgttgcagggactgaaagagggaactcagtatgcactgtcagtgacggcactttatgctagcggcgcaggtgacgctctctttggggaggggactacactcgaggagcggggatcaccacaggacttggtaaccaaagatatcaccgacacctctattggagcctactggacttcagccccagggatggtgcgtggttatcgagtttcttggaagtctctctacgacgatgtggataccggtgagaaaaacctccccgaggatgcaatccataccatgatagaaaacttacaaccagagaccaaatacaggatctccgtctttgcgacatattctagcggcgaaggcgaacccctcactggagatgccacgacggaactgagccaggatagcaaaaccctgaaagttgatgaggagacagaaaatacgatgcgggttacctggaagcccgcaccaggtaaagtggtgaattatagagttgtatatcggccacatggacggggaaagcaaatggtggccaaggtgcctcccacggtgacgagtaccgtgctcaagagactccaacctcagaccacttacgacatcacagtgctgccgatctacaagatgggggagggcaagctccgacagggttctgggaccacagcttcccgtttcaagtcccctcgtaacctgaaaacgtctgatcccactatgtcctcctttagagtcacatgggaacctgcacccggcgaagttaaggggtataaagtgacgttccaccctacaggagacgatcggcgtctcggagagctggtggtgggtccttacgataataccgttgtgttggaggaactgcgggccggcaccacgtacaaggttaatgtcttcgggatgttcgacggaggcgagtcctctccattggtgggacaggagatgacaacactatctgacacaacagtcatgccaatactttcaagtggaatggaatgtctaactagagcagaagccgatatcgtgctcctggtggatggttcctggtccataggccgggccaacttccgcactgtccgtagttttattagtagaatcgtagaagtttttgacatcggcccaaagagagtgcagattgcattggctcaatactctggggatccccgcacagaatggcagttgaacgctcatcgtgacaagaagagtctgctccaggctgtggccaacctcccatataaaggggggaatacgctgacgggcatggcgttgaacttcatcagacagcagaactttcgaacacaagcggggatgaggccacgggcccgcaagattggggtcctgattactgatgggaagtcccaagatgacgttgaggcgcccagcaaaaagttgaaggatgaaggagttgagctttttgccatcggaattaaaaacgccgatgaagtggaattgaaaatgatagccactgatcccgatgatactcacgcctacaatgtggctgacttcgagtcactgagccgcatagtcgatgatctcaccatcaacttgtgcaattctgtgaagggcccaggcgatctggaggccccatcaaatcttgtaatctccgagcggacccatcggagctttcgggtctcctggactccgccctccgactccgtggatagatataaggtggagtactaccccgtgtcaggagggaaacgacaggaattttacgttagccggatggaaacctctacagtcttgaaagatcttaagccagaaacagagtatgtggtgaacgtgtactccgtcgtggaagacgaatatagcgagccactaaagggtacagaaaagacgctcccagtgccggtggtttcgctgaatatctatgatgtagggcccaccaccatgcacgtgcagtggcaaccagtgggcggggccacaggctacatcctgtcctacaaaccagtcaaagacactgaacctaccaggccaaaagaggttcggttgggaccgacggtcaacgacatgcaactaactgatctagtgcccaacactgagtatgctgtcaccgtgcaggccgtgctgcatgacctgacatccgaacccgttaccgttcgtgaagtgactcttcctctgccaaggccacaggatctgaaacttcgtgatgttacgcactctacaatgaacgtattctgggagccagtgcctggcaaagttcgaaagtatatcgtccgttacaaaactccagaggaggacgtgaaagaggtcgaagttgaccgtagcgagacgagcaccagcctgaaggatctgtttagccagaccctgtatacagtttctgtatctgccgttcatgatgaaggtgagtcacccccggtaaccgcacaggagaccacaagacctgtgccagctcccactaacctcaagatcacagaagtgaccagcgaagggtttaggggaacgtgggaccacggggcctccgacgtgtcactttatcgtattacttgggccccattcggctctagtgacaagatggagaccatcctgaacggcgatgaaaacaccctggtgttcgaaaacttgaatcccaataccatctatgaggtgtctattaccgccatctatcccgatgaatccgagtccgatgatttaatagggtctgagagaaccctgcctatattgactactcaggctcccaaatctggccccaggaatctacaggtctataatgcaacttctaatagtctcaccgtcaaatgggatcccgcctctgggagggtccaaaagtaccgaataacctaccagcctagcacaggggaaggtaatgagcagactaccaccataggtggacggcagaattcggtggtccttcagaagctgaaacccgacaccccatacaccatcactgtgtcgtccctgtacccagacggagagggaggacggatgactgggaggggcaaaaccaagcccttaaatacagtcagaaacctcagagtctatgatccatctacctctactctcaatgtgcgatgggaccatgctgaagggaaccctcggcagtacaaactattctacgcacccgccgccggaggtcccgaagaattagttcctattcccggaaatacaaattatgcaatcctcagaaatctgcagccagacacatcttacactgtgaccgtcgtgcctgtctacacagaaggagatggaggccgaacaagtgacaccggtcgaaccctgatgcgggggcttgccagaaatgtccaagtctacaaccctacaccgaactccctcgacgttcgctgggatccggctccggggcccgtattgcagtacagggtcgtctactcgccagtggatggcactcgccccagcgagtccattgttgtcccaggtaatacacgcatggtgcacctggaacgcctgattcccgacacgctgtacagtgttaatttggttgcgctttattcagacggggaggggaatccttctcccgcccagggtcgaactcttcctcgctccggtcctaggaacctgagagtcttcggggagactaccaattcattgagcgtagcatgggaccatgcagacgggcccgtgcagcaatatcggatcatctactcccctaccgtcggggaccctatcgatgaatacacgaccgtcccggggcggaggaataacgtgatactccaaccactgcagcccgacacgccatacaaaattacagtgatcgctgtgtatgaagacggcgacggcggacatctgaccggtaacgggcgaactgtggggcttctcccacctcaaaacatacacatatccgatgaatggtataccagatttagagtgtcatgggacccctcccctagccctgtcttggggtacaagatcgtctataagccagttggaagtaatgaacccatggaggcttttgttggggagatgacgtcatatacactgcataaccttaacccttctacaacatacgatgttaatgtgtatgcgcaatacgattctgggctatctgtgcctttgactgaccagggcaccactttgtaccttaacgttacagacttgaagacctatcagattggatgggatacattttgcgttaagtggtcaccacatagggccgctacctcataccgactgaaactttcgcccgccgacggcacaaggggccaggagattactgtacggggaagcgagacttcgcactgttttacagggttgtctcccgataccgattatggtgtcaccgtgttcgtgcagactcccaatttagagggtcctggggtgagcgtcaaggaacatacgactgtaaagcccacagaggctccaacagagccacctacaccaccaccccctcccaccatcccgcccgcacgggacgtatgtaagggggcaaaggccgacattgttttccttaccgatgcctcctggtctatcggggacgacaactttaacaaggtcgttaaatttatcttcaataccgtcggagggtttgacgagatctccccagctggaatccaggtgagcttcgtgcagtactcggacgaggtaaagtctgaatttaaactaaatacctataacgacaaagcgctggcccttggagccctccaaaatatccggtaccgagggggtaacacacggacaggtaaggccctaacattcatcaaagagaaggtgctcacgtgggagagcgggatgagaaagaatgttcctaaggtactggtcgttgtgacagatggccggagtcaggacgaagtgaagaaagcggcactagtaatccagcagtctgggttttctgtattcgtcgtcggcgtggcagacgtcgattacaacgagctcgctaatatcgcctctaaaccatccgagcgacacgtcttcatcgtggacgatttcgagagttttgaaaagattgaagacaacttgatcacctttgtgtgtgagaccgctacatcctcatgtccccttatctatctggatggttacacctcgcctgggtttaagatgttagaagcctacaacctcactgaaaagaattttgccagtgtgcagggcgtgagcttagaaagtggaagctttccaagctattctgcttataggattcagaaaaacgcgttcgttaatcagccaacagccgaccttcatcccaacgggttgccaccctcctacacaattatactattgttccgactgttgcccgaaacacccagtgacccatttgccatctggcagattaccgatagagattacaaacctcaggtcggagtgattgccgacccatctagtaagacgctttcattttttaataaggatactagaggggaagtgcagaccgttacattcgatacagaggaggtgaaaacactgttttacggatcgttccacaaaagagacgagggaaagtgcccagcgttcccaaattcttgcacatgcacacaggactccgtcgggcctcccggtccacctggacccgccggaggacccggggccaaaggtccaagaggggagaggggcatcagtggagcaatcggtcccccaggccctcgcggggatattggcccaccaggtccacagggaccccctggaccccagggacccaacgggttgtcaattcccggagagcagggcaggcaaggaatgaaaggggatgcgggggaacccggcctcccaggcaggaccgggactcccgggttgcccggtcctccagggccaatgggacccccgggcgacaggggctttacaggtaaggacggagccatgggccccagagggccacctgggcctcccggcagccccggaagccctggcgtgacaggccccagcggcaagcctggtaaaccgggtgaccacggacgtcctgggccgtctggattgaaaggagagaaaggggaccgcggggatatagcatcccaaaatatgatgcgtgcagtggccaggcaggtgtgcgaacaactgatttcggggcaaatgaatcgattcaatcagatgctaaaccagatcccaaatgattatcaatcttctagaaaccaacccggccccccaggcccaccagggccaccgggctctgcaggagcgaggggcgaacctgggccaggggggcgcccaggcttcccgggcacccccggcatgcagggcccacctggagagagggggctgcccggggaaaagggagagcgggggacgggctccagcggacctaggggcctgccaggacctccaggaccgcagggagaatcaagaactggccctccgggatccaccgggtccagagggccccccggccctcccggccgaccgggcaattctggcatccgcgggcctccaggcccacctgggtattgtgattctagtcagtgtgcctcgattccctacaacggacagggataccccggctctggctag

SEQ ID NO: 145695 - DNA, 11723 bp, Artificial Sequence
  derived and/or modified sequence
acttggctaaggcgaaccgccccagacgcgtccgcgcgccggcagctgcaggctcaggccatctccagtcttcctgccgcgcccgcctctcctcctgggattctcctcctcctcctggacttccccgcagctgcccacgcctcggcggccgccaggtgctcctggagtgcagcgcctatcgccggggcgtgtgggggccacaccgagcaccagcttctccgacgccgggaagccgctgtcgccgccgctacctctccctgttgccgccgcctcagatctcttcatgccgctgtaagctcggaggccaaggatgcggagtaggcttcccccagcgcttgccgccctgggcgcggccctgctcctgtcttccattgaggcagaagttgacccaccttcagacttgaattttaaaattatagatgaaaatactgttcatatgtcatgggcaaaaccagttgatccaattgtgggttacagaataacggtggaccctacaacggatgggcctactaaagaatttaccctttcagctagtaccactgaaactttattgtcagaacttgtacctgaaacagagtatgtggtgacaataacttcatatgatgaagtagaagaaagtgtaccagttataggacaactaacaattcaaacaggtagttcgacaaagccagtggagaagaaacctggaaaaaccgagatacaaaaatgctctgtcagtgcctggactgatttggttttcctcgtggatggctcttggagtgtgggaagaaataatttcaagtacattttagacttcattgctgctcttgtgtctgcttttgacattggggaagagaagacaagagttggagttgttcaatacagctctgataccaggactgaatttaacttaaatcagtactaccaaagggatgaacttcttgctgcaataaaaaaaattccatataaaggtggcaacacaatgacaggggatgccattgattatttagttaaaaatactttcacggaatctgctggggcaagagttggctttcctaaagtggcaattattattacggatggaaaatcccaggatgaagtggaaattccagcaagagagcttcgtaatgttggagttgaagttttctccttgggcattaaagctgcagatgcaaaagaactcaaacaaattgcctccacaccttcactgaaccatgttttcaatgtggccaactttgatgcaattgtggatattcagaatgagatcatctcccaggtgtgctcaggtgttgatgaacaacttggtgaattggttagtggagaagaagttgttgagcctccttcaaatttgattgccatggaagtctcttcaaaatatgttaagctaaattggaatccatctcctagtccagtgactggctacaaagtcatcctcacaccaatgactgcaggaagccgacagcacgctctgagtgtggggcctcagacaaccacgctcagtgttcgcgacctctcagcagacacagaataccagatcagtgtttccgccatgaagggaatgacatccagtgaacccatttcaataatggagaagactcagccaatgaaagttcaagtggaatgctcacgtggtgtggatataaaagccgatattgtgtttttggttgatggctcctatagcattgggattgcaaactttgttaaagttagagcctttttggaagttcttgtaaaaagttttgaaatttcaccaaatagggtccagattagtcttgtgcaatacagccgggatcctcatactgagttcactttgaaaaaattcaccaaagttgaagatataattgaagcaataaacaccttcccttacagaggaggatctacaaatactggcaaagcaatgacttatgtcagagagaaaatatttgtgcctagcaagggatcaagaagcaatgtgccaaaggtcatgattcttatcacggatgggaaatcatcagatgctttcagagatcctgcgataaaactgaggaattcagatgttgaaatctttgcagttggtgtgaaggatgccgttcgctcagaattggaagctattgcctctcctcctgcagagacccatgtgttcacagtggaagattttgatgcttttcagaggatatcttttgaactcacacagtctatctgccttagaattgagcaagaattggcagctataaagaagaaagcttacgtccctccaaaggatcttagtttttcagaagtgacttcttatggtttcaaaaccaactggtctccagctggagaaaatgttttttcatatcacatcacctacaaggaagcggctggggatgatgaggtcactgtggtggagccagcatcgagcaccagtgttgttctcagcagcctgaagccagagaccttgtatttggtcaatgtgactgcggagtatgaggatggcttcagcattcccttagctggagaggagaccaccgaagaagtaaaaggagcacctcgaaacctaaaggtgacagatgagactacagatagtttcaaaattacttggactcaagctccagggagagttttaagatatcgaattatatatagaccagttgctggtggagagagcagagaagttaccaccccacccaatcagaggaggagaacactggagaacttgattccagacacgaaatatgaagtatctgtaattcctgaatatttctcaggacctggtactccattaactggaaatgcagccactgaagaagttagagggaatccaagagacttaagagtttctgaccctacgacgtctactatgaaattatcttggagtggggcaccaggaaaagtgaaacagtatctcgtcacatataccccagtggcagggggtgaaactcaagaggtcactgtgaggggagatacaaccaatacggtgctgcagggattgaaggaagggacacaatacgccttatctgtgacagccttgtatgcgtctggggctggagacgccctctttggtgaaggaacaacacttgaagaacgtggttctcctcaagatttagttactaaagacatcactgacacatcaattggggcttattggacatctgctccaggaatggttcgcggttacagggtctcatggaaatcactttatgatgatgttgacactggagagaaaaatctgcctgaagatgcaattcatacgatgatagaaaatctgcagccagagaccaaatacagaatttcagtatttgccacttacagcagtggagaaggagaacctttgactggagatgccacaactgaattatctcaagattccaaaaccctgaaagtagatgaagaaacagaaaacacaatgagagttacatggaaaccagcaccagggaaagtcgtcaactaccgtgttgtctatcgccctcatgggagagggaagcaaatggttgctaaggtgccccccacagtcacttcgacagtgttaaagcgacttcagccacagaccacatatgacatcacagttcttcctatttacaagatgggagaaggaaagcttaggcaaggatcaggaacaacagcttctcggtttaagtctcctagaaacctcaaaacatctgacccaaccatgtcaagcttccgagtgacttgggagcctgcccctggggaagtgaagggttataaagtcacattccaccctacgggggatgacagaagactgggggagttagtggttggaccctatgacaacacagttgttttggaggaacttagggctggtaccacctataaagtaaatgtttttggaatgtttgatggaggagaaagctcaccacttgttggacaagaaatgacaaccctttccgacacaactgttatgccaattttatcttctgggatggagtgtctcaccagagctgaggcagacattgtgttgctggtggatggatcatggagcatcggccgggcaaattttagaaccgtgaggagtttcatttctcgtattgtggaagtctttgacattggccccaaaagagtacaaattgctcttgctcagtatagtggggatcccagaacagagtggcagttaaatgcacacagagacaagaagagcttgttgcaagctgtggcaaacttgccgtacaaaggaggcaatactctcacaggcatggctttgaatttcattcgccaacagaacttcaggacccaagctggcatgagacctcgagctcgaaaaattggtgtgctcattactgatggaaaatcacaagacgatgttgaagcaccttcaaagaaactcaaggatgagggagtggagctgtttgctattggtattaaaaatgctgatgaagtcgaattaaagatgattgcaactgatcctgatgatacccatgcatacaatgtggcagattttgagtcactctccaggatagtggatgatctcaccattaatttgtgtaacagtgtcaaaggtccaggtgatttggaagcaccttctaacttagttatttctgagcgaacccatcgttcttttagagtgagctggacaccaccttctgacagtgtggatcgatataaggtggaatactatccagtttctggagggaaacgtcaagaattttatgtgagtcgaatggaaactagcacagtgctgaaagatctgaaacctgaaactgaatatgttgtcaatgtgtattctgtggtagaagatgaatatagtgagcctctgaaggggacagaaaaaaccttgccagtgcctgtagtcagcctgaatatttatgatgttggccctaccaccatgcatgtgcagtggcagcctgtgggaggagctactggctacatcttgtcatacaaacctgttaaggacacagagccaacaagacccaaagaggtgcgtttggggccaacagtgaatgacatgcagctgactgaccttgttcccaacacggagtatgcagtcacagtccaggctgtcctgcacgacctcactagtgaacctgtcactgttcgggaagtcaccttgcctttacccagacctcaggatctgaaactcagagatgtgactcacagcactatgaatgtcttttgggaacctgtgcctggaaaagtgcgtaaatatattgttcgatacaaaacaccagaagaggatgtcaaagaggtagaggtggacagatcagagaccagcacttccctcaaagacctcttctcacagaccttgtacacagtcagcgtttctgcagtacatgacgagggggagtctcctccagtgactgctcaagaaactacccgacccgtgccagccccaacaaacttaaagattactgaagtaacatcagagggtttcagagggacttgggatcatggagcttcagatgtgtctctctacagaataacttgggcaccttttggaagctcagataagatggagaccatcttaaatggagatgaaaacactttggtgttcgaaaacctgaaccccaacaccatctatgaagtttccattactgccatctatcctgatgagtcagaaagtgatgacctgattggcagtgagcgcacactgcctatcttaacaacacaagctcccaaaagtggcccacgaaaccttcaagtgtacaatgcaacatctaacagcctgactgttaagtgggatcctgctagtggtcgtgtgcagaaatataggatcacttatcagccttccacaggggaaggcaatgagcaaacgaccacaataggaggacggcagaacagtgtggtcctgcagaaactgaagccagacactccttacactatcaccgtatcctctctgtatcctgatggtgaaggaggtcggatgacgggaagaggcaagaccaaacctctaaacactgtaaggaacctgagagtgtatgacccttctaccagcaccttgaatgtccgctgggaccatgcagagggaaatcctcgtcagtacaagctcttctatgcaccagcagcaggtggtccagaggaactggtaccaatccccgggaataccaattatgccattcttaggaatctgcagccagatacctcatacactgtgactgtagttcccgtttatactgaaggtgatgggggacgcacatcagatactggaaggacattgatgagaggactggcaagaaatgtccaagtatacaatcctacacctaacagcctcgatgttcgctgggaccctgctccaggacctgtgctgcaatatcgcgttgtgtattctcctgtggatggcacaagaccctcagaatctatagtagtgccaggaaacacgcgcatggtgcatctggagcggctgattccggacacactctattccgtgaaccttgtggctctgtactcggatggagagggaaatcccagccctgcccagggccgaacgctaccacgcagtggaccaaggaacctgagagtctttggtgaaacaaccaatagcctctcggtagcctgggatcatgctgatgggccagttcagcagtacaggatcatctattctcccactgttggtgatccaattgatgaatataccacagtcccaggcagaagaaacaatgtaatactgcagcccctgcaacctgacactccatataaaattactgttattgctgtttatgaagatggagatggtggccatctaacaggaaatggaagaactgtgggactccttcctcctcagaacatacacatctctgacgaatggtatacaagattcagggtgtcctgggatccttcaccttctccagttcttggatataaaatagtatataagccagtgggttccaatgagcccatggaagcctttgttggagaaatgacatcatataccttacacaatctcaatcccagcaccacctacgatgtgaatgtttatgctcaatatgattctggactcagtgtccccttgacagatcaaggcactacattatatttaaatgtaacagatctgaaaacttaccagattgggtgggatacattctgtgtcaaatggtcacctcaccgggcagccacctcctacaggctaaaactaagccctgcagatggaacaaggggacaagaaattacagtgcgtggatcagaaaccagtcactgcttcactggcctttcaccagacactgattatggtgtcactgtttttgtgcagacaccaaatctcgagggaccaggagtctctgttaaagaacataccactgtgaaaccaacagaagcccctacagagccacccacacctcctccccctcccaccattccaccagcccgggatgtatgcaaaggggccaaggcagatattgtgttcttgactgatgcctcctggagcattggggacgataattttaacaaagttgtaaaattcatcttcaatactgtgggaggctttgatgaaatcagtcctgctgggattcaggtttcatttgtgcaatacagcgatgaggtcaagtctgagttcaagctgaacacgtacaatgacaaggccctagcccttggggccctccagaatattaggtacagaggaggaaacacaagaacaggcaaggccctcacgtttatcaaggagaaagtcttgacttgggagagcggcatgaggaagaatgtccctaaggtgttggttgtggtcacggacggtcggtcccaggatgaggtcaagaaggcggctttggtcatccagcagtcagggttcagtgtctttgtagttggtgtggctgatgtcgactacaatgagcttgccaacattgccagcaaaccaagtgaacggcacgtgttcattgtggacgactttgaatcttttgagaagatcgaagacaatcttattacatttgtttgtgaaactgccacttcaagttgtcctctcatttatttggatggctacacctcaccaggttttaaaatgcttgaagcatacaacctgacagaaaagaattttgcttctgtacaaggagtatctttggagtcagggtctttccccagctactcagcatacaggattcagaagaatgcgtttgtgaatcagcctacagcagacctacacccaaatggactccctccttcatacacgattatattattattcagacttctcccagaaactcccagtgacccttttgcaatttggcaaatcacagacagagactacaaaccacaagttggagtgattgcagatccttctagcaagacgttatcattctttaacaaggatacaagaggcgaggtgcaaactgttacatttgacacagaagaagtaaagacattattttatggaagttttcacaaggttcatattgtagtgacctcaaaaagtgttaagatttacattgactgctatgaaattatagaaaaagacatcaaggaagctggaaatataacaactgatggttatgaaattcttggaaaactccttaaaggggaaaggaaatcagccgcattccaaatccagagttttgacattgtctgcagtccagtgtggaccagtagagacagatgctgtgatattccctctaggagagatgagggaaaatgccctgcttttccaaattcttgcacatgtacacaggacagcgttggacctccaggacctccaggccctgcaggaggacctggtgctaaaggtcccagaggtgaaagaggtatcagtggggcaattgggccccctggtcctcgtggagacataggtcctccaggcccccagggtcctccaggccctcagggacccaatggactctctattccgggagagcaaggtcgccaagggatgaaaggtgatgctggagagccaggacttccaggccgaacaggaaccccaggattacctggcccaccaggaccaatgggacctccaggagacagaggcttcactggaaaagacggtgcaatgggacccaggggcccaccagggccgccgggaagcccaggctccccaggagtcacaggaccaagtgggaagccaggaaaacctggagatcatggcagaccaggtccatctgggttgaaaggagaaaaaggtgataggggagacattgcttcccagaacatgatgcgagcagttgcaagacaagtctgtgaacaattgataagtggtcagatgaacagattcaatcagatgctgaatcagattccaaatgattaccagtccagtcgcaaccagccaggcccgccgggtccaccgggacctcctggtagcgcaggagccagaggagaacctgggcctggggggcggccaggcttcccgggcacaccagggatgcagggaccccctggggaacgaggtttgccaggagagaaaggtgaaaggggtactggatcttcaggacctcgggggctgcctggccccccaggtccacaaggagaatccagaacaggtccaccagggtccacaggttcaagaggtccccctggcccccctggccgtcctggaaactcaggtatccgaggacccccaggtcctcctggatactgtgattcttctcagtgtgccagcatcccatacaacgggcaaggctatccaggttccggctaacacattttctaagtcgccagtgctgcttacagtttgaatacatgaaaatcctgtttctgagatgtttgcgcacgtgcttattaggaaatgagtctgtatggaaatctcaccacagataatggttaacgaaccgggtcgacatcacaaaggagggtggagactctttttactaacttgaatgagacaaaagcagtggtgtcagtttataatcctgatgcatttcagtaataatgtagaaaaacattattttaaaaaagttccaacacacagccatgaggagcctcagttttgaaagaggtgcataataaaactactaaccagaggagtctatgccattttaagaaaaacaattaacctggttaaagagaaatgtcttatgtaaataataaactaattgtggcttgtaaatgatttgtatgtgatcctgtcgactaaaatcacttaacaattctacaataagcttctgcatcaaagcctgccgcttgctctatgccggaataacaccaaatggaatctcctcatctcttgcttgttagcgatgtgtctgattcagggcatctgtctttttgttacttttttgtccgtgtcctctcatttgggttttgtaactgcaattttcaaaccaaagtttaaaatcaccttttcttcctgttttgctgtagtcactggtgttcctcacccaccagctgtaactcagtttgtgtgaggtacagccacagaagatgtcatgtactgtatattacctggtgatagttgcttttcaccccccgagttcagtttctaggagccaatgaaacttcccctcacctcctcatctttccaagttgttctttgaattgaggagtttgaaggcataaacagttacttggggatttgcgaaaatcctacttagttactgcgtttacagttctttggcccagtctctgacccttcccaagtatttgtgcaatgattgtgtttactgctggatttttgaaggtttttttttttaagaaagtgccatttcattatttgattatcaccaaattatctggaaataattgggacattgtaacttatctatttatagttatgagattaagactggagtgccatcaccgcgggtgatgatttagcttttgctgtgtgtgtgtgtgtgtgccttccaaatcatgccataattgtaatgttgaatcggacagagccttacgtgcccgagggcggggcctacctgcctgagcgcgagcccttcatcgtgccggtggagcccgagcggacagcggaatacgaggactacggcgcagacgagcctgcagaggagcctcctgagccccaccggcgctggcggcgcgccctgccccacggacccgggcagtgaaccagagatcacgcgccgcgccgcgaggcttgggggaggtgttgaaattctcatttacaggtcagatagagcagtgtacgtcttttctgaggtgtttcttccagcgttgctcatccaggagtaccctttctgattgtagagaaccttgtttctgcaggaagcctagctccaagcacgcagtctgtagacatttttgcctttgcccttgaaatgcttgcaaaatactttgttaacaaaagctgcaaagagagaacatgccgtgtgcctttagttagcacagcgggcagcctcagtgaaactcttaggttaagcagttaagtcctggaacccagagctgctgtgtatttcgagcgggcagtttatcttttgctatacttattttcaattcaattacaccacgattcaaataattcccctcctaaaaccaaaaaggagggaaacgtcaactccattgcaattacttatcttcctcttctatctctgttatacgccggggcatagaatgctcgtatacatctctttaacaaccacaaaccttaagccatgtagatgaagttagtgcatcaacgggatacagttccatattgccttaaacctccttgttttagacacactaacatttataccaaattgcagattattctgcagagagggaattgcatgtttgtgttgtatatttagtatgaacttttttcagaatataatatttcttagttatcaaaagtagttggaaaacatttgcaagactatgaacatagaattgctgcttttatattttaactgcagattgtgaatttcactgccttatattatttatttctgaaacaaaagaggcatttttcaataaaactactgaaaatttga

SEQ ID NO: 145696 - DNA, 11351 bp, Artificial Sequence
  derived and/or modified sequence
gcggccgccaggtgctcctggagtgcagcgcctatcgccggggcgtgtgggggccacaccgagcaccagcttctccgacgccgggaagccgctgtcgccgccgctacctctccctgttgccgccgcctcagatctcttcatgccgctgtaagctcggaggccaaggatgcggagtaggcttcccccagcgcttgccgccctgggcgcggccctgctcctgtcttccattgaggcagaagttgacccaccttcagacttgaattttaaaattatagatgaaaatactgttcatatgtcatgggcaaaaccagttgatccaattgtgggttacagaataacggtggaccctacaacggatgggcctactaaagaatttaccctttcagctagtaccactgaaactttattgtcagaacttgtacctgaaacagagtatgtggtgacaataacttcatatgatgaagtagaagaaagtgtaccagttataggacaactaacaattcaaacaggtagttcgacaaagccagtggagaagaaacctggaaaaaccgagatacaaaaatgctctgtcagtgcctggactgatttggttttcctcgtggatggctcttggagtgtgggaagaaataatttcaagtacattttagacttcattgctgctcttgtgtctgcttttgacattggggaagagaagacaagagttggagttgttcaatacagctctgataccaggactgaatttaacttaaatcagtactaccaaagggatgaacttcttgctgcaataaaaaaaattccatataaaggtggcaacacaatgacaggggatgccattgattatttagttaaaaatactttcacggaatctgctggggcaagagttggctttcctaaagtggcaattattattacggatggaaaatcccaggatgaagtggaaattccagcaagagagcttcgtaatgttggagttgaagttttctccttgggcattaaagctgcagatgcaaaagaactcaaacaaattgcctccacaccttcactgaaccatgttttcaatgtggccaactttgatgcaattgtggatattcagaatgagatcatctcccaggtgtgctcaggtgttgatgaacaacttggtgaattggttagtggagaagaagttgttgagcctccttcaaatttgattgccatggaagtctcttcaaaatatgttaagctaaattggaatccatctcctagtccagtgactggctacaaagtcatcctcacaccaatgactgcaggaagccgacagcacgctctgagtgtggggcctcagacaaccacgctcagtgttcgcgacctctcagcagacacagaataccagatcagtgtttccgccatgaagggaatgacatccagtgaacccatttcaataatggagaagactcagccaatgaaagttcaagtggaatgctcacgtggtgtggatataaaagccgatattgtgtttttggttgatggctcctatagcattgggattgcaaactttgttaaagttagagcctttttggaagttcttgtaaaaagttttgaaatttcaccaaatagggtccagattagtcttgtgcaatacagccgggatcctcatactgagttcactttgaaaaaattcaccaaagttgaagatataattgaagcaataaacaccttcccttacagaggaggatctacaaatactggcaaagcaatgacttatgtcagagagaaaatatttgtgcctagcaagggatcaagaagcaatgtgccaaaggtcatgattcttatcacggatgggaaatcatcagatgctttcagagatcctgcgataaaactgaggaattcagatgttgaaatctttgcagttggtgtgaaggatgccgttcgctcagaattggaagctattgcctctcctcctgcagagacccatgtgttcacagtggaagattttgatgcttttcagaggatatcttttgaactcacacagtctatctgccttagaattgagcaagaattggcagctataaagaagaaagcttacgtccctccaaaggatcttagtttttcagaagtgacttcttatggtttcaaaaccaactggtctccagctggagaaaatgttttttcatatcacatcacctacaaggaagcggctggggatgatgaggtcactgtggtggagccagcatcgagcaccagtgttgttctcagcagcctgaagccagagaccttgtatttggtcaatgtgactgcggagtatgaggatggcttcagcattcccttagctggagaggagaccaccgaagaagtaaaaggagcacctcgaaacctaaaggtgacagatgagactacagatagtttcaaaattacttggactcaagctccagggagagttttaagatatcgaattatatatagaccagttgctggtggagagagcagagaagttaccaccccacccaatcagaggaggagaacactggagaacttgattccagacacgaaatatgaagtatctgtaattcctgaatatttctcaggacctggtactccattaactggaaatgcagccactgaagaagttagagggaatccaagagacttaagagtttctgaccctacgacgtctactatgaaattatcttggagtggggcaccaggaaaagtgaaacagtatctcgtcacatataccccagtggcagggggtgaaactcaagaggtcactgtgaggggagatacaaccaatacggtgctgcagggattgaaggaagggacacaatacgccttatctgtgacagccttgtatgcgtctggggctggagacgccctctttggtgaaggaacaacacttgaagaacgtggttctcctcaagatttagttactaaagacatcactgacacatcaattggggcttattggacatctgctccaggaatggttcgcggttacagggtctcatggaaatcactttatgatgatgttgacactggagagaaaaatctgcctgaagatgcaattcatacgatgatagaaaatctgcagccagagaccaaatacagaatttcagtatttgccacttacagcagtggagaaggagaacctttgactggagatgccacaactgaattatctcaagattccaaaaccctgaaagtagatgaagaaacagaaaacacaatgagagttacatggaaaccagcaccagggaaagtcgtcaactaccgtgttgtctatcgccctcatgggagagggaagcaaatggttgctaaggtgccccccacagtcacttcgacagtgttaaagcgacttcagccacagaccacatatgacatcacagttcttcctatttacaagatgggagaaggaaagcttaggcaaggatcaggaacaacagcttctcggtttaagtctcctagaaacctcaaaacatctgacccaaccatgtcaagcttccgagtgacttgggagcctgcccctggggaagtgaagggttataaagtcacattccaccctacgggggatgacagaagactgggggagttagtggttggaccctatgacaacacagttgttttggaggaacttagggctggtaccacctataaagtaaatgtttttggaatgtttgatggaggagaaagctcaccacttgttggacaagaaatgacaaccctttccgacacaactgttatgccaattttatcttctgggatggagtgtctcaccagagctgaggcagacattgtgttgctggtggatggatcatggagcatcggccgggcaaattttagaaccgtgaggagtttcatttctcgtattgtggaagtctttgacattggccccaaaagagtacaaattgctcttgctcagtatagtggggatcccagaacagagtggcagttaaatgcacacagagacaagaagagcttgttgcaagctgtggcaaacttgccgtacaaaggaggcaatactctcacaggcatggctttgaatttcattcgccaacagaacttcaggacccaagctggcatgagacctcgagctcgaaaaattggtgtgctcattactgatggaaaatcacaagacgatgttgaagcaccttcaaagaaactcaaggatgagggagtggagctgtttgctattggtattaaaaatgctgatgaagtcgaattaaagatgattgcaactgatcctgatgatacccatgcatacaatgtggcagattttgagtcactctccaggatagtggatgatctcaccattaatttgtgtaacagtgtcaaaggtccaggtgatttggaagcaccttctaacttagttatttctgagcgaacccatcgttcttttagagtgagctggacaccaccttctgacagtgtggatcgatataaggtggaatactatccagtttctggagggaaacgtcaagaattttatgtgagtcgaatggaaactagcacagtgctgaaagatctgaaacctgaaactgaatatgttgtcaatgtgtattctgtggtagaagatgaatatagtgagcctctgaaggggacagaaaaaaccttgccagtgcctgtagtcagcctgaatatttatgatgttggccctaccaccatgcatgtgcagtggcagcctgtgggaggagctactggctacatcttgtcatacaaacctgttaaggacacagagccaacaagacccaaagaggtgcgtttggggccaacagtgaatgacatgcagctgactgaccttgttcccaacacggagtatgcagtcacagtccaggctgtcctgcacgacctcactagtgaacctgtcactgttcgggaagtcaccttgcctttacccagacctcaggatctgaaactcagagatgtgactcacagcactatgaatgtcttttgggaacctgtgcctggaaaagtgcgtaaatatattgttcgatacaaaacaccagaagaggatgtcaaagaggtagaggtggacagatcagagaccagcacttccctcaaagacctcttctcacagaccttgtacacagtcagcgtttctgcagtacatgacgagggggagtctcctccagtgactgctcaagaaactacccgacccgtgccagccccaacaaacttaaagattactgaagtaacatcagagggtttcagagggacttgggatcatggagcttcagatgtgtctctctacagaataacttgggcaccttttggaagctcagataagatggagaccatcttaaatggagatgaaaacactttggtgttcgaaaacctgaaccccaacaccatctatgaagtttccattactgccatctatcctgatgagtcagaaagtgatgacctgattggcagtgagcgcacactgcctatcttaacaacacaagctcccaaaagtggcccacgaaaccttcaagtgtacaatgcaacatctaacagcctgactgttaagtgggatcctgctagtggtcgtgtgcagaaatataggatcacttatcagccttccacaggggaaggcaatgagcaaacgaccacaataggaggacggcagaacagtgtggtcctgcagaaactgaagccagacactccttacactatcaccgtatcctctctgtatcctgatggtgaaggaggtcggatgacgggaagaggcaagaccaaacctctaaacactgtaaggaacctgagagtgtatgacccttctaccagcaccttgaatgtccgctgggaccatgcagagggaaatcctcgtcagtacaagctcttctatgcaccagcagcaggtggtccagaggaactggtaccaatccccgggaataccaattatgccattcttaggaatctgcagccagatacctcatacactgtgactgtagttcccgtttatactgaaggtgatgggggacgcacatcagatactggaaggacattgatgagaggactggcaagaaatgtccaagtatacaatcctacacctaacagcctcgatgttcgctgggaccctgctccaggacctgtgctgcaatatcgcgttgtgtattctcctgtggatggcacaagaccctcagaatctatagtagtgccaggaaacacgcgcatggtgcatctggagcggctgattccggacacactctattccgtgaaccttgtggctctgtactcggatggagagggaaatcccagccctgcccagggccgaacgctaccacgcagtggaccaaggaacctgagagtctttggtgaaacaaccaatagcctctcggtagcctgggatcatgctgatgggccagttcagcagtacaggatcatctattctcccactgttggtgatccaattgatgaatataccacagtcccaggcagaagaaacaatgtaatactgcagcccctgcaacctgacactccatataaaattactgttattgctgtttatgaagatggagatggtggccatctaacaggaaatggaagaactgtgggactccttcctcctcagaacatacacatctctgacgaatggtatacaagattcagggtgtcctgggatccttcaccttctccagttcttggatataaaatagtatataagccagtgggttccaatgagcccatggaagcctttgttggagaaatgacatcatataccttacacaatctcaatcccagcaccacctacgatgtgaatgtttatgctcaatatgattctggactcagtgtccccttgacagatcaaggcactacattatatttaaatgtaacagatctgaaaacttaccagattgggtgggatacattctgtgtcaaatggtcacctcaccgggcagccacctcctacaggctaaaactaagccctgcagatggaacaaggggacaagaaattacagtgcgtggatcagaaaccagtcactgcttcactggcctttcaccagacactgattatggtgtcactgtttttgtgcagacaccaaatctcgagggaccaggagtctctgttaaagaacataccactgtgaaaccaacagaagcccctacagagccacccacacctcctccccctcccaccattccaccagcccgggatgtatgcaaaggggccaaggcagatattgtgttcttgactgatgcctcctggagcattggggacgataattttaacaaagttgtaaaattcatcttcaatactgtgggaggctttgatgaaatcagtcctgctgggattcaggtttcatttgtgcaatacagcgatgaggtcaagtctgagttcaagctgaacacgtacaatgacaaggccctagcccttggggccctccagaatattaggtacagaggaggaaacacaagaacaggcaaggccctcacgtttatcaaggagaaagtcttgacttgggagagcggcatgaggaagaatgtccctaaggtgttggttgtggtcacggacggtcggtcccaggatgaggtcaagaaggcggctttggtcatccagcagtcagggttcagtgtctttgtagttggtgtggctgatgtcgactacaatgagcttgccaacattgccagcaaaccaagtgaacggcacgtgttcattgtggacgactttgaatcttttgagaagatcgaagacaatcttattacatttgtttgtgaaactgccacttcaagttgtcctctcatttatttggatggctacacctcaccaggttttaaaatgcttgaagcatacaacctgacagaaaagaattttgcttctgtacaaggagtatctttggagtcagggtctttccccagctactcagcatacaggattcagaagaatgcgtttgtgaatcagcctacagcagacctacacccaaatggactccctccttcatacacgattatattattattcagacttctcccagaaactcccagtgacccttttgcaatttggcaaatcacagacagagactacaaaccacaagttggagtgattgcagatccttctagcaagacgttatcattctttaacaaggatacaagaggcgaggtgcaaactgttacatttgacacagaagaagtaaagacattattttatggaagttttcacaagagagatgagggaaaatgccctgcttttccaaattcttgcacatgtacacaggacagcgttggacctccaggacctccaggccctgcaggaggacctggtgctaaaggtcccagaggtgaaagaggtatcagtggggcaattgggccccctggtcctcgtggagacataggtcctccaggcccccagggtcctccaggccctcagggacccaatggactctctattccgggagagcaaggtcgccaagggatgaaaggtgatgctggagagccaggacttccaggccgaacaggaaccccaggattacctggcccaccaggaccaatgggacctccaggagacagaggcttcactggaaaagacggtgcaatgggacccaggggcccaccagggccgccgggaagcccaggctccccaggagtcacaggaccaagtgggaagccaggaaaacctggagatcatggcagaccaggtccatctgggttgaaaggagaaaaaggtgataggggagacattgcttcccagaacatgatgcgagcagttgcaagacaagtctgtgaacaattgataagtggtcagatgaacagattcaatcagatgctgaatcagattccaaatgattaccagtccagtcgcaaccagccaggcccgccgggtccaccgggacctcctggtagcgcaggagccagaggagaacctgggcctggggggcggccaggcttcccgggcacaccagggatgcagggaccccctggggaacgaggtttgccaggagagaaaggtgaaaggggtactggatcttcaggacctcgggggctgcctggccccccaggtccacaaggagaatccagaacaggtccaccagggtccacaggttcaagaggtccccctggcccccctggccgtcctggaaactcaggtatccgaggacccccaggtcctcctggatactgtgattcttctcagtgtgccagcatcccatacaacgggcaaggctatccaggttccggctaacacattttctaagtcgccagtgctgcttacagtttgaatacatgaaaatcctgtttctgagatgtttgcgcacgtgcttattaggaaatgagtctgtatggaaatctcaccacagataatggttaacgaaccgggtcgacatcacaaaggagggtggagactctttttactaacttgaatgagacaaaagcagtggtgtcagtttataatcctgatgcatttcagtaataatgtagaaaaacattattttaaaaaagttccaacacacagccatgaggagcctcagttttgaaagaggtgcataataaaactactaaccagaggagtctatgccattttaagaaaaacaattaacctggttaaagagaaatgtcttatgtaaataataaactaattgtggcttgtaaatgatttgtatgtgatcctgtcgactaaaatcacttaacaattctacaataagcttctgcatcaaagcctgccgcttgctctatgccggaataacaccaaatggaatctcctcatctcttgcttgttagcgatgtgtctgattcagggcatctgtctttttgttacttttttgtccgtgtcctctcatttgggttttgtaactgcaattttcaaaccaaagtttaaaatcaccttttcttcctgttttgctgtagtcactggtgttcctcacccaccagctgtaactcagtttgtgtgaggtacagccacagaagatgtcatgtactgtatattacctggtgatagttgcttttcaccccccgagttcagtttctaggagccaatgaaacttcccctcacctcctcatctttccaagttgttctttgaattgaggagtttgaaggcataaacagttacttggggatttgcgaaaatcctacttagttactgcgtttacagttctttggcccagtctctgacccttcccaagtatttgtgcaatgattgtgtttactgctggatttttgaaggtttttttttttaagaaagtgccatttcattatttgattatcaccaaattatctggaaataattgggacattgtaacttatctatttatagttatgagattaagactggagtgccatcaccgcgggtgatgatttagcttttgctgtgtgtgtgtgtgtgtgccttccaaatcatgccataattgtaatgttgaatcggacagagccttacgtgcccgagggcggggcctacctgcctgagcgcgagcccttcatcgtgccggtggagcccgagcggacagcggaatacgaggactacggcgcagacgagcctgcagaggagcctcctgagccccaccggcgctggcggcgcgccctgccccacggacccgggcagtgaaccagagatcacgcgccgcgccgcgaggcttgggggaggtgttgaaattctcatttacaggtcagatagagcagtgtacgtcttttctgaggtgtttcttccagcgttgctcatccaggagtaccctttctgattgtagagaaccttgtttctgcaggaagcctagctccaagcacgcagtctgtagacatttttgcctttgcccttgaaatgcttgcaaaatactttgttaacaaaagctgcaaagagagaacatgccgtgtgcctttagttagcacagcgggcagcctcagtgaaactcttaggttaagcagttaagtcctggaacccagagctgctgtgtatttcgagcgggcagtttatcttttgctatacttattttcaattcaattacaccacgattcaaataattcccctcctaaaaccaaaaaggagggaaacgtcaactccattgcaattacttatcttcctcttctatctctgttatacgccggggcatagaatgctcgtatacatctctttaacaaccacaaaccttaagccatgtagatgaagttagtgcatcaacgggatacagttccatattgccttaaacctccttgttttagacacactaacatttataccaaattgcagattattctgcagagagggaattgcatgtttgtgttgtatatttagtatgaacttttttcagaatataatatttcttagttatcaaaagtagttggaaaacatttgcaagactatgaacatagaattgctgcttttatattttaactgcagattgtgaatttcactgccttatattatttatttctgaaacaaaagaggcatttttcaataaaactactgaaaatttga

SEQ ID NO: 145697 - DNA, 9192 bp, Artificial Sequence
  derived and/or modified sequence
atgaggtccagactgcctcccgctctggccgctctcggtgcagcactgttactttcttccattgaggctgaggtcgatcccccttccgatctaaacttcaaaatcattgatgaaaacactgtccacatgagttgggcaaaacccgtggatccaatcgttgggtacaggatcacggttgatcccacaacagatgggcctactaaggagttcacccttagtgcgagtacaactgagactctgctttccgagttagtgcccgagactgagtacgtcgtcaccattacctcttacgacgaagtggaagagagtgtgcccgtgattgggcaacttactattcagacaggatccagcacaaagcccgtagagaagaagccaggcaagactgagatccagaaatgctcggtgtcagcttggaccgatctggtatttctcgtggatgggagctggtcagtgggcaggaataactttaagtacattctcgacttcattgctgccctcgtgtctgctttcgacattggcgaggaaaaaacccgggtgggtgttgtacagtactcctcggataccaggactgagttcaacctcaaccagtattatcaacgagatgagctgctggctgctatcaagaagattccgtacaaaggaggaaatacaatgacaggggacgccattgattatttggtgaagaatacgtttaccgaaagcgccggagccagggtgggatttcccaaggtcgccatcataatcacggatggtaagtctcaggacgaggtggagatcccagcacgggagctgcgcaacgtgggtgtggaagtgttttccctcggcattaaagctgccgacgccaaggaactcaaacagatcgccagcacacccagtctgaaccacgtgttcaacgttgccaacttcgacgcaatcgttgacattcagaacgagatcatcagtcaggtgtgcagcggtgtggacgagcagcttggcgagctggtgtcaggcgaagaggtggtagaaccgccatcaaaccttattgcgatggaagtcagttccaagtacgtgaagctgaattggaacccctcccccagtcccgttactgggtataaagtgatcctaaccccgatgaccgcgggatcgagacaacacgctctgagtgtgggccctcagaccactactcttagcgtgagagacctgtctgccgacacggaataccaaatcagtgtgtctgccatgaaagggatgactagctcggagcctatttctataatggaaaagactcaacccatgaaagtccaggtcgagtgtagcaggggagttgacattaaagcagatatcgtattcttagttgatggaagctactctatcggtatcgccaattttgtcaaggtgagagcctttctcgaggtgctggtaaaaagcttcgagatctctccaaatagagtgcagatcagtctcgtgcagtatagccgcgacccacacactgaattcacacttaaaaagtttaccaaagtcgaggacattatcgaagccattaacacgttcccctaccggggaggcagcacaaacaccgggaaagcaatgacgtatgttcgcgagaaaatctttgtgccaagcaaagggagcagaagtaacgtacctaaggtgatgatcttaatcaccgatggcaaaagtagtgacgctttcagggaccctgctataaagctgcgtaactccgatgtcgagatcttcgccgtcggtgtcaaggatgcagtaaggtccgaactggaggcgattgcaagcccccctgctgaaacacacgtgttcaccgttgaagacttcgatgccttccagcgaataagttttgaactgacacaatccatatgtctgcggattgagcaggaactggcagccataaaaaagaaagcatatgttcctcctaaggacctctctttctctgaagtgaccagctacggattcaaaacaaactggtcaccagcaggagagaatgtattcagttaccacatcacgtacaaagaagcagcgggagacgacgaggtgacagttgttgaacctgcctcctccacgtcagtggtcctctcttcgcttaagccagagacattatacctggtcaatgtgactgccgaatacgaggacggctttagtattcctctcgcaggggaggaaaccacggaagaggtgaagggcgcacccaggaacctgaaggttactgatgagaccacagatagcttcaagatcacatggactcaggccccagggagagttctgcgctatcgcattatatacagacctgtcgctgggggagaatcacgggaagtgacgaccccgccaaaccagagaagaagaaccctggaaaatttaatccctgacacaaaatatgaggtctccgtcattcctgaatacttttctggccctggaacaccactcactgggaacgcagcgaccgaagaggtgcgtggcaatcccagggacctcagagtgagtgaccctaccacaagcacaatgaaattgagttggtccggcgcacctggtaaagttaaacagtatcttgtgacatacactcccgtcgcaggcggagagacccaggaagtcaccgtgaggggagataccaccaacacagtgctgcaaggattaaaggaaggaacccagtacgccctctccgtgaccgcgctgtacgcttctggggcaggtgacgcgctgtttggtgaggggactactctcgaagaaaggggctcaccgcaagacctggtcactaaggatatcacagatacaagcattggagcttattggaccagtgcgcctggtatggttaggggctatcgggtgtcatggaaatcactctatgatgacgtcgacaccggtgaaaagaatctgcccgaggacgctattcacacaatgatcgagaaccttcagcccgagactaagtaccgcatctctgtgttcgccacttactcctcaggggagggcgagcctctcaccggagatgcaacaacagagctgtcacaggactctaagaccctaaaggttgacgaagagaccgaaaacaccatgagggtcacgtggaaaccagcgccaggtaaagtcgtgaactatagggtcgtttatagaccacatgggagaggaaagcagatggtggccaaggtaccaccaacagtgacttccaccgtcttaaaacggctgcagccacagacaacttatgacattaccgtgctccccatctacaaaatgggtgaggggaagctgcgacaagggagcggcacaacagcgagccgctttaagtctcctcggaacctgaagacaagcgatcccaccatgtcctccttcagagtgacttgggagcctgccccaggcgaagtaaaggggtacaaagtgacatttcaccccaccggcgatgaccggagattgggtgagctggtggtgggaccctacgacaatactgttgtgcttgaggaactgcgcgctggtacaacatacaaggtaaacgtgttcggcatgtttgacggcggagaaagttcccctctcgtcggccaggagatgacaactctgtccgataccacagttatgcctatactgagctccggcatggaatgcctcacccgggcagaggccgacatcgttttgctagtggatgggagttggtccataggccgagctaattttaggactgtgcgttcatttatttccaggatcgttgaggtatttgacatcggccctaagcgggtccagattgcgctggcccagtactccggggacccccgaaccgagtggcaacttaatgcccaccgtgataagaagtcccttctgcaggccgttgcaaacctgccatataaagggggaaacacacttaccggcatggcactgaatttcattaggcagcagaattttagaactcaggccggaatgagacctcgggctcggaaaatcggagtgctcatcactgatggcaaatctcaagatgacgtggaggccccatccaagaaattgaaggatgagggagtcgaactcttcgcgataggtatcaagaacgctgacgaagtggaattgaagatgattgcaaccgatcccgacgatactcatgcttataacgtggccgatttcgaatcattatccaggatcgtcgatgacctgactatcaacctttgtaacagcgtgaagggcccaggggatctggaggccccatccaaccttgtcatttctgagaggacccaccggtcctttcgcgtatcctggacacccccaagcgactccgtggatcgttacaaagttgagtattatcccgtgagtggaggtaagagacaggaattctacgttagtaggatggaaacgagcacagttctcaaagacctgaagccggagaccgagtacgttgtgaacgtgtacagtgtcgtagaagacgagtacagtgagcccttgaagggaacagagaagacccttccggttcccgtggtctctcttaatatctatgacgttggtccgactacgatgcacgtacaatggcagcccgtcgggggagctaccggttacatcctgagctacaagcctgtgaaagataccgaacctactagacccaaggaagtccgtctgggacctactgttaacgacatgcagctcaccgacctcgtgccaaatactgagtacgctgtaactgtacaggccgtgttgcacgacctcaccagcgagccagtgaccgtacgggaggtgaccctccctctgcctaggccacaggacctgaagctgcgcgacgtcacacactcgactatgaacgtgttttgggagcccgtgccgggaaaagtacgaaaatacatagtcaggtataagactcccgaagaggatgtcaaggaggtcgaggttgacaggagcgagactagcacatctctgaaggatctgttcagccaaacactttatactgttagcgtatcggctgtgcacgacgagggggagtccccgccagtcaccgcgcaagagaccaccagacctgtgcctgctcctactaatctgaagatcaccgaagtcacctctgaaggctttcgagggacatgggaccacggcgcatccgatgtaagtctgtaccgaatcacatgggctcccttcggatcgtcagacaaaatggagaccatactgaacggcgatgaaaatacgctggttttcgaaaacctgaaccccaataccatctacgaagtttccataacagccatatatccggatgagtccgagtcggacgacctgattggtagcgaaaggacactacccattctgaccacgcaggcccctaaaagcgggccacgaaatctccaagtgtataatgccacatcaaactctctgacagtaaagtgggatccagcatctggaagggtgcaaaaatatcggattacctaccaaccgtcaacaggagagggtaatgagcagacaactacgatcggaggcagacagaattccgttgtactgcagaaattaaaacccgataccccctatacgataaccgtgtcaagtctgtaccccgatggcgaagggggacgcatgactggtcgaggaaagacaaagccactgaacaccgttcgaaaccttagggtctatgatccaagcaccagtaccctcaacgtgcggtgggatcatgctgagggcaaccccaggcaatacaagcttttctatgctcctgctgccggaggccctgaagagttagtgccaattccaggcaatactaattacgccatcctccgaaacctccagcctgatacatcctatactgtcactgtggtgcccgtctacacagagggggacggcggaaggacttccgacactggacgcaccctgatgcgaggcctggcacgtaatgtgcaggtgtataatcccacacccaatagcctagacgtaaggtgggaccctgccccagggccagtactgcaatatcgggttgtttatagccccgttgatggtaccagaccaagtgaaagcatagtagtacccggaaatacaaggatggttcatcttgagcggctcattccagacaccctctactcggtgaatctcgtggctctgtatagcgacggagaggggaatccgtcccccgcacagggccgaactttaccaagatctggccctaggaatttgcgtgtcttcggcgagacaaccaattctttgagcgtcgcctgggaccacgccgatgggccagtacagcagtatcgtatcatctactcccccaccgtcggggaccccatcgatgagtacaccactgtacccggacgccgtaataatgtgatactgcaacctttgcagcccgatacaccctacaagattaccgtcatcgcagtgtacgaagacggcgacgggggacacctcactggcaatgggagaacagtaggcctgttgcctccacaaaatattcatattagtgacgagtggtacacccgttttcgggtgagctgggacccctcgccttcacctgttttgggttataaaattgtgtataagccagttgggtccaacgagccgatggaggcttttgtaggcgagatgacatcttacactctccataatctcaacccatccaccacatacgatgtgaacgtctatgcacaatacgattctggcttgtccgttcctctcacagatcagggtaccaccctttatcttaacgtaaccgacttaaaaacctaccaaatcggctgggatacgttctgcgtcaaatggagtccccacagagccgctacctcttaccggctaaagctcagccctgcagatggtacccgcggacaggagatcactgtgagaggatccgaaacatcccattgctttactggactgagccccgatacggattatggggtgacagtatttgtccagactcctaatctggaggggccaggcgtgagtgtgaaagagcacactacagtgaaacccacagaggccccaactgaaccccctacccccccaccaccacctaccattccacctgcaagggacgtttgcaaaggagccaaagccgacattgtgttcttaaccgatgcatcctggtcaatcggagacgataatttcaataaggtggtgaaattcatttttaacaccgtcgggggatttgacgaaatctcccctgctggcatccaagtgtcttttgtgcaatactctgatgaggtcaaatccgagttcaaacttaatacttacaacgataaagctcttgccttaggcgcactgcaaaatattagatatcggggaggcaacaccaggactggcaaggcactgaccttcattaaggaaaaagtgttaacatgggagagcggtatgaggaaaaatgtgccgaaggttctggtagtggtgactgacggaaggagtcaggacgaagtaaaaaaggccgctctggttattcagcagagcgggtttagtgtcttcgtggtgggagtggccgatgttgactataatgagttggcaaatatcgcgagcaaaccttctgaacgtcatgtgtttatcgtggatgattttgagagtttcgagaagattgaagacaacctcatcactttcgtttgcgagacagccacatctagttgcccactcatttatctggatggctacactagtcccggttttaaaatgttggaagcgtataacctgactgaaaaaaattttgctagcgtacagggggtttccctagagtccggttccttcccttcatacagtgcctatcgaatccagaagaacgcctttgtcaatcagccgacagccgacctgcatcctaatggtctgcccccttcatacaccattatcctgctgtttcggctgctgcccgagactccgtcagacccatttgccatttggcaaataaccgacagggactataagcctcaggtgggagtcattgcagatcccagcagcaagacactaagtttttttaataaggacacacgcggagaagttcagaccgtcacttttgacacagaggaggttaagacgctattctacgggtcattccataaggtgcatatcgtggtgacaagcaaatcagtgaaaatttatattgactgctacgaaatcatcgaaaaagatatcaaagaggctgggaatatcaccaccgacgggtacgagatcctgggcaaactcctgaagggggaacgtaaaagcgccgcatttcagatacagtccttcgacattgtatgcagccccgtttggacttccagggaccgatgctgcgatatcccgtctagacgcgacgaaggaaaatgccccgctttccctaacagttgcacctgcactcaggattctgtggggcctcctgggcctccgggacctgccggaggccctggggctaaaggtccgcgaggggagcggggaatttcgggcgcaatcggcccacctgggcctaggggtgacattggtcctccgggacctcagggccctccagggcctcagggccctaatggtctctcgattccaggcgagcagggtcgacagggcatgaagggagacgccggagagcccggattgccaggacggaccgggacacctggccttccgggtcctcccggaccaatggggccacctggagaccgagggtttacgggcaaagacggggcaatgggcccacggggtcctcccggtccgccaggtagtcctggatccccaggtgttactggtcccagtggtaaaccgggtaaacccggagatcatggcagacctgggcctagcggtctgaaaggtgagaaaggcgacaggggggacatcgcctcccagaacatgatgcgggcagtggccagacaggtgtgtgagcagctgatttccggccagatgaacagattcaatcaaatgctcaatcagatcccaaatgattatcagtcctccaggaatcagccgggaccccctggcccacctggcccacctggttctgccggtgccaggggcgaacctggccctggaggtcgccctggatttcctggaaccccaggcatgcaaggcccacctggagagcgcggactccctggagaaaagggcgagcgcggtaccggttctagtggtccccgtggtctgcccggaccgcctggaccccagggggagtctcggacgggtcccccaggttcgacagggagcagaggtccccctggaccacctggacgcccagggaatagtgggatcagggggccaccgggacccccagggtattgtgattccagccaatgcgcaagcattccttacaatggacagggatatccaggctctggataa

SEQ ID NO: 145698 - DNA, 5699 bp, Artificial Sequence
  derived and/or modified sequence
atgcgttcgcgcctgccacctgctctcgcagcgttaggggctgccctgctgctatcatccattgaggctgaaggaatggaatgtctaaccagagcagaggcagatattgtactgctcgtggacggctcctggagcattgggcgagcgaactttaggaccgtgcgcagtttcattagtcgtattgtggaggtgttcgacattggtccgaaacgggtgcagatcgccctcgctcagtactctggggaccccaggaccgagtggcagcttaacgctcaccgggacaaaaaatccctgttacaggccgtagctaatctgccatataagggaggtaacactctgaccggcatggcactcaactttatccgccagcagaatttcagaactcaggccggaatgaggccaagggcgcgtaagatcggcgtgcttattacagacggcaagagccaggacgacgtggaagcccctagcaagaaattaaaggatgaaggcgttgaactctttgctatcggcatcaaaaacgccgacgaggtggaattgaagatgatcgctaccgacccagatgatactcacgcctacaacgttgcagacttcgaatccttgagtagaattgtagatgacctcaccataaacctctgcaattcagtcaagggaccaggcgacttggaagcgccatccaacctggtcatttcagagcggacacacaggagtttccgagtgtcctggacccctccttctgattccgtggacaggtataaggtcgagtattacccagtgtctggcggaaaaaggcaggagttctacgtgtctagaatggaaacctccaccgtcctgaaagacttaaagcccgaaacagagtacgtggttaacgtttactccgtggtggaagacgagtactctgaacccctgaaaggcactgagaaaactctgcccgtgcctgttgtctctctgaacatctacgacgtggggcctacaaccatgcatgtgcagtggcaaccagtcgggggagccaccggctatattctcagctacaagccagttaaggacactgagcccaccaggcccaaagaggtgcggttggggccaaccgtgaacgatatgcagctcactgacctggtgcctaacaccgagtatgcagtgacggtccaggcggttcttcatgacttgacaagcgaacctgtgactgtgcgcgaggtgactctgccactccctcggccacaggatctgaagttacgagacgtcacacacagcaccatgaatgttttctgggagcccgttcctgggaaggttagaaagtatatcgtaaggtacaagacacctgaagaggatgtgaaagaggtggaggtcgatcgatctgagaccagcacttctcttaaggacctgttctctcagacactgtatactgtcagtgtcagcgcagttcacgacgagggcgaatcacctcccgtaaccgcccaggagaccactcggcctgtcccagctcccacaaatctgaaaatcaccgaggtgacttctgagggctttcgcggaacctgggatcatggcgctagcgatgtctctctctaccggatcacatgggcgccttttgggtcatctgacaaaatggagacgattttaaatggggatgagaacaccctggtattcgaaaacctgaatcccaacactatttacgaagtcagcattacggcaatataccctgatgagagcgagtcagatgacctgattgggagcgaacggacattacctatcctcacgacccaagctccaaaatccggcccacgcaatctgcaagtgtataatgccaccagcaactccctgacagtgaagtgggatcccgcatctggacgagtgcaaaagtatcggattacctaccagcccagcaccggtgagggcaacgagcagactactactatcggcggacgacaaaacagtgtagtgctccagaagctgaaacctgacacaccctacacaataaccgtgtcatccctttatccagatggagaaggcggacgcatgactggccgtggaaagacgaaacccctgaacactgttcgcaaccttagagtgtacgatccgagcaccagtaccctgaacgtgagatgggatcacgcggagggcaatcctaggcaatataaactgttctacgcacccgcagcagggggacccgaggagctggtgccaataccaggcaatacaaattatgctattttaaggaatttacagcctgacacctcctataccgtcaccgttgtgcctgtatacaccgagggggacggaggccgtacaagcgataccggaagaactctgatgagaggcttagctcgcaacgtccaggtttacaatcctacaccaaacagtctggatgtgcggtgggatcccgcaccaggcccagttttgcagtaccgggtagtctactcacccgtcgatggaaccaggccatccgagtccattgtcgtccctgggaatacacggatggtacatctggagcgcctgatcccagatacgctgtattctgtaaacctggtggccctctactccgatggcgagggtaatccctctccggctcagggacggactctgcccagatcaggacctagaaaccttcgtgtattcggcgagaccaccaacagcctgagcgttgcctgggaccacgccgatggacccgtccaacagtaccgaattatatattctcccactgtgggtgacccaatcgatgagtacaccacggttcctgggaggcgcaataacgtaatcctacagccgctccagcctgatactccctataaaattaccgtgattgctgtgtacgaggatggggatggcggtcatttaactggaaacggtcgtactgtcggcctgctccctccacagaatatccatataagtgacgaatggtacacccgcttcagagtgtcttgggatcccagtccaagccccgtcctggggtacaaaatcgtctacaaaccagtgggtagcaatgaaccgatggaggccttcgttggggagatgacctcttataccctacataaccttaacccttctacgacctatgacgtgaatgtgtatgctcagtacgactctggactaagcgtcccgctaactgaccagggtaccaccctatacctcaatgtcaccgatcttaaaacctatcaaattggttgggataccttctgtgtgaaatggagcccacatagggcagccaccagctacagattaaagttgagccccgcagacggtacccgcggacaggagatcaccgtccgtggaagtgagaccagccattgttttactggcctgtcacccgataccgactacggtgtgacagtcttcgtacaaacacctaaccttgagggccctggcgtgagtgtgaaggagcacacaacagtgaagccaacagaagctcctaccgagccccctaccccacctcctccaccgaccatcccacctgctagggatgtgtgtaagggagcaaaggcggatatagttttcctgaccgatgcttcttggtccataggggatgacaatttcaataaggtggttaagtttatatttaacaccgtgggaggctttgacgagattagtcccgctggaatccaggtctccttcgtacagtatagtgacgaagtgaaatccgagtttaaactgaatacttacaacgacaaagcacttgctcttggagccctccaaaacatccggtaccgaggcggaaatacaagaacaggcaaagcattgactttcatcaaagagaaggtcttgacttgggaatcgggcatgcgaaagaacgtccctaaggtgttagtagttgtgaccgacgggagatcccaggatgaagtcaaaaaggccgcacttgttatacagcagagtgggttctctgtctttgtcgttggtgtcgccgatgtggattataacgagctcgccaacattgcatcgaagccaagcgaaagacacgttttcatcgttgatgacttcgagagttttgaaaagattgaggataatctcatcacattcgtttgtgaaactgcgacctcatcatgcccgcttatatatttggacggctataccagtcctggattcaaaatgctggaagcctataacttaacagagaaaaatttcgctagtgtgcagggcgtgtctttggagagtgggtccttcccatcctactctgcgtacaggattcaaaaaaacgctttcgtgaaccaaccaacagcagacttgcaccccaacggactgcccccttcttatacaattatactgctgtttaggctactccccgaaactccctccgacccatttgcaatttggcagatcaccgacagagactataagccacaggtcggcgtgatcgcagatccttcttcgaagactctttcattcttcaacaaggatacaagaggagaggttcagaccgtgactttcgataccgaggaggttaaaacactgttctatggctcgtttcacaaagtgcacattgtcgttactagtaaatcagttaaaatctatatcgactgctatgagattatcgaaaaggacatcaaggaggctggaaacataacaactgatggctatgagatcctcgggaagctcctgaagggggaaagaaaaagtgccgcttttcagatccagtctttcgacatcgtgtgctctccggtgtggaccagtcgggatagatgctgtgacataccttcccgcagagacgagggtaagtgcccagcctttcccaacagctgcacatgcacccaagacagtgtcggccctccgggacctccagggcctgccggtggtcctggcgcaaaaggtcctaggggcgagcggggtatctctggtgccattggcccaccgggacccaggggcgatatcggtccacccggaccacaggggccacctggccctcaagggccaaatggcctgtcaatcccgggagagcagggcagacagggtatgaagggggacgctggtgaaccgggacttcccggaaggaccggcacaccaggcctaccaggtcccccaggcccaatgggtcccccaggcgacagaggcttcaccgggaaggatggtgccatgggcccaaggggaccacccggaccccctggtagccctgggtcacctggagtgacagggccatccggaaaaccagggaagcccggtgaccacgggagacccggtccttccggcttgaaaggagagaaaggcgaccggggagacattgccagccagaatatgatgcgggcagttgctagacaagtctgcgaacaactcatctcaggccaaatgaatcgttttaatcagatgctgaaccaaatccctaacgattaccaatcttcaagaaaccagcccggacctcccggtcccccaggtcctcctggatccgcaggcgcaagaggtgaacccggaccagggggtcggccaggctttcctgggactcctggcatgcaggggccacctggcgaaagaggcctacctggtgagaaaggggaacggggtacaggatcctcaggcccacggggactcccaggcccaccgggtcctcagggcgagtccagaaccggaccccctgggtctactggatccagggggccacctggtcctccaggacgccctggaaacagcggaatacggggaccccctgggccacctggttattgcgattcgtctcagtgtgcatcaatcccttacaacggtcagggttaccccggttccggcta

SEQ ID NO: 145699 - DNA, 8964 bp, Artificial Sequence
  derived and/or modified sequence
atgaggagccggcttcctcctgcactagctgctctaggagccgctctgctgctgagctccatcgaagcggaagtggatcctcctagcgacctgaacttcaaaatcattgatgagaatacagtgcacatgagctgggccaagcccgtcgatccaattgtggggtacagaatcacggtggacccaaccacagacgggccaactaaagaatttactctcagtgcttccactaccgaaacgttgctgtccgaactcgtgcccgagaccgagtatgtggtcacaataacgtcttatgacgaagtggaggaatctgttcctgtaatcggccaacttaccatccagaccggctcttctaccaagcctgtcgagaaaaagccaggcaaaaccgagatacaaaagtgctcagtatcagcatggacagacttggtttttctggtggacggctcctggtctgtgggacggaacaattttaaatacattctggacttcatagccgcacttgtttctgctttcgatatcggagaagaaaaaactcgggtaggagtcgtccagtatagtagcgacacccggactgaattcaatctaaatcaatactatcagcgagacgagctactcgccgctatcaaaaagatcccctacaagggcggaaacaccatgaccggagacgctatcgattacttagtgaagaacaccttcactgaatccgctggagctagagtggggtttcctaaggtagctattattatcactgatggcaaatcccaggacgaggtggagatccctgctcgagaactcaggaacgttggtgtcgaagtattttcccttggcatcaaggccgctgacgccaaggaattgaaacagatcgctagcacccctagtttgaatcatgtgttcaacgttgctaacttcgatgccatcgtggacatccaaaacgagattatctcacaggtttgttctggtgtggatgaacagttgggcgagctcgtctctggggaagaagtcgtagagcccccttctaacctgattgctatggaagtctcctctaagtatgtcaagctcaactggaatccatctccgtcacctgtaacgggatataaggtcatcctgacaccaatgaccgcagggtcccgccagcatgctctatctgttggcccacagacaactacactgtctgtacgggatctgagcgccgacacagagtatcagatttcggtatctgcaatgaagggcatgacctcatctgagccaatctccatcatggagaagacacagcctatgaaagtccaagtggagtgtagtagaggcgtcgacatcaaggctgatattgtgttcctagtggatggctcctactcaatcgggattgccaatttcgttaaagttcgggcattccttgaggtcctggtgaaatcttttgagattagcccaaaccgagtccagatctctctggtccagtatagtcgcgacccccacactgagtttacactcaagaagttcaccaaggtagaggatatcatcgaggccatcaataccttcccatatagaggagggtctaccaacaccggtaaagcaatgacgtatgtgcgagagaaaattttcgtcccgagcaagggttctaggtcaaacgttcccaaagtgatgattctcattactgatggcaaaagctcagacgccttccgggaccctgctattaaactacggaactcggacgtggagatcttcgccgtgggcgtgaaagatgccgtccgctccgagttggaggctatagcctcccctcctgctgaaactcatgtctttaccgtcgaggattttgatgcgttccaaaggatttctttcgaactcacccagtctatctgcttacgcatcgaacaagagctggccgctattaagaagaaggcgtacgtacctcctaaggatttgtcttttagtgaggttacatcctatggttttaagaccaactggtctcccgctggcgagaacgtgttcagctatcacatcacttacaaagaagccgctggcgatgacgaggtgacagtcgttgagccagctagctctacaagtgtcgtactgtcttctctgaagcctgaaacattataccttgttaatgtgacagcagaatacgaagatggattttctattccactggccggagaggagacgaccgaggaagtaaagggggcaccccgtaatctcaaggttacagatgagacaactgattccttcaaaattacttggacccaggcgccaggaagagtcctgcgttaccgaattatctaccggcctgtcgccggaggcgaatcccgagaagttactactccaccaaaccagcggagaagaactttagagaaccttattccagacactaagtatgaggtgtccgtcataccagagtacttttcaggaccaggaaccccccttaccggcaacgccgcaactgaagaagtgcgcggtaatcctcgggatttgcgagtgtccgaccccaccacgtccacgatgaaactcagttggtctggggctccaggaaaggttaaacagtatttggtgacttatacacccgtggccggtggtgagacccaggaggtaacagtgcgaggggacactactaataccgttctgcagggactaaaagaaggcacacagtacgcattgtcggtcactgcgctgtatgcctctggtgcaggagatgctctgttcggagaaggaacaactttggaagagcgcggttctccacaagatctcgtgacgaaagatatcactgacaccagtatcggcgcatattggacttcggctccagggatggtccgcggatatcgagtgtcgtggaagtcgttatatgatgacgttgacaccggcgaaaagaacctccctgaggacgctattcatactatgatagagaacctgcagccagagactaagtatcgtattagcgtctttgcgacgtattcttctggcgaaggggagcccctcactggcgatgccaccacagaactcagtcaagacagcaaaactctaaaggtggacgaagagaccgaaaataccatgcgggtgacttggaagcccgcaccgggaaaggtcgtaaactatcgcgttgtctacaggccccacggtcgcggaaaacaaatggtagccaaagttccaccaacagtcacttctactgtacttaaaagattgcagcctcagaccacttacgacatcaccgtattgcccatatataaaatgggtgagggcaaactgagacagggcagcggaacgaccgcctccaggttcaaatccccccgaaacttgaagacttctgaccctaccatgtcctcctttagggtgacgtgggagccagcaccaggggaggtgaagggctacaaggtgaccttccatcctaccggagatgacagaaggctgggagaactggtggttggaccttacgataatacagtggtcctggaggagttgagggccggtacaacatacaaggtgaacgtttttgggatgttcgatggcggagagagcagtccactagttgggcaggaaatgacaaccttaagcgatactacagttatgcctatcctgtcaagtggtatggagtgcctcaccagggcggaagccgacattgtgctcctggtggacggctcatggtcgattggcagagcaaacttccgtaccgttagatcctttataagtcgcatcgttgaagtctttgacattggtccaaagagagtgcaaattgccctggctcagtattccggagaccccaggactgagtggcaactgaacgcccaccgagataaaaagagcctcctgcaggctgtggctaacctgccatacaaaggaggaaatacacttaccgggatggccttgaacttcattcgacaacagaacttcaggacgcaagcaggcatgaggcctagagctcgcaagatcggagtcctgatcacagacggcaagtcccaggatgacgttgaggcccctagtaaaaagttaaaggatgagggtgtggagctgttcgccatcggaattaagaacgcagacgaagtggaactaaagatgatcgcaacagatcctgacgatactcacgcttataacgtggccgacttcgaaagcctgagccggatcgtagatgatctcacgataaacctctgtaacagcgtgaaaggcccaggggacctggaggccccatctaatcttgtgatctcggagagaacccatcggtcatttcgggtctcatggaccccaccaagtgatagtgtagaccgctacaaagtggagtactacccagtgtcaggaggcaagcgccaggagttttacgtgtctaggatggagacatccacagtgctcaaggatctcaagccagaaaccgagtatgttgtcaatgtgtacagtgtcgtggaagacgaatactctgagccccttaaggggaccgagaaaaccctgccagtgcccgtggtgtccctcaatatttacgacgtcgggccaacaacaatgcatgtccagtggcagcccgtcggcggtgcaaccggttacatcttaagttacaagccagtgaaggacaccgaacccacgcggcctaaggaagtcaggctcggtcccactgttaatgatatgcaactcactgacctcgttcccaacactgaatatgcggtgaccgtgcaagctgtcctgcacgatctgacctccgaaccagtgaccgtccgagaagtgaccttacccttgccaaggccacaagacctgaaacttcgggatgttacacatagcactatgaacgtgttctgggagccagtgcccggaaaggtgcgaaagtacatagtgaggtacaagaccccggaggaagatgttaaagaagtagaggtcgacaggtccgagacctccacgtccttgaaggatcttttctctcagaccttatacaccgtgagtgttagcgccgtccatgacgagggcgagtctcccccagtcaccgctcaggagaccacccgcccagtgcccgctcccacaaatcttaaaataactgaggtgacatcagagggatttagggggacctgggaccatggcgcatctgatgtttcactgtaccggatcacctgggcgccttttggcagctcggataagatggagactatcctcaacggagacgagaatactctcgttttcgagaacctgaatcccaataccatttatgaagtctctattaccgcgatttaccctgatgaatctgagagcgatgatcttatcggatccgagcgcactttgcccatactaactacacaagccccaaaaagcggcccacggaatcttcaagtatacaatgccacatcaaactcattgaccgtgaagtgggaccccgcatccggcagggtgcagaaatatcgaatcacttatcaaccatccaccggcgaaggcaacgagcagaccacaactatagggggacgtcagaactcagtggtgctgcagaaactgaagcccgacacaccctatacgataacggtgtctagtctttatcctgatggtgagggcggtcggatgactgggaggggaaagacgaagccacttaacactgtgcgcaacctgagagtttatgatccatctacaagcaccctgaacgtgcgctgggatcacgcagaagggaacccccgacaatacaaattattttatgctcccgcagccggtggacctgaggagttggtcccaatacccggtaacacgaattacgccattttaaggaaccttcaacctgatacgagctatactgtgactgtggttccagtgtacaccgagggagacggcggacgtaccagcgatactggaaggaccctcatgcgcggactcgccagaaatgtgcaggtctacaaccccacgccaaatagcctggatgtcaggtgggacccagccccaggcccagtgctgcaatacagagttgtttatagtcccgtcgacggcactcgaccttccgagtctattgttgtccccggaaatactaggatggtccacctggagcgtttgatccccgataccctgtactctgtgaacctggtggcactctactccgatggggaagggaaccccagcccagcacagggcaggactttgcctaggtcagggccaagaaacctcagagtgttcggggaaactacgaattctttgagcgtggcttgggatcacgctgatggcccagtgcaacagtacaggataatctactcaccaacagttggagaccccatcgatgagtataccaccgtccctgggagaaggaacaatgtaattctgcagccgttgcaaccagacacaccttacaaaatcacggttatcgcagtatatgaggacggggatggcggacacttgactggcaatggacgaacagtcgggctgctgcctccccagaacatccacatatctgacgaatggtatacccgctttcgggtcagttgggatccgtcccctagtcctgttctgggctataagatagtgtacaagcccgtcgggagcaatgagcctatggaagcattcgtcggagaaatgacttcctacaccctgcacaaccttaatccttccacaacatatgacgtgaatgtttacgctcagtacgacagtgggctctctgtgcccctcaccgaccagggcacgaccctgtaccttaacgtgacggatctcaagacctaccagattggatgggatactttctgtgtgaaatggtcgccgcaccgagcagctacaagttatcgcctcaagttgagcccagcagatgggacccgaggacaagagataaccgtgcgcggtagtgagacaagccattgttttaccggtctctctcctgacacagactatggagtcaccgtgtttgtccagactcctaaccttgaggggcctggagtctccgtaaaggaacatacaactgtcaaaccaacagaggctcccactgaaccgccaactcctccaccccctcccacaatccctccagcaagggatgtgtgtaaaggggcaaaggccgatattgtgttcctcaccgatgcctcctggtccataggcgacgataatttcaacaaagtagttaagttcatatttaacacggttggcggtttcgatgagattagcccagctggtatccaggtgagctttgtccagtattccgatgaggtaaaaagcgaatttaagcttaatacgtataatgataaggctttggcactgggagccctacagaatatccgatatcgcggtggaaataccaggacaggaaaggccttaaccttcatcaaggaaaaggtgttgacctgggagtcaggtatgagaaaaaacgtgcctaaagtgcttgttgttgttacagacggtaggtcacaggatgaggtcaagaaagccgctctggtgattcagcagagcggattcagtgtgtttgtagttggagttgcagacgttgactataatgaattggcaaatattgctagtaagcccagcgagcgccacgtctttatagttgatgatttcgaaagttttgaaaagatcgaagataatctcataacttttgtttgtgagaccgccactagcagctgtccactgatatatctggacggatacacaagcccaggctttaaaatgctggaggcttataacttgactgagaagaattttgcgtctgtgcagggggtaagcctcgagtcgggaagcttcccctcctattccgcttacaggatacaaaagaacgcttttgttaatcagccaacagctgacctgcatccgaatggactcccacccagctatacaatcatccttctgttcaggctgttgcccgaaactccctcagatccattcgccatatggcagatcaccgatcgagactataaacctcaagtgggcgtgatagccgacccatccagtaagacactgtcttttttcaacaaagacacccggggtgaggtccaaacagtcaccttcgacacagaagaagtcaagactctattttacggctcgttccacaagagagatgaaggcaaatgtcctgcttttccaaattcgtgcacctgtacccaggatagcgtcggacctccaggccctcctggccctgcagggggacccggagcaaaaggaccacgcggagaacgcggaatctccggagccattgggcctcctggccctagaggggacattggacctccgggacctcagggtccacccggaccgcaggggccaaatgggctgagcattcctggcgagcagggcaggcaaggaatgaaaggtgatgcgggtgagcctggactccctggcagaacaggcacccctgggttgcctggccctcctggaccaatgggtcctcccggagacagaggctttacagggaaggacggggctatggggccaagggggcctcctggtcccccaggcagtccaggatctccaggtgtaaccggccctagcggcaagccaggcaagcctggcgaccacggcagaccaggtccatccggactgaaaggcgagaagggtgatcgcggtgatatcgctagtcaaaatatgatgagggccgtagcccgtcaggtatgtgagcagctgatctccggccagatgaacagatttaaccagatgcttaaccaaattcccaacgattatcagtcatctaggaaccaacccggtcctcctggaccaccgggacctcccggaagtgccggagctagaggagagccgggaccaggaggacggcctgggttcccagggaccccaggcatgcaaggaccgccaggcgagcgagggctgcccggtgaaaagggagaaagaggcacagggtccagcggccctcggggactgcctggacctcctgggcctcagggtgagagtcggacgggacccccaggcagtactgggtcacgtgggcctccaggacccccagggaggccaggtaacagtgggataaggggccctccaggaccgccaggctactgtgacagtagccagtgtgcttccattccttacaatggccagggttaccccggttcgggttac

SEQ ID NO: 145700 - DNA, 9192 bp, Artificial Sequence
  derived and/or modified sequence
atgcgcagcaggctgccccctgcactcgcagcccttggcgcagcactgctcctgtcctcaattgaggcagaagtcgatcccccaagtgaccttaatttcaagatcattgatgagaacacagtgcatatgtcttgggcaaagccagtggatccaattgtgggctaccgtattaccgtggatcccactaccgatggacccaccaaggagtttacactcagcgcctctaccacggaaaccctcttaagtgagctggtgcccgagaccgaatatgtcgtgacgatcacatcatacgatgaggtggaggaaagtgtccccgtcatcggccaattaactattcagactgggtctagcaccaagccagtggagaagaaaccagggaagactgagatacaaaaatgcagtgtcagcgcttggactgatttagtgttccttgtcgacgggagttggtctgtcggtagaaacaactttaagtacatcttggacttcatcgccgccctagtaagcgcttttgatatcggcgaagagaagactcgagtgggtgtcgtgcagtacagctccgacactagaaccgagttcaaccttaaccagtactatcagcgggacgagttgctggcggccataaagaagatcccctacaaggggggtaatacaatgacgggcgatgcaattgattatttagtcaaaaatacgtttacagaatccgctggggcccgggtaggtttcccgaaagtcgcaataattattacagacggcaaaagccaggatgaagtggaaattcctgcgagggaattgaggaacgtgggtgttgaggtgttctcactggggatcaaagccgcagacgccaaagagctcaaacaaatagccagtacgccttcattgaaccacgtgtttaatgtagcaaattttgatgccatcgtagacatacagaatgaaattatcagtcaggtctgctccggggtggatgagcaactgggcgagctggtgtcaggcgaggaggtcgtcgagccccctagcaacttgatcgccatggaggtctccagcaaatatgtgaagctcaattggaacccatccccctcccctgtcactggctataaggtcatactgactccaatgacagcaggttcgagacagcacgcactatccgtcggtccacaaacgacaacgctgtcggtgagggatttgtccgctgataccgaataccagatctcagtgtccgcaatgaagggtatgacgagtagcgaacctatcagcataatggaaaaaacacaacccatgaaggtgcaagtcgaatgctccaggggcgtggatataaaagctgatatcgtctttctcgtggatggctcctactcgattggaatagctaatttcgttaaagtgagagcatttctggaggtgcttgtgaagagcttcgagataagcccaaacagggtgcagatctctcttgtccaatatagccgcgatccacacaccgagtttaccctgaagaagtttaccaaggtagaagacatcatcgaggccatcaatacctttccttacaggggtggaagcaccaacactggaaaagcaatgacatacgtaagagagaagattttcgtaccctcaaaaggcagccggtccaacgtgcctaaagtgatgattcttatcactgatggaaaaagctctgatgcctttagggacccagccattaagttacggaactctgatgtggagatcttcgcagtcggcgtcaaggacgccgtaaggtcggaattagaggcgatagcttccccacccgccgaaacccatgtgttcactgtggaggacttcgatgcctttcagcgtatttcatttgaattgacacagagcatatgtcttagaattgagcaagaactcgctgcaataaaaaagaaagcttacgtgcctccaaaagacttgtcatttagtgaggtgacaagctacgggtttaagacgaactggtctcccgccggcgagaatgtgttttcctaccacatcacatataaggaggctgcaggagatgacgaggtaactgtcgtcgagcccgcaagctccacgtcagtcgtgttatcttcactcaaaccagaaactctgtatttggttaacgtgactgccgaatatgaggacggcttttcaatacccctggctggcgaagaaacaacagaagaggtgaagggcgcccctagaaatctcaaagtgactgatgagaccacggattccttcaaaatcacatggacccaggcaccgggcagagtgctcaggtatcgaattatttatcgaccagtggcaggcggtgaatccagagaggtcaccacacctcccaaccagaggagaagaacactcgaaaacctgatccctgatacgaagtacgaagtgagtgtgatccccgaatacttttcgggtccaggtacccccttgacaggaaatgcggcaaccgaggaagtcagaggcaatccccgcgatttacgtgttagcgacccaaccacgagtactatgaagttaagttggagcggtgcgcccggcaaggtgaagcagtatctggttacgtacacccccgtggctggcggtgaaacccaagaggtgaccgtaagaggagatacaacaaatacggtgttgcaggggctgaaggagggtacacagtacgctctcagtgtgacagccctctatgcatctggggccggcgacgctctctttggggaagggaccaccttggaggaacgcggttcaccacaggacctcgtcacaaaggatatcacggacactagcatcggggcctactggacctcagcccctgggatggtgcgaggatatcgcgtttcatggaagagcctgtacgatgacgttgacaccggggagaagaaccttccagaagacgcaatccacacaatgattgagaacctgcagccggagacaaagtaccgaatttccgttttcgcaacttacagcagcggcgagggagagcccttaaccggggacgctacgactgaactgagtcaggattctaagacactgaaggtggacgaagaaacagaaaacaccatgagggtgacatggaaaccagcgccaggaaaggtggttaattatcgcgtggtctacagaccccatgggagaggcaagcagatggttgcaaaggtgccgccaaccgtcacaagcactgtgctgaagaggttacagccgcagaccacatatgacattaccgtgctccccatttacaaaatgggggagggaaaactacggcaggggtccgggacaaccgccagcaggtttaaatctccaaggaacttgaaaacctccgatcctacaatgtcatccttccgagtcacctgggagcccgccccgggagaggtgaaaggctacaaagtcacctttcaccctacaggggatgataggcggctgggcgagcttgtggtgggaccttacgacaatactgtggtcctggaagaactccgggccgggactacgtacaaggtcaacgtgttcggcatgtttgatggtggcgagagtagcccactggtcggccaggaaatgactacgctcagtgataccaccgtaatgcccatcctatccagcgggatggagtgtctcaccagggccgaggccgatatagtcttattagtggacggttcatggagcataggccgggccaatttcaggactgtcaggtccttcatatcccgcattgttgaggtgtttgacatcggccctaagcgagtgcagattgcattggcccaatatagcggggacccaagaacagaatggcagctgaatgcccatagggataaaaagtccctgctgcaggctgtggcaaacctcccttataagggcggaaatacccttaccggcatggcgctgaattttattaggcaacagaatttccgaactcaggccggaatgaggcctcgggctcgaaagattggagtgttgattacagacggaaagtcccaggacgacgtggaagctcctagcaagaaattgaaggacgaaggcgtggagctgttcgcaattggcattaagaatgccgacgaagtagagctaaaaatgatagccactgaccccgatgatacccatgcgtacaacgtagcggactttgaatctttatcacggatcgtggatgacctgacaatcaatctctgcaacagcgtgaagggacccggcgacctggaggccccgtcaaatttggtcatttctgagcggacccatagatcctttcgggtgagctggactcccccctccgattccgtggatcggtataaagtggaatattaccctgtgtcggggggcaagaggcaggagttttacgtttctagaatggagacaagcacagtgctgaaggacctcaagcccgagacagaatatgtcgtcaacgtgtacagcgtcgtggaggacgagtatagtgagcccctgaagggtaccgaaaaaaccctcccggttcctgttgtgtcgttgaacatctatgacgtcggacccacaaccatgcacgtacagtggcagcccgttgggggtgcaacaggctatattctttcatacaagccggtgaaggacacagagcctactaggcctaaagaggtccgactgggcccaacagtgaacgatatgcaactgacagacctggtgccgaacacagagtatgccgtgacggtgcaggctgtgcttcatgatcttacttctgaaccagtgactgtacgggaagtgacacttcctctgcccagaccccaggatctgaagctgcgtgatgtgacccacagtacgatgaacgttttttgggagcctgtccctggaaaagtgcggaaatacatcgtgcgatacaagactcctgaagaagatgttaaggaggtcgaggtagatagaagtgagacttcaacttccctcaaagacctgtttagccaaactttgtacaccgtctccgtaagcgccgtccatgatgagggggagtccccccccgtgacagctcaagaaacgactcgtccggttccggccccaactaacttgaagatcactgaagtaactagcgaagggtttcgcggtacatgggaccacggagcatctgacgtgtctctttataggatcacatgggccccatttggttcaagcgataagatggaaaccattctaaacggcgatgaaaatactcttgtgttcgaaaaccttaacccgaacactatatacgaggtgtctattactgctatttatcccgatgagtccgaatccgacgatctgatcggctcagaaagaacattaccgatcttgacaacccaggccccaaaatccggccccagaaacctgcaagtatacaacgccacaagcaactccttgacagtcaagtgggaccccgcttctggacgggtccagaagtatagaattacttatcagccaagcaccggcgaaggcaacgaacagacaactaccattgggggtagacagaactcggtagtgctgcaaaaactgaagcccgatacaccctatactattacagtcagctcactgtaccccgatggggagggagggcggatgaccggaagggggaagacaaagccactgaataccgtgcgcaatctgagagtgtacgatccctccactagtacccttaatgtgcggtgggaccatgcagaaggaaatcccaggcagtacaaactcttctacgctcccgcagccgggggaccagaggagctggttcctatcccagggaataccaattatgcaatcctgcggaacctgcagccagacacttcatacacagttaccgtagtgcctgtctacaccgagggagacggcggacgcacgtctgatacggggaggactctcatgcgaggcctggcccgaaacgttcaggtctacaaccccacaccaaactcattggatgtgagatgggatcccgcccccgggccagttctccagtaccgggtggtttacagccctgttgatggaaccaggccaagcgaatccatcgtcgtgccaggtaacaccagaatggttcacctggaaaggttgatacctgataccctgtactcagttaacctcgtcgcactttatagcgacggggaaggcaacccatctccagcccagggaagaacactgccacgaagcgggccacggaatttacgtgtatttggcgagactactaattctctgtcagtcgcttgggatcatgcagacggccccgtccaacagtaccggattatatatagcccgactgtgggagatcctatcgacgagtatacaaccgtgcctggtcgccggaataacgtgatcctgcagcccctacagcccgacacaccttataagatcacagtcatcgccgtgtatgaggacggggacggcggtcacctgactggaaatggtagaaccgttggccttctgccacctcaaaacatccacatttccgatgagtggtacacaagattcagagtgtcctgggatccgtcccctagcccagtgctgggttataagatcgtttacaagccagttggctccaacgaacccatggaagccttcgttggagaaatgacctcatataccctgcataatctcaacccctctactacatacgacgtcaatgtctatgcacagtacgactccggactgtctgttcctctaactgaccagggcacaacgttgtatctcaatgttactgacctgaaaacctaccagattggatgggatacattctgcgtgaagtggtcccctcaccgggctgctaccagctacagactgaagctctcccctgcagacggcactcgcggtcaggagatcaccgtaagaggctcggaaacaagtcattgcttcacaggactgtcaccagatactgactatggagtcaccgtcttcgtccagaccccaaacttagagggtcccggagtgtctgtgaaagaacataccaccgtgaaacctaccgaggccccgaccgagccccccacaccccctccaccaccaaccattcctcctgctcgcgatgtgtgcaagggtgcaaaggctgacatcgttttcttgacagacgcctcctggagcattggcgacgataattttaacaaagtggtgaaattcatcttcaacaccgtgggtggtttcgatgaaattagcccagctgggattcaagtgagttttgtgcagtactccgacgaagtgaagtccgagttcaaactcaacacctacaacgacaaggctttggcgctgggcgctctccagaacataagatatagaggtggcaacacaagaactggcaaagctctgacgtttattaaagagaaggtgctgacttgggagtcaggaatgcgcaagaacgtgcctaaggttcttgtggttgtcactgatggaaggtcccaggatgaggtgaagaaggccgcactagtcatacagcagagtggcttctctgtgtttgtggtaggtgtagcagatgttgattataatgagcttgcgaatattgcgtccaaaccttccgaaagacacgtgtttatcgtcgatgattttgaatctttcgaaaagattgaggataaccttattacatttgtgtgtgagacagcaaccagtagttgcccactcatttacctcgatggttatacaagtccggggtttaagatgctggaagcctataacctaaccgagaagaacttcgcctctgttcaaggcgtgtctctggaatccgggagcttccccagttatagtgcttaccgcatccaaaagaatgcattcgtgaaccagcctaccgccgacctccatccaaacggcctccctccaagctacactatcatcctgctgttcaggctgctgcctgaaactccttcagatcccttcgcaatttggcagattaccgacagagattacaagccacaggtaggtgtgattgccgaccccagctcaaaaaccctgagttttttcaataaagacactaggggcgaagtgcaaaccgtcaccttcgacacagaagaagttaaaacactattttacggctctttccacaaggtccatattgtcgtgacctctaagagtgtcaagatttatattgattgttacgaaattatcgagaaggacattaaggaggctggaaatatcaccaccgacgggtatgagattctcgggaagctattaaagggcgaacgtaaatcagcagcctttcagatccagagctttgatattgtatgcagccccgtgtggactagcagggaccgctgctgtgatattccatctagacgcgacgagggaaagtgccctgctttccctaacagctgtacttgtacgcaggattctgttgggcctccagggcctcctgggccagctggcggtcccggggctaaggggcccaggggggagcggggcatcagcggcgctatcggtccacctggcccacggggggacatcgggccaccggggccccagggcccaccaggccctcaaggaccaaatgggctcagtatcccaggcgagcagggcagacaggggatgaaaggggatgccggcgagccagggctccctggtcgcactgggacgcccggtctcccaggtcctcctggaccaatgggccctcctggcgaccgaggatttacaggcaaggatggcgccatgggccctcgaggcccccccggtccacccgggtcacccgggtctcccggtgttacgggtccctcaggaaagcccgggaaaccaggcgatcacgggaggccagggccatcaggcctgaaaggcgagaagggcgaccgtggagatatcgcctctcagaatatgatgagggccgttgcccggcaggtgtgtgagcagctaatctctggacagatgaatagatttaatcagatgctcaaccagattcctaatgactaccagagtagtagaaatcagccaggacccccagggccacctggcccccctgggagcgcgggagctcggggtgagccaggtcctgggggccgccctggtttccctggcaccccaggcatgcagggaccgcctggagagcgcggtctgcctggtgaaaagggcgagcgcggcacaggatctagcggaccgcggggattgcccggacctcccgggccacagggagagagtcgtacgggaccaccaggaagcacaggaagcagagggccccctggtcctcctgggcgaccaggcaactccgggatacgcggtccccctggtccacctggctattgcgattctagtcaatgcgcctctatcccctataatggtcagggttacccaggctctggctag

SEQ ID NO: 145701 - DNA, 5700 bp, Artificial Sequence
  derived and/or modified sequence
atgaggtctcgactgcctcccgcccttgccgctttgggcgccgccttgttgctgtcgagcattgaggcagagggaatggagtgtctcacccgtgccgaggctgacattgtgctcctggtcgatgggtcatggagcataggtcgggccaacttccggactgtgcggtcctttatctcgcggatcgtcgaagtgttcgatattggccccaagagggtgcagatagctttggctcagtacagtggtgatcctaggaccgaatggcaattgaatgcccatcgagataaaaaaagcctcttgcaggcagttgccaacctgccatacaagggtggtaatacactcactggaatggccctgaatttcattcggcagcagaactttagaacccaggcaggcatgcgtcctcgtgcccggaaaataggggtgctgattactgatggcaaatcacaggatgacgtagaggctccctctaagaaacttaaggatgaaggggtggagcttttcgcgatcggcataaaaaacgccgacgaggtcgagttaaagatgatcgctactgatcccgatgacactcacgcttataacgtcgcagactttgagagtttgtccaggattgtggatgatcttacaattaacctgtgtaattcagttaaggggcccggtgacctcgaggctccatccaatttggttatctcagaacgcactcatcgatccttcagagtgtcatggaccccgccgtctgattctgttgacaggtataaagttgaatactatccagtctctggtggcaaacgtcaggagttctatgtttctcgaatggagacttctacggttctgaaagaccttaaacccgaaacggagtatgtcgtaaacgtgtacagtgtggtcgaggacgagtactcagaacccttaaaagggaccgaaaaaaccctgcccgttccagttgtttcattaaacatttacgacgtggggccaaccacgatgcatgttcagtggcagccagtcggaggcgcaacaggatatatactgagctacaagccagtcaaagacactgaacctacccgaccaaaggaagtaagactgggacccactgtgaatgatatgcagttaacagatctggtccctaacacagagtatgccgtgacagtccaggccgtcctacatgacctgacatcagagcctgtaaccgtgcgcgaggttaccctacctctaccccggccccaggatttgaaactgagagacgtgacccattctacgatgaacgtcttttgggaacccgtaccagggaaggttaggaaatatatagtaaggtataagactcccgaggaagatgtgaaggaggtcgaagtagaccgcagtgagacatcaaccagcttgaaggacctgttctctcagaccctctacaccgtttccgtttccgccgtgcacgatgaaggagaaagcccccctgtcaccgcacaagaaacaactcgccccgtgcccgctcccaccaacctgaagattacggaagttaccagcgagggcttcaggggaacctgggatcacggcgcatccgacgtgtccctgtacagaatcacatgggccccttttgggagcagcgataaaatggagaccattctgaacggcgacgagaacacgctggtgttcgagaacttgaatccaaatacaatttacgaggtgtctattacagctatttaccccgacgaaagcgaaagcgatgatttgataggctccgaacgtaccctgcccatactgaccactcaggcgcctaaaagcgggcctcgcaatctgcaggtttacaatgcgacctccaattctcttactgtcaagtgggaccccgcttccggcagagtccagaagtaccgtatcacctaccagccgtctacaggcgagggcaacgagcagaccaccactattggaggacgtcagaatagtgtggtgcttcagaaactgaaaccagatactccctacaccattacagtgagcagtctgtacccagacggagaaggcggcagaatgactgggcgaggcaagacaaaacccttaaatacagtgagaaacctcagagtatacgacccaagcacgtccacactaaacgttcgctgggatcatgcagaagggaacccaaggcagtacaagctgttttatgccccagcagccgggggccctgaggagttggtccccatccccggaaataccaattatgcaattctccgcaacctgcagcccgacacatcttacactgtcactgtggtacccgtctatactgagggggacggaggaaggaccagtgatactggaaggacactaatgcggggcctggctagaaatgttcaggtgtacaacccgacgcctaactcccttgacgtgcgatgggatcccgctcctggtccggtgctacagtacagggtggtgtatagtccagtagacggaacacgaccttcggaatcgatcgtggtgcctggtaacactagaatggtgcatctcgaaaggctcattcctgacaccctgtacagcgttaatctggttgccctgtactccgatggagagggaaaccccagccccgcacaaggaaggactcttccacgatctggccctaggaacctccgtgtgtttggggaaactacaaacagcctatctgtcgcttgggatcatgccgatgggcccgtacagcaataccggatcatctactccccaaccgtgggtgacccgatcgacgaatacactaccgtccctggacggcgcaacaacgtcatccttcagccccttcaacccgacaccccctataagataacagtgatcgcggtatatgaggatggagatggcggccacctgaccggcaacggccggaccgtaggattactccctccccaaaacatccacatctcggacgagtggtacaccaggttcagagtcagttgggatcccagtccttctcctgtgctcggctataagatcgtttacaagcccgtgggctcaaatgagcccatggaggcatttgtgggagaaatgacctcctatactcttcacaacctgaatccatccacaacctatgatgtgaatgtgtatgcccagtacgacagcggcttgtctgtgcccctcacagatcagggcactaccctctaccttaatgtgaccgatcttaagacatatcagataggttgggatacattttgcgtgaagtggagtcctcaccgggccgctacatcttatagattgaaattatcccctgctgacggcacacgtggtcaagagattactgttaggggctctgaaaccagccattgttttaccggtctctctcctgatactgattatggagtgacagtgtttgtccagacgcccaatctagaggggcctggcgtatctgtgaaggaacatacaacagtgaaaccgacggaggctcctactgaacccccaaccccacccccaccccccacaatccctccagccagagacgtctgcaaaggggcaaaagcagacatcgtcttcctcacagatgccagctggagcattggcgacgacaacttcaacaaagtagtgaaattcatcttcaatactgttggtggcttcgatgaaatttctcccgcgggtatccaagtctcattcgtccagtattctgacgaagtgaagagtgaattcaagctgaacacatacaacgacaaggctttggcgctcggcgcactccagaacatccgatacagggggggaaatacgagaaccggtaaggctctgacatttatcaaagaaaaagtgcttacttgggagtcaggaatgagaaagaacgtgccgaaggtcctcgtagtcgttacagacgggcggagtcaggacgaggttaagaaagcagcccttgtgatccagcagagcgggttctccgtgttcgtggttggagttgccgacgtagattacaatgagctcgccaacatcgccagcaagccttctgagcgtcatgtttttatcgtggacgattttgaatccttcgaaaaaattgaggataatttgataacctttgtttgtgaaactgccacgtcctcatgtccattaatatatcttgacggctacaccagccccggcttcaaaatgctggaggcctataatcttacagaaaagaatttcgccagtgtgcagggcgtctcattggaatctggatcgttcccttcatactctgcttaccgtattcagaaaaacgccttcgttaaccagcctaccgccgacttgcatcctaatggcctacctccttcttacactattatcctcctcttcaggttgctaccggagaccccttccgaccccttcgccatctggcaaatcactgatcgcgactacaaaccgcaggtaggcgtcatagcagaccccagctcaaaaactctgtccttctttaacaaagatactcgcggggaggtgcagaccgtaactttcgatacagaggaagtgaaaacactgttttatggcagctttcacaaggttcatatcgtagtaactagcaagtctgtaaagatatacatcgactgttacgagattatcgaaaaagatataaaggaagctgggaacattacaactgatggttatgagatccttggaaaactgcttaaaggcgaacggaagtccgcagcttttcagattcagtcattcgacattgtgtgcagtcccgtgtggaccagccgcgatagatgctgcgatatccctagccggcgcgacgagggtaagtgtcccgcattcccaaacagttgtacctgcacacaggattctgtcggtccaccgggcccacctgggcctgccggggggccgggtgctaaggggccacgtggagaaaggggaatcagcggtgctatcggccccccgggcccacggggtgatatcgggcctccagggcctcaggggcctcccggcccacagggtccaaacggcctgtctattcccggcgagcagggcaggcagggtatgaagggagatgccggggaacccggcctgcccggccggaccgggacacccggtctgccgggacctcctggtccaatgggaccaccaggggacaggggtttcacaggcaaagacggtgctatgggaccccgtggcccacctggacctcccgggagccccggatcccccggcgttactggcccatccggcaagccaggcaagcctggggatcacggccgccccgggcctagcggtttgaagggcgaaaagggggaccgcggggacattgcaagtcaaaatatgatgcgcgctgtggcccgtcaggtctgcgaacagctaatctcaggtcagatgaatcgcttcaaccagatgcttaatcaaattccaaatgattaccaaagttcccggaaccagccagggccaccgggacctcccggtccgcccggaagtgcaggagcacgcggggagccaggaccaggcgggcgtccaggatttccgggaaccccgggcatgcagggcccccctggagagcgaggcctgcccggagagaagggcgagcgcgggaccggcagcagcgggccacggggacttcctggccccccagggccgcaaggagagagtcggacagggccgcctggcagcactggcagcagaggtccccccggccctcccggcaggcccggcaacagcggcatcagggggccccctggcccccctgggtattgcgacagctcacaatgtgcatccatcccttataacggccagggctacccaggcagtggttag

SEQ ID NO: 145702 - DNA, 8964 bp, Artificial Sequence
  derived and/or modified sequence
atgcgctctcgccttccccctgccctggcagccttaggagctgccctgttgctcagtagtatcgaagcagaggtcgatcccccttccgatctgaacttcaaaataattgacgaaaacactgtgcacatgtcctgggcaaaacccgtggatcctatagtgggatatagaattacagttgatcctacaactgatggacctaccaaggagtttacgctcagtgcctctacgaccgagacattactgtcagaattagtgcctgaaactgagtacgttgtgaccattactagctacgatgaggtggaagagtctgtccctgtgatcggtcagttaaccatccagaccggctcaagcactaaacctgtggagaaaaaacccggaaagacagagattcagaaatgctcggtgagtgcttggactgatctggtcttcctggtggacggcagctggtctgtcggacggaacaactttaagtatatcctcgatttcatagccgcacttgttagcgctttcgatatcggtgaagaaaagacccgggtgggtgtggttcagtatagttcagatacacgaacagagttcaacctgaaccaatattaccagagggacgaattactggcagcgatcaaaaagatcccgtacaagggtggcaataccatgacaggagacgccatagattaccttgtaaaaaatacatttacggagtcagcgggcgcccgcgttggcttccctaaggtggccatcatcataacggacggtaaatcgcaggatgaggtcgaaatacccgcacgggagctcaggaacgtcggtgtggaggtgttctccctggggatcaaagccgcagatgccaaggagctcaagcagattgcgtccaccccctccctgaatcacgtgtttaatgtggctaatttcgacgccattgtcgatatccagaatgaaattatatctcaggtttgctcaggcgttgacgaacaactgggggagctggtgagtggtgaggaagtagtcgaaccaccttctaacctgatagccatggaggtctctagcaaatacgtgaagttgaattggaacccgagtccaagcccagtcacaggttacaaagtgatccttaccccaatgacagcgggttcacgtcagcacgctctgtcggttgggccgcagaccaccactttgtcagtccgcgatctgtctgctgacacagagtaccagattagcgtatcagcaatgaagggtatgacttcgagtgaacccatttctatcatggaaaaaactcaacccatgaaagtacaagttgagtgctcccgaggagtcgatattaaagccgacatcgtcttcctcgtcgacggatcgtactccatcgggatagccaatttcgtaaaggtgagagccttcctggaagtgcttgtcaagtccttcgagatctcccccaaccgggtccagatttctctggtccaatactcccgggacccacatacggagttcacactgaaaaagttcactaaggtggaagatatcatcgaggctataaatactttcccttaccggggcggcagcactaacacaggaaaggctatgacttatgtgcgcgaaaagattttcgtccccagcaagggatctcgctccaatgtccctaaagtaatgatcctgatcacggacgggaagtcttccgatgccttcagggatccggccatcaaattgagaaacagtgatgtagagatcttcgccgtgggagtgaaggacgcagtcaggagcgagctggaagcgatcgcatccccccccgctgagacccacgtgttcaccgtggaagatttcgatgccttccaaagaatttcctttgagcttactcagtccatctgcttacggatcgaacaggagctcgccgccatcaaaaaaaaagcttatgtgccacccaaagatctttccttctccgaagtcacgtcatatgggtttaagactaactggtcccctgcgggtgagaatgtttttagttaccatatcacatataaggaagcagccggagacgatgaagtgaccgtggttgagccggcctcatcgacgtccgtcgtactgtccagtctgaagcccgaaacactgtatctcgtgaacgttactgcggaatatgaagacggctttagtattccccttgcaggcgaagaaaccactgaagaggtgaaaggggcaccacgaaatcttaaggtaacagacgagacgaccgacagctttaagattacctggacccaggccccgggccgtgtgctcaggtacaggataatatacaggcctgtggcaggaggggaaagtcgtgaggtgactaccccacccaaccagagacggcgaaccctagagaatttgattcccgacacaaagtacgaagtctccgttattcctgagtattttagcggtcctggcactcctcttaccggtaacgccgccacagaagaggttagagggaacccgcgggatctgagagtgagtgatccgaccacatccacaatgaaactttcctggagtggagcgccggggaaggtaaaacaatacctggttacctacaccccagtggccggaggtgaaacccaggaagttactgtgcgtggtgacaccaccaatactgtgctacagggactgaaggaggggacacagtacgccttgtccgtgactgccctgtatgcttctggagcaggcgacgcactgtttggcgaggggacaaccctggaggaacgcggcagccctcaagacctcgtcaccaaggacatcacggacacaagcattggcgcatactggaccagtgccccaggcatggtgcgcggttacagagtgtcctggaaatccctgtatgacgacgtggacaccggcgagaaaaatctccccgaggacgccatccacacaatgatcgaaaaccttcagcccgagaccaaatatagaatatccgtttttgctacctatagctctggcgagggtgagccactgacaggagacgccacaactgaattgagccaggattccaaaacgctgaaagtagatgaggagacggagaacactatgagagttacttggaaacctgccccaggcaaggtggtcaactatagggtggtctaccgcccccacggccgagggaagcagatggtggccaaagtccctccgacagtaacgtccacagtactcaagcgactacagcctcagaccacttatgatataacagtcctgccaatttataaaatgggtgaaggaaagcttaggcaaggctccggtactaccgcctcccggttcaaatctcctaggaacctaaagacatcggacccaactatgtctagcttccgagtcacgtgggagcctgctccaggtgaggtgaaaggatacaaggtgacgttccaccctactggcgacgatcgacggctgggagagcttgtggttggaccatatgataataccgtggtcctggaggagttaagagccgggactacttacaaggtgaacgttttcgggatgttcgatggaggggagtcatctcctctcgtggggcaggaaatgaccaccctgagcgacacaacagtgatgccaatcctttccagcgggatggaatgcctgactagagctgaggccgatattgtcttgctagtcgatggctcgtggtcaattggtcgcgctaactttcgcaccgtgcgcagcttcattagtaggattgtcgaggtgttcgacatcgggccaaagcgcgtgcagattgcgctcgcccagtattcaggggaccctcgtacggagtggcagctgaatgcacatcgcgataaaaaatcccttctgcaagccgtggccaatctcccttacaaggggggaaacactctcacaggcatggctctaaatttcatccgacagcaaaattttaggacgcaggctggcatgaggcctagggccagaaaaatcggggttctcatcacggacggaaagtcacaagatgacgttgaggcacccagcaagaagctaaaagacgagggggtggagctgttcgctattggcatcaagaacgctgatgaggtagagctgaaaatgatcgccaccgacccggatgatactcatgcatataatgtagcagactttgaatctctatctcgcatcgttgatgatcttacgattaatctttgcaattcagtaaaagggccaggcgatctggaggcccccagtaatttggtgatatctgaacgcacgcacaggagctttagggtttcttggacgccacccagtgattccgtcgacagatataaggtggagtattacccagtgtctggcggaaagagacaggagttttacgtgagccgtatggagacaagtactgtgctcaaggacctgaaaccagaaacagagtatgttgtgaacgtgtatagcgtggtcgaagatgaatacagtgaaccactcaagggcaccgaaaagacactccccgtgcccgtcgttagcctgaacatatatgatgtgggcccaaccaccatgcatgtgcaatggcagcctgtcggcggcgcgacaggctacattctcagttacaagccagtgaaggacacagagcctacacgccccaaggaggttaggctgggtcccactgtgaacgatatgcagctgacagacttggtgccgaacactgagtatgccgtgacagtgcaggccgtcctgcatgatctcacctccgagcctgtgactgtgcgcgaagtgacactgcccctccccagaccacaggatttgaaattgcgggatgttacacattctaccatgaatgtgttttgggaaccggtgcctggtaaagtgcgtaagtacatcgtccggtacaagaccccggaagaagatgtaaaagaagtcgaggtcgatcggtctgaaactagtacttctctgaaggacctgttctcccagaccctgtacacagtaagcgtcagtgcagtccacgatgaaggagaatcgccacccgtaacggctcaggaaacaactcgtccagtacccgctcccactaacttgaaaattactgaggtaacttctgaggggttccgggggacatgggaccatggagccagtgacgtctccttataccgcattacatgggcgccatttggcagttctgacaagatggaaacaatcttgaatggtgatgaaaatacactggtatttgaaaaccttaatccaaataccatatatgaggtctccataacggctatttaccctgacgaatccgaaagtgacgatttgatcggaagtgaacgcactctgccaatccttacaacccaggcgcctaagtcagggcctagaaacctgcaagtctataatgcaacatcaaactccctcacagtcaaatgggatcccgcatccggcagggtccagaaataccgtatcacttatcagcccagtacgggtgaagggaatgagcagacaacaacgataggcgggaggcaaaattccgtcgtcttacagaagctcaagcctgataccccgtataccattactgtttcaagcctttatcccgacggggaaggcggaagaatgaccggacgtggaaagacgaagccgctgaacaccgtgaggaatttacgcgtgtacgatccgagcacaagcactttaaacgtcagatgggatcacgcggaaggaaacccaagacaatataaactgttttacgcaccggccgccgggggccctgaggaattagtgccaattccagggaacaccaactacgccatccttcgcaatctacagcccgacacttcttacacggtgaccgtcgtgcccgtgtacactgaaggcgacggtggacgtaccagcgacacaggccgaacactaatgagaggcctggctcggaacgttcaagtttataatccaacccctaactctctcgatgttagatgggaccccgcacctggccctgtactccagtatagagtggtgtatagccctgtggatggaacaagaccctcagagagtatcgtggtgcccggaaatacaaggatggttcatctggaaaggctgatcccagacacactctattctgttaacctggtagctctgtattcggatggtgaggggaacccaagccccgctcagggccgcacgctgccccgctctggacctagaaatcttagagtgttcggagaaaccacaaacagcctatctgttgcttgggatcatgctgatggcccagtacagcaatatcgaatcatttattctcctacagtcggagaccccattgatgagtataccaccgtgcctggccggcggaataacgttatcctccagccattgcagccagacactccatataaaatcacggtgatcgctgtgtacgaagatggcgatggaggtcacctgacaggtaatgggaggaccgtcggactgcttcctccacagaacattcacattagtgatgaatggtataccagattccgggtgtcctgggatccttctccgtcccccgtgctcggctacaagatcgtgtacaagcctgtaggtagcaacgagcctatggaagcttttgtgggtgagatgacttcctataccctccacaacctgaacccttccactacatatgacgtgaacgtctacgctcagtatgacagcggactttcagtacctttgaccgatcagggaacaaccctctacctgaatgtcacagacctgaaaacatatcagatcggatgggacaccttttgcgtgaagtggagcccccatcgagcggccacatcttacagactgaagctgagcccagccgatgggacccgcggtcaggagattactgtgcgcggatcagaaaccagccactgtttcaccggcctaagtcctgacacagattatggggtgaccgttttcgtgcagaccccaaatttagagggaccaggcgtgtccgtgaaggagcacactactgttaagcctaccgaggcccccaccgaacccccaacacctcctccacctccaacgatcccacctgcaagggacgtgtgcaagggcgccaaagcggatatcgtgttcttgactgacgcctcttggtcgatcggggacgacaacttcaataaggttgtgaagtttatcttcaacacagttggaggcttcgacgaaatctcccctgctggtatccaggtgagcttcgtccagtattcggacgaggttaagtccgagttcaaactgaacacgtataatgataaagcactcgcactcggcgcactccaaaatattcgttatcggggcgggaatactcgaacagggaaggctctcacgttcatcaaagaaaaagtgctgacatgggagtccggaatgagaaaaaatgttcctaaggtattagtggtggtcactgatggccgatctcaggacgaagtgaagaaggcagccctggtgatacaacagagcggattttcggtgtttgtcgtgggcgttgcagatgtagactacaacgagctggccaacatcgcctccaaaccatctgagcgacacgtgttcatcgtggatgacttcgaatcttttgagaaaatcgaggacaatctgatcacgtttgtctgcgagacagcaacgagcagttgtccccttatctatcttgacgggtatacctcccccggctttaagatgcttgaagcttacaacctgaccgagaagaatttcgctagcgtgcagggggtgagtctagaatccggatcctttccaagctattctgcctaccgcattcagaaaaatgcctttgttaaccagccaactgctgacctacaccccaatggactcccgcccagctataccatcattttgctgtttcgtctgctgccggaaactcctagcgatcccttcgcaatctggcagattacagatagggactacaaaccccaggtgggagtcatagccgacccttcttctaagacgctctccttcttcaacaaagacacacggggcgaagtacagacagtgaccttcgacacagaggaagtgaagaccttgttctacggatccttccacaaaagggatgaggggaaatgtccagcatttccaaattcctgcacgtgcacgcaggacagcgtgggccctccagggccacccggcccagcagggggtcccggggcgaagggacctcgaggcgagagggggattagtggcgcaatcgggccccctgggcccagaggggacatcggacctcctggtccccagggtccacccggtccccaaggcccaaacggtctatccatccccggagagcaggggagacaaggcatgaaaggggacgcaggggaaccaggactgccaggaaggaccggaacacccggccttccaggacctcccgggccaatggggcccccgggcgacagaggctttaccgggaaggacggagccatgggaccccggggacctcctggccctccagggagccccggatctccgggggtgacaggaccgagcgggaagcccggcaaacccggagaccacggccgcccagggccttccggcctgaaaggcgagaaaggcgaccgtggcgatatcgcatctcaaaacatgatgcgtgcagtagccagacaggtgtgcgagcagttgatttccggtcagatgaatagattcaaccaaatgctgaaccagatcccaaatgactatcagtcatcacgcaatcagcccggaccacctggcccacctggcccccccggctcggctggggcaaggggcgagccaggaccgggtggcagaccagggttcccaggaacgcctggtatgcagggaccgcccggcgagcgaggcctcccaggagaaaaaggggagcgtgggacaggctcaagcggcccacgcggtctgcccggaccccccggtccgcagggagaatcccgcacaggaccccccggtagcaccggaagccgcggtccgcccggcccccctggccgacccggcaatagcgggattaggggcccgccaggcccaccgggctattgcgacagctcacagtgcgcctcaatcccatacaatgggcagggctaccctggttctggttag

SEQ ID NO: 145703 - DNA, 9192 bp, Artificial Sequence
  derived and/or modified sequence
atgagatctagactcccccccgccctggcagccctcggagcagcgttgttactcagttccattgaggcggaggtcgacccgccgagcgatctgaattttaaaattattgacgaaaacactgtacatatgtcctgggctaagccggtggacccaattgtgggatacagaatcaccgttgaccccactacagacggaccaacaaaagaattcacactttcagcctccacaaccgaaaccctgttgtctgaactcgtccctgagactgaatatgtcgtgacaatcacctcctatgatgaggttgaagaaagcgtgcccgtgatcggccagcttaccatccagaccggatcctctactaagcccgttgaaaaaaaacctggtaaaacagagattcaaaagtgttcagtatctgcatggacggacctagtatttctcgtggacggcagctggagtgtgggtcggaacaactttaaatacatcctagacttcattgcagcgctcgtgtcagcatttgatatcggagaggagaagacacgcgttggcgtagtgcagtatagctctgatacccgaacagagttcaatctaaaccagtactatcaacgagacgagttactggcagcaattaaaaaaatcccttataaaggcggtaacacgatgacaggcgacgcgattgattatttggttaagaacactttcactgaatcagccggtgcccgcgttggatttccaaaagtggctataattatcaccgatggcaaaagtcaggatgaggtggagattccagcccgcgagctgcgtaacgttggggtggaggtattttcactaggcatcaaagctgccgacgcgaaagaattgaaacagatcgcaagtaccccgtccttaaaccatgtgttcaatgtggccaacttcgatgcaatcgtggatatccagaacgaaatcatttcacaagtgtgtagcggcgtagacgaacaactcggcgagctggtgtccggagaagaagtagtggaacccccttctaatctgatcgcaatggaagtcagctctaaatatgtgaagttgaattggaaccctagtccatcaccggttacgggatataaagtaatattgacccccatgactgccggttcgcgccaacacgctctgtctgtaggccctcagactacaaccctgagtgtgcgtgacctgtcagccgataccgagtatcaaattagcgtatccgccatgaagggaatgacctcgagtgagcccatctcaattatggaaaaaacacagccaatgaaagtgcaagtggagtgctcaaggggagtggacatcaaggcagacatcgtcttccttgtcgatggctcctattcaattggtattgctaattttgttaaggtgcgtgcctttttggaggtgctggtgaaaagcttcgagatcagtccaaaccgcgtgcaaattagcctcgttcaatattctagggatccacacacagagttcacattaaaaaagtttaccaaagtggaggatatcattgaggcaatcaacacatttccttatagaggcgggtctacgaatacaggaaaggccatgacatacgttcgtgagaaaatcttcgtaccatctaaaggcagtagatccaacgtcccaaaagtcatgatcctgataacagacggtaagtccagtgatgcatttagagaccctgccataaaattaagaaatagcgacgtggagatttttgccgtgggtgttaaagacgcagtgaggtctgaactcgaggctattgcctcccccccagctgaaacacatgtgttcacggtggaagatttcgacgcctttcagcgcattagcttcgagctgacacagtcaatttgtctgaggatcgaacaggagttagctgctatcaagaaaaaggcatacgtgccgccaaaggacctctcattttccgaagtgacatcctacggtttcaaaaccaactggtcgcccgctggggaaaacgtgttcagctaccatatcacttacaaagaagcagctggagacgatgaggtgactgtggttgaaccagcctcttcaacatccgtcgtgctgtcatccttaaagccagagactctctatttagttaacgttacagctgaatatgaagacggcttcagcattccactggcaggagaagaaaccacagaggaagtgaagggcgccccaagaaaccttaaggtgacagacgagacaaccgattccttcaagattacgtggacccaggcccccggcagagtgctgagatatagaataatctaccgtcccgtcgcaggcggagaaagccgagaagtcaccacccccccaaatcaacgcaggcgtacactggagaacttgatccctgatacaaagtatgaagtgagcgtcatccctgagtacttcagcggccccggcacaccactgacggggaacgctgctactgaagaagtccggggaaatccgagagaccttagagtgtccgatccgacaacaagcaccatgaagcttagttggtccggagcccctgggaaagtgaaacagtatctggtgacatacacgcctgtagcaggaggcgagacacaagaggtgactgtcaggggcgacactacgaacactgttttgcagggacttaaagaaggcacccagtacgccctatccgtcactgcactatacgcctccggcgcaggagatgctttgttcggcgagggaacgactctggaggagagaggaagcccgcaggacctggtgaccaaggacattacagatacatccatcggagcatactggacctctgcccccggcatggtaaggggctatcgggtgtcttggaaaagtctgtatgatgatgtagacacaggtgaaaagaatctgcccgaggacgctatacatactatgattgaaaacctccagcctgaaacaaagtatcgcatatcggttttcgccacatatagtagtggagaaggggaaccgttaacgggggacgcaacaacagaactgtcccaggacagcaagactctgaaagtagacgaggaaacagagaacacaatgcgggtgacatggaagccagcccctggaaaggtggtgaattatcgtgtggtttacagaccccacgggaggggtaagcagatggtcgccaaggtgcctcctactgttacttcgacagttctgaagcgactgcagccccagaccacatatgatattacagttctaccaatttataagatgggagagggaaagcttagacaagggtcaggcacaaccgcgtccagattcaagagccctcgcaacctgaagacatctgaccctactatgtctagctttcgtgtaacctgggaaccagcacccggcgaggtgaaggggtataaggtgacatttcaccccactggagatgatagacgtttaggcgaactggtggtcgggccctacgacaatactgttgtccttgaagagctccgcgccggaaccacatacaaggtcaacgtgtttgggatgttcgatggtggtgagagcagtccacttgtgggtcaagagatgacaaccttgagtgatactacagtcatgccaattctatcctctgggatggagtgtcttacaagagccgaggccgatattgtgttgctcgttgacggaagttggtcaattggcagagcaaactttaggactgtgcggagttttatctcgagaatagtggaggtgtttgacataggccccaagagggttcagatcgctttggcccagtatagtggagatcctagaacagaatggcagctaaatgctcatagggataagaaaagcctgctacaggctgtcgcaaatttaccatataagggaggcaatactctgactggaatggcactgaatttcattcggcagcagaattttcggacacaggctgggatgcgacctagggctaggaaaatcggagtgcttattactgacgggaaaagccaagacgacgtcgaagcgccaagcaaaaagttaaaggatgaaggagtagaactgttcgcaatcggtattaagaacgctgatgaggtggagctgaagatgatagctaccgatcccgacgacacccatgcttacaatgtggcagactttgaaagcctgtcaagaattgtagatgatcttacaatcaatctttgcaacagcgtgaaaggacctggagatcttgaagccccaagcaatctagtgatctctgagcgcacccaccggagttttcgtgttagttggacgccaccttcagatagcgtcgatagatacaaggtagaatactacccggtgagcggtggaaaacgtcaggagttttatgtctcacgtatggaaacctcaacagtgcttaaggatctgaagcccgaaacagagtatgtggtgaacgtatacagtgtggtagaggatgagtactccgagcccttgaaaggtaccgagaaaaccctgcctgtgcccgtggtgagtcttaacatctacgatgttggacctacaactatgcatgttcagtggcaaccggtgggaggagctaccggatacatcctgagttacaaacctgtgaaagatactgagccaactcgtcccaaagaagttagacttggacccactgtgaacgacatgcagctgaccgatctggtacccaataccgaatatgccgtcacggtgcaagctgttctgcatgatctgacctccgaacccgtaactgtgcgcgaggtcaccctacccctaccccgcccgcaagacctgaaactgcgagacgtgactcactcgactatgaacgtgttctgggaacccgtgccgggtaaggtgcgcaagtacattgttcgctataagacaccagaggaagacgttaaggaagttgaagtcgatcgcagcgagacaagtacttccctgaaagacctgtttagccaaacattgtatacagtgtccgtgtcagccgttcatgatgaaggtgaatcccctcctgtgaccgcacaggaaacgacccgtcccgtaccagcaccgacaaatctgaagattacagaagttactagtgaaggctttagaggtacatgggatcacggcgcaagtgatgttagtctgtacagaatcacctgggctccctttggctccagcgacaagatggaaacaatattgaacggtgatgaaaacacccttgtgttcgagaatcttaaccctaacactatttacgaagtctcgattacagcaatttatcccgacgaaagcgagtctgatgacctgatcggatcggaacgaaccctgcccattcttacaacacaagcccctaaaagcggcccaagaaacctccaggtgtacaacgccacatcaaattcccttaccgtgaagtgggacccagcatcagggcgggtacagaaatatcggatcacataccagccctctacaggagaaggaaacgagcagactaccactataggtggccgtcaaaattccgtggtgctgcaaaaattgaagccagacacaccatacacgattactgtgagttctctatacccggatggcgaaggaggcaggatgacaggtcgaggaaaaacgaaaccactgaataccgtgcgcaatttaagggtgtatgatccttctacttccactctgaacgtgcgctgggatcacgctgaagggaacccgcgacagtacaaactgttttacgcccccgctgcaggaggccccgaagaacttgtaccaatccctggcaacactaattacgctatactccgaaatcttcagcctgacacgtcatacactgtaaccgtcgtgcctgtctatactgaaggggacgggggcaggacatccgataccggtaggacactgatgagaggcctggcccggaatgtccaggtgtacaatccgacacccaattcccttgacgtccggtgggatccggcacctggcccagtattgcagtacagagttgtatactcacccgttgatggaacaaggccctcggaaagtatcgttgttcccgggaatactagaatggtgcatttggagcgactcatccccgatacactctactcagttaacctggtcgcgttgtatagcgatggggaggggaacccatctccagctcaaggtcgaacactccctagatcaggtcccaggaatttgcgggtcttcggcgagacaacaaacagcttaagcgttgcctgggatcacgccgatgggccagtgcagcagtatcggataatatactcacccactgtaggagatcccatagacgaatacacaacagtccccggaagacgaaataacgtgatcctccagcctctgcagcccgataccccctataaaattactgttatcgcagtgtatgaagatggtgatggagggcatctgactggaaatgggagaactgtaggcctgttacccccccagaatatccatatctctgatgaatggtacactaggtttagagtttcatgggatccgagtccctcgcccgtgcttggctacaagatagtatacaagccagtgggcagcaacgaaccaatggaagcctttgtcggcgaaatgacttcctatactttgcataacctcaatccatctaccacatatgacgtgaatgtttatgcccagtacgatagcggactaagcgtgcctctaaccgatcagggaactaccctctacttaaatgtgactgacctgaaaacctatcagatcggatgggacaccttctgcgttaaatggtccccacatcgggcggccacctcatacaggctcaagctgtctcctgcagacggaacgagaggccaagagatcaccgttcgcggctcggaaacatcccactgttttactggattgagtcccgataccgactacggagtgacagtcttcgtgcaaactccaaacctcgaaggaccgggggtgagcgtgaaggaacacacaactgttaaacctaccgaagctccaactgaacctcccacacctcccccgccaccaaccatccctccagcaagagacgtgtgtaaaggtgccaaagctgacattgttttccttacagatgcttcttggtctattggagacgataacttcaacaaagtcgtcaagtttatctttaacacagtgggcggttttgacgaaatctctccagctggcatccaagtttcattcgtgcaatatagcgatgaagtgaaaagcgaatttaagttaaatacatacaacgacaaagcgctcgcccttggcgcgctgcagaacattagataccgaggcggtaatactagaactggaaaagcattgactttcatcaaggagaaagtgctcacgtgggagagtggaatgagaaagaacgtgccaaaggtcctcgttgtcgtgacagacggtagatcacaggatgaagtaaaaaaggctgctttggtgattcagcagtcaggcttcagtgtctttgtggtaggggtggccgacgtcgactacaatgagctagctaacatcgcgtcaaaaccgagtgaacgtcacgtgtttatcgtggacgattttgaatccttcgagaagatagaggacaatctaatcaccttcgtgtgtgagaccgcgacatcctcctgcccactgatatacctcgacggctacacttctccaggttttaaaatgcttgaagcatacaatctgacagaaaagaacttcgcttccgtccagggtgtgagcctagaaagcggatcctttccatcctactcagcatatcgcattcaaaaaaatgcattcgttaaccagcctacagcagacctgcaccccaacggcctgccaccctcatatacaatcatccttttgttccgattactccccgagacacccagtgacccatttgccatctggcaaatcactgatagagactacaagccgcaagttggtgttattgccgaccccagttccaagaccttatctttctttaacaaagacacccgaggcgaggtgcaaacagtgactttcgataccgaggaggtcaagactctattttacggctcatttcacaaagtccacatagtggtcacttcaaaaagtgtcaagatctatattgactgttatgaaatcatcgagaaggacatcaaagaagcagggaatattacaacggacggctacgagatactcggcaaattgctgaagggggagagaaaatcagcagcgtttcagatacagtcatttgacatcgtgtgctcacccgtgtggacatcccgcgatagatgctgcgacataccctcgaggcgggacgaaggaaagtgtccagctttcccaaattcatgcacttgtacccaggacagcgtcgggccgcccggtcccccagggccagcaggggggccaggagcaaagggtccaaggggggagagagggatttctggagcaattggaccaccgggcccccgaggcgacattgggccacctgggcctcaaggccctcccggtcctcaaggccctaacggactctccatacccggggagcagggaagacaaggaatgaagggagatgcgggcgagccagggctgccaggaagaacagggacccccggactccccggaccgcccggcccgatgggtcccccaggagacagagggttcaccggcaaagatggagctatgggcccgagaggtccgcccgggccccctggatctccgggttctcctggagtaacaggcccatctggcaaacctggcaaacccggcgatcacggaagacctggcccttctggcctcaagggggaaaagggtgacaggggtgatattgcttcccagaacatgatgcgagccgtggcccgccaggtgtgtgaacagttgatcagcgggcagatgaatagatttaaccaaatgctgaatcagatcccaaatgactatcagagctctagaaaccagcccggacctccaggtcctccaggacctcccggaagcgcaggagcacgcggggagcccggaccgggaggcagacccggatttcccgggactccaggcatgcaaggcccccccggcgagagaggtctgccaggagagaaaggtgagaggggaacagggtcttccggtcctaggggcctgccgggcccaccaggaccccagggcgaaagcaggacaggccccccgggcagcaccggatctagaggtcccccaggccccccaggcagaccgggcaattctggtattaggggcccacctggccccccaggctattgcgactcttcccagtgcgcaagtatcccttataatggacagggttacccaggcagcggctag

SEQ ID NO: 145704 - DNA, 5700 bp, Artificial Sequence
  derived and/or modified sequence
atgagatcccgcctgcctcccgcacttgccgctctgggtgctgcattgctgctctcctccatcgaagcagaaggaatggaatgtctgacccgcgccgaagccgacattgtactactggttgacggaagctggtctatcggccgcgctaacttccgtacggtccggtcattcatcagccgcattgtagaagttttcgacatcggtccaaagcgtgtccagattgcgctcgcccaatactcaggtgatccgaggaccgagtggcagctcaatgctcaccgcgacaagaagagcctcttacaagctgtggctaatttgccctacaagggcgggaatactctaactggtatggccttaaattttatccgccagcagaatttcagaacccaggcgggaatgcgcccacgcgcacgaaaaatcggggtgttgatcacagacggtaaatcacaggatgacgtggaagctcctagtaagaaactgaaggatgagggcgttgaactgttcgctattgggattaaaaacgccgacgaggtcgagctgaagatgatcgcaacagacccagacgacacacacgcatataacgtagcagatttcgagtccctgagcagaatagtggatgacctcacgatcaacctgtgtaactctgtgaaggggcccggagatctcgaggctcctagtaatctggtgatctctgaacggactcataggtccttccgggtgtcttggacacctccttctgacagcgtggatcgatacaaagttgaatattatcctgtgagcggtggtaaaagacaagagttttacgttagccgcatggagaccagcaccgtgctcaaagaccttaaacctgaaaccgaatatgtcgtaaatgtttattccgtggtggaagacgaatatagcgaacctttgaaaggaactgagaaaacactgccagtgcccgtggttagtctgaatatttatgacgttggccctaccactatgcacgtccaatggcaacctgtagggggcgccaccggctacatcctctcatataagcccgtgaaggatacagagcccacccgacctaaagaagtacgactaggccccacagttaatgatatgcagctgacagacctcgtgcccaataccgagtacgccgtcactgtgcaggctgtgctgcatgatctaacaagcgagccagttaccgtgagagaagtcacactgccattgcccagaccccaggatctgaaactacgcgacgtgacgcattctaccatgaatgtcttttgggaacccgtccctggtaaagttcgcaagtacatcgtgagatacaagaccccggaggaagatgtgaaggaagtggaggtcgacagatccgagactagcactagcctaaaagacctcttctcgcagacattgtatactgtgtcagtgtccgctgtgcacgatgaaggtgagagtccccccgtgacagcccaagaaaccaccagacccgtgcccgcgcctaccaatttaaagatcacggaggtgacctccgagggctttcgggggacgtgggatcacggcgcttctgacgtgtcgttataccgaatcacctgggccccctttggatcttcggataaaatggaaacaattctgaacggcgacgagaataccctggtctttgaaaatctgaaccccaatacaatctacgaagtttcaattactgctatttaccctgatgagtctgagtccgacgatctcataggctcagagaggacgctccccatcctgaccacccaggcccccaaatctggaccacgtaatttacaagtgtataatgcgacaagcaacagcctcacggtgaaatgggaccccgccagcgggcgcgttcaaaaatacagaatcacataccagccgagcacaggggaaggcaatgaacagacaacgaccattggcggccggcaaaactctgttgttttacagaaactgaagcccgataccccgtataccataacagtctctagtttatatcccgacggagagggcggaagaatgacaggaaggggtaagactaaaccactgaataccgtcagaaatctcagggtctacgacccttctacatccaccttgaatgtcagatgggaccatgctgaaggaaaccctcgacagtataaactgttctatgcaccagcagctggtggcccagaggagcttgtgccaataccaggcaacactaattacgccattctgaggaatctccagcccgacacctcttacacagttacagttgtccctgtttacaccgaaggtgatggcggccgaacaagtgataccggaaggaccttaatgagaggacttgctagaaacgtccaagtgtataaccccacccctaactctctggatgttcgttgggaccccgcaccaggtcctgtgctgcagtatcgagtagtgtacagtcctgttgatggaacccgaccttctgagtctattgtggttcctgggaataccagaatggttcacctggagcggctcattccggatacattgtatagtgtaaatttagtcgccctgtattccgacggcgaaggaaatccatctccagctcagggacgaacattgcccaggtctggcccccggaacttgagagtcttcggcgaaacaactaatagcctgtccgtggcttgggaccacgcagatggtccagtgcagcaatatcgcataatttactctcccacagtgggcgacccgatcgacgagtacactaccgtgcccggcaggaggaataatgtcatactgcaacccttacaaccggacacaccatacaaaatcacagtaattgccgtgtatgaagacggagatgggggacacctgacaggaaatggcaggactgtgggccttctgcccccacagaacatccatatctcagatgaatggtacaccaggttccgagtgagttgggatccctctccaagtcccgtccttggctataagatagtctataaacccgtcggaagcaacgaacctatggaggcctttgtcggcgaaatgacttcatacactctacataatctaaacccatccaccacctatgacgtcaacgtgtatgcccagtacgattccggcctttccgtgcctttgacagaccaggggaccacattgtacctcaatgtcaccgatctaaaaacctatcagatagggtgggataccttttgcgtgaagtggtcccctcaccgcgctgccacatcttatcgactgaagctatcgcctgccgacggtaccagaggacaagagataaccgttaggggatccgaaacttcacattgcttcacaggcctatctcccgataccgattatggtgtgactgtttttgtacagaccccaaatcttgaaggccctggcgtaagcgtgaaagaacacacaaccgttaaaccaaccgaagcaccaactgaacctcccactccaccgccacctcctaccatacctccagctcgcgacgtgtgcaagggcgccaaagctgatatagtttttctgaccgatgcgtcctggtctatcggcgacgacaacttcaataaggtcgtaaaatttatctttaataccgtgggcggctttgacgagatcagccccgccgggatccaggtcagcttcgtacagtattcggacgaagtgaaaagtgagtttaagttaaacacatacaacgataaggccctggctttaggagctcttcagaatatccgatacagagggggaaacacacgtactggaaaggccttgacttttatcaaggaaaaggtgctgacgtgggagagtgggatgagaaaaaatgtccctaaggttttggtggttgtgactgacggtaggagtcaagatgaagtaaaaaaagcagctctggtcatacagcaatctgggttctcagtgttcgtggttggggtcgctgacgtggactacaatgagcttgcaaacatcgcctctaaaccctccgaaagacacgtcttcatcgttgacgatttcgaatccttcgaaaagattgaagataatctgattacattcgtttgcgaaactgcaacaagctcatgtcctctgatctatttggatgggtacacctctcccggtttcaaaatgttagaagcatacaatctgaccgaaaaaaacttcgcctcagtgcagggcgtctctttagagtcaggctcattcccatcttactccgcatatcgcattcagaagaatgcgttcgtaaaccagcctacggctgatttgcatccaaacggactaccgcctagttataccataattctactgtttaggctactacccgagaccccgtctgacccttttgccatctggcagataacagatcgagattataagcctcaggtcggagtgattgctgatccatctagtaaaacattaagcttttttaacaaggacacccgcggagaagtgcagactgtaacattcgacaccgaagaggtgaagacattgttctacgggtcctttcataaagtgcacattgtagtaacatcaaaatccgtcaaaatctacatagattgctacgagattattgaaaaagacatcaaagaagccgggaatataacgacagatggatacgagatcctgggaaagttactgaagggcgagagaaagagcgcagccttccagattcagtcattcgatatcgtgtgttctccagtgtggaccagtagagaccgatgttgcgatattccctccagacgcgacgaagggaagtgtcccgcattcccgaactcttgcacctgtacacaagattcggtcggccctccgggacccccaggacctgcaggcggaccgggagccaagggccccagaggggagagaggcatctccggagctataggtcctccaggacccaggggtgatatcggccccccaggaccacaaggcccacccggaccacaaggccccaacggactaagtataccaggtgaacagggcaggcagggaatgaaaggagatgcgggcgaacctggactgcctggacgtaccgggaccccaggcctgccgggaccaccaggccctatggggccccccggagaccgcggctttaccggtaaggacggcgcaatgggacctcgtggcccccccggtcctccaggatccccaggcagcccaggcgtaacgggaccttctgggaagcccggcaagcccggtgaccacggcagacctggaccatccggactcaaaggtgagaaaggcgataggggagacatcgcgtctcagaatatgatgcgagcagttgccagacaggtatgcgaacaattaatctccggccagatgaacaggttcaaccaaatgttaaatcagattcccaatgactatcagtccagcagaaaccagccgggaccacccggcccacccggaccacccggcagtgcaggggctaggggcgaacccggccccggaggtcgtcctgggttcccaggtacgccaggcatgcagggaccgcccggcgaacgtggacttcctggcgagaagggtgaaagaggaacaggatccagcgggcccagaggtctcccaggaccacctggaccccaaggcgagtcgcgtaccggacccccgggatctaccggatctaggggcccaccaggtccacccggcagaccgggaaactctggcattagaggccccccaggcccgcccggttattgtgacagcagtcaatgcgcttctatcccctacaacggtcaggggtatcctggatcaggatag

SEQ ID NO: 145705 - DNA, 8964 bp, Artificial Sequence
  derived and/or modified sequence
atgagatcaagactcccccctgccctagccgccttgggtgcagccctactgttgagtagtatcgaagctgaagtagatccaccgagcgacctaaactttaaaattattgacgagaatacagtgcacatgtcatgggctaaaccagttgatcctatcgtgggttacagaatcactgtagacccaactactgacggaccaactaaggaattcacactatcagcctctacaacagagacactcctcagcgaactggtccccgaaactgaatacgtagtgactatcacttcctacgacgaagtggaagaatctgtgcctgttataggacaactcacaattcagaccgggtcatcaacaaaacccgtggaaaaaaaacctggaaaaaccgagatccaaaagtgttccgtctcagcctggacagacctggttttcttggtagatggcagctggtcagtcggacgcaacaattttaaatatattctcgactttattgcagcccttgtgagcgccttcgacatcggagaagagaagacacgtgttggagtcgttcagtattcctctgacacacgcactgaattcaacctaaatcagtactatcagagggacgagcttctcgcggcaattaagaagataccttacaagggtgggaatacgatgactggcgacgccatagattacctagtcaaaaatacattcacagagtctgccggagcacgggtcggctttcccaaagtggctattattattacggatggcaaatcgcaggacgaagttgaaattcctgcacgcgagctcagaaacgtcggcgtggaagtgttttctctcggtatcaaagcggctgacgccaaggaactaaagcagatcgcctcaacaccttcactaaatcatgtattcaatgtggctaatttcgatgccatagtagatatacaaaatgagattatctctcaggtatgctcgggggtagatgagcagctgggcgagcttgtgtcaggcgaagaagtagtggaaccaccctctaacctgatcgctatggaagtaagcagcaagtatgtgaaactcaactggaacccatctccctcaccagtgacaggatacaaagttatactgacaccaatgactgccggatcccgtcagcacgcactttccgtggggccccagacaacaacactttcggtgcgggatctgtcagccgatacagaatatcagatatctgtcagcgctatgaagggaatgaccagttccgaacccattagcatcatggagaagacccagcccatgaaagtccaggtagagtgttcgcgaggggttgacatcaaagctgatatagtctttctggttgacggctcctatagcatcggcattgctaacttcgtcaaggtgagggcatttcttgaagttctggtgaaatcctttgaaatctcacctaaccgcgtgcaaatttctttagtccagtactctagggacccacataccgaattcacactaaaaaagtttaccaaagtagaggatatcatcgaggctatcaacaccttcccctatagaggcggatctactaacaccggtaaggcaatgacgtacgtgcgagaaaagatttttgttcctagcaagggatcccgtagcaatgtgcctaaagtgatgatcctgattacagacggcaaatcatccgatgcattccgcgatcctgccattaaactgaggaattcagatgtcgaaatatttgcagtaggggtcaaagacgcagtgaggtccgaattggaggccatcgcttcaccgcccgctgagacccatgtatttacagtggaagatttcgatgccttccaaagaatttcctttgagcttactcagtccatctgcttacggatcgaacaggagctcgccgccatcaaaaaaaaagcttatgtgccacccaaagatctttccttctccgaagtcacgtcatatgggtttaagactaactggtcccctgcgggtgagaatgtttttagttaccatatcacatataaggaagcagccggagacgatgaagtgaccgtggttgagccggcctcatcgacgtccgtcgtactgtccagtctgaagcccgaaacactgtatctcgtgaacgtcaccgcagagtacgaggacggattctcaatacccctcgccggagaagaaactactgaggaggtgaagggcgcgcctaggaatttgaaagttaccgacgagacgaccgactcatttaagattacgtggacccaggcacccgggagagtacttagatacagaatcatatataggcctgtagctggaggcgaaagtcgcgaggtaaccacacccccaaatcagcgacgccgcactctcgaaaaccttatccccgatacaaagtacgaagtaagtgtaatcccagaatatttttctggaccgggtacaccgttaactggaaatgcagccactgaggaagtcaggggtaacccacgcgacctacgggtgtctgatcctactacttcaactatgaagctgtcctggagcggcgctcctggcaaagtgaaacaatacctcgttacatacacccccgttgcaggcggcgagacccaagaggtgacggtcagaggagatactactaacaccgtgctgcagggcctcaaggaaggcacacaatacgctctgtcggttactgctctgtacgcctcgggtgcaggtgacgccctgttcggcgaaggcaccacactggaagaacgcggctcccctcaggacttagtgaccaaggacataactgacacaagcataggagcctactggactagcgctcccggaatggtaaggggctaccgtgtaagttggaaaagtctgtacgatgatgtggacaccggtgaaaagaacctccccgaggatgcgattcataccatgatcgagaacctgcagcccgaaaccaaatatcgaatcagcgtgtttgccacgtactcttcaggagaaggtgagccactaacaggcgacgccactactgagctgtctcaggactctaaaactctaaaggtcgatgaagaaactgagaataccatgcgggtcacttggaaaccagccccaggaaaggttgtgaactatagggtggtatatcgtccccacggccgcgggaagcaaatggtcgcaaaggttcctccgacggtaacaagcactgtgttaaaacgcctacagcctcaaaccacatatgacattaccgtactcccaatttacaaaatgggtgaaggcaagttgagacaagggtctggcactaccgcctctagattcaagtcccctcgaaatctgaaaacctccgacccaaccatgtcttcatttcgcgtaacatgggagccggcgcccggcgaggtcaagggctataaagttacctttcatcccacaggagacgaccgacggctcggagaactcgtggtgggaccctatgacaacacagtggtgctggaagaactgcgcgcaggaaccacatacaaggtgaacgtcttcggtatgtttgacgggggagaatccagcccgctagtgggccaagagatgacgactttaagcgataccacggttatgccaattctttcttcaggcatggaatgccttacgagggccgaagcggacatcgtcctcctcgttgacggatcatggtccatcgggagagccaactttagaactgtgcgctccttcatctctcgaatcgtggaagtcttcgatattggaccaaaacgtgtgcagatcgccctcgcacagtattcaggtgaccctagaactgaatggcaactgaacgcccaccgtgataaaaaatctctactgcaggccgttgctaatctgccttacaaaggcggaaacacattgacaggtatggcactcaacttcatccgccaacagaacttccggacacaagctggcatgcggcctagggctcgtaagattggagttctgattactgacggcaaaagccaggacgacgtagaagccccctccaaaaaacttaaagatgaaggagtcgaactcttcgcgatcgggatcaagaatgctgatgaggttgaactcaaaatgatcgctactgaccctgacgatactcatgcttataacgttgccgattttgaaagcttgtctcgcattgtcgacgatctaactataaatctatgcaactcagtgaaagggcctggggatctggaagccccttccaatctcgttatctctgaaagaacccaccgctcgttcagagtgagctggacacccccaagtgacagcgtagacagatataaggtcgaatattatccagtgtcaggaggaaagcggcaggagttctatgtgagcaggatggagactagcaccgtgttgaaggatctaaagccagaaaccgaatacgtggtgaacgtatactctgtggtggaagatgaatattctgaacctctgaaaggaactgaaaaaacgttgcccgttcctgtcgtgtccctgaacatctatgacgtgggcccaactacaatgcacgtccagtggcagcctgtggggggggcgaccggatatattctgtcatacaagcctgttaaagataccgagccaacacgccccaaagaggtgcggctcggtccaaccgtaaatgatatgcagctgaccgacctagtacccaataccgaatacgcagttaccgtccaggccgttttgcatgacttgaccagtgagccagtgaccgtccgtgaagttactcttcctctgcccagaccacaggaccttaagctgcgagacgtgacacacagtaccatgaatgtgttctgggaacctgtgccaggtaaagttcgaaaatatattgtccgatacaagactcctgaagaagatgtgaaggaagttgaggttgacagaagcgagacaagtacctccttgaaagacttattttcccagacgttatacacagttagtgtctccgctgttcacgacgaaggagaatcacccccagtgactgcacaggaaacaactaggccagtaccagcaccaactaacctcaaaatcaccgaagtcactagcgaggggttccggggtacgtgggaccatggggcttctgatgtcagcttatataggatcacatgggccccattcggaagcagcgataagatggagaccatattaaacggcgacgagaacaccttggtgttcgaaaatctgaatccaaacaccatttatgaggtgtccattacagccatatacccagatgagtctgagagtgatgacttaattgggtcagagagaactttaccaattctcaccacccaagccccaaagagcggcccacgcaatttacaggtctataacgcaacatctaactccctcacagtgaaatgggatccagccagcggaagagtccagaagtatcgaattacataccagcctagtaccggagaaggcaacgagcagaccacaactatcgggggcagacagaactccgtcgtcctacagaaattaaagccagacacaccttacactatcactgtttcttccctatatccagacggcgagggcggcagaatgacagggcgaggtaaaaccaagccactcaacaccgtccgaaatctgagagtttacgacccaagtaccagtaccctgaacgtcagatgggatcatgctgaagggaacccgaggcaatacaagttgttttatgcgcctgccgccggaggtcccgaggagttagtgccaatcccgggtaacactaattacgctatcctgcgaaacctccagcctgacacttcctacaccgtcactgtggtgccagtgtacactgagggcgacgggggcagaactagtgataccggccgcacgcttatgaggggcttggccagaaacgtacaagtctacaatcctacaccaaattccctagacgtgaggtgggaccccgcccctggacctgttctgcagtatagagtggtttatagcccggtggatggcaccagaccctcagaaagtatcgttgtccccggtaacacccgcatggtccatctggagagactcattcccgacacgctgtacagcgtgaatctggtagcgctgtattccgacggagaagggaaccccagtccagcccaggggagaacattaccccggtccgggccccgcaacctgagagtctttggggaaaccactaattcgttgtcagtcgcctgggaccatgccgatgggccagttcagcagtacagaatcatttattcaccaaccgtgggcgatcctattgatgagtacactacagtccccggacgcaggaataatgttatcttacagcccctacagcctgataccccctacaaaatcaccgtaattgccgtatacgaagacggtgacgggggccatctcaccggcaatggcagaaccgtgggcttacttcctccccagaacattcacatctcagacgagtggtacacacgctttcgagtctcttgggaccccagtccttcccccgtgttaggatataagattgtgtacaagccagtgggcagcaatgagccaatggaggccttcgtaggggaaatgacctcatacaccctccacaatctgaatccatctaccacatacgacgtcaacgtgtacgcccagtacgattctgggttgtcagtccctttgaccgaccagggcactactctttatcttaatgtgaccgacttgaagacatatcaaattggctgggatacattttgcgtaaagtggagtccacacagagcagcgacctcttacagattaaagctgtctcctgcagatggaacacgcggacaggagattacagtgagaggatcagaaactagccattgcttcactggcctcagccctgatactgactacggtgtgacggtatttgtccaaaccccaaacctcgagggtcctggagtatcagtcaaagagcataccaccgttaaaccgacagaagcgcctacagagccccctacacctcccccgccacccaccatccctcccgcccgcgacgtgtgtaaaggcgccaaggccgatatagtttttttgaccgatgctagctggagcattggggatgacaattttaataaggtggttaagtttattttcaataccgtgggtggttttgacgaaatttctcccgctggcattcaggtttcatttgtccagtacagtgacgaggtcaagtccgagtttaagctcaacacctacaatgataaagccctcgcattgggcgctctccagaacatcagatatagaggaggaaacacaagaacaggtaaagcactgacctttattaaggaaaaagtacttacatgggagagtgggatgaggaaaaatgtacccaaagtgctagtggtggtcacggacggtagatcacaggacgaagttaagaaagccgcactcgttattcaacaatcagggtttagtgtctttgtagtgggcgtggccgatgtggattacaacgaactggccaatatcgccagtaagccctcagaacgtcacgtctttatcgtggatgattttgaatcattcgagaagatcgaggataatttaattacgttcgtgtgtgagaccgccacaagtagttgcccactcatttacctcgacggctatacgtcaccaggctttaaaatgttagaggcttacaatctgacagaaaaaaattttgcttctgtgcagggagtctcactcgaatcaggctcgtttccatcttattctgcttaccgcatacaaaaaaatgcatttgtgaatcaaccaaccgccgatctgcaccccaacggtcttcctccctcctacacgatcatcctgctcttccgcctgttacccgaaaccccttcggatccttttgctatctggcaaatcacagaccgtgactataagccgcaggtaggcgtgatcgccgacccatctagcaaaacattaagttttttcaacaaggatactcgaggagaagttcaaacagtaactttcgatacagaggaggtcaagacccttttctacggcagcttccataaacgcgatgaaggcaagtgtccagcctttccgaacagttgcacatgcacacaagactctgttggtcctccgggtcctcctggtcctgccggcgggccgggtgccaagggtccaagaggcgaacgtggcatatccggtgctattggcccgccaggaccgcggggagatatcggccccccaggacctcaaggacctccaggaccccaagggcctaacggactatctatcccgggtgagcagggcagacagggcatgaaaggtgacgctggagagcctggacttccagggcgcacaggtacaccgggcctccctggtccaccagggcctatgggtcctcctggcgaccgcgggttcacagggaaggatggcgctatgggaccccgcgggcctcccgggccgcccggctcacccggctccccaggcgtgactggcccaagtggcaaaccaggtaagcccggagatcatggcagaccaggaccgtcaggcctcaagggggaaaaaggtgaccggggagacattgcctctcagaatatgatgagggctgttgccagacaagtgtgcgaacagctcattagtggacaaatgaatcggtttaatcagatgctgaatcagatccccaacgactatcaatccagtagaaatcagcctggcccccccggcccacccggacctcccggctccgcaggtgcacgaggggaacccggccctggcggacgcccaggtttcccaggaacccccggcatgcagggcccccccggcgaacgcggccttccaggggagaaaggggagcgcggcactggaagttcaggaccaagaggcctgcctggacccccaggtccacaaggcgaatcacggacaggtccacccggaagtacaggctctagaggccctccaggaccacccggtcggcctgggaacagcgggatcagaggcccccccggaccgccaggatactgcgactcttctcaatgtgccagtatcccatataatggccaagggtaccccggatcgggttag

SEQ ID NO: 145706 - RNA, 9192 nt, Artificial Sequence
  derived and/or modified sequence
augcgcagcaggcugcccccugcacucgcagcccuuggcgcagcacugcuccuguccucaauugaggcagaagucgaucccccaagugaccuuaauuucaagaucauugaugagaacacagugcauaugucuugggcaaagccaguggauccaauugugggcuaccguauuaccguggaucccacuaccgauggacccaccaaggaguuuacacucagcgccucuaccacggaaacccucuuaagugagcuggugcccgagaccgaauaugucgugacgaucacaucauacgaugagguggaggaaaguguccccgucaucggccaauuaacuauucagacugggucuagcaccaagccaguggagaagaaaccagggaagacugagauacaaaaaugcagugucagcgcuuggacugauuuaguguuccuugucgacgggaguuggucugucgguagaaacaacuuuaaguacaucuuggacuucaucgccgcccuaguaagcgcuuuugauaucggcgaagagaagacucgagugggugucgugcaguacagcuccgacacuagaaccgaguucaaccuuaaccaguacuaucagcgggacgaguugcuggcggccauaaagaagauccccuacaagggggguaauacaaugacgggcgaugcaauugauuauuuagucaaaaauacguuuacagaauccgcuggggcccggguagguuucccgaaagucgcaauaauuauuacagacggcaaaagccaggaugaaguggaaauuccugcgagggaauugaggaacguggguguugagguguucucacuggggaucaaagccgcagacgccaaagagcucaaacaaauagccaguacgccuucauugaaccacguguuuaauguagcaaauuuugaugccaucguagacauacagaaugaaauuaucagucaggucugcuccgggguggaugagcaacugggcgagcuggugucaggcgaggaggucgucgagcccccuagcaacuugaucgccauggaggucuccagcaaauaugugaagcucaauuggaacccaucccccuccccugucacuggcuauaaggucauacugacuccaaugacagcagguucgagacagcacgcacuauccgucgguccacaaacgacaacgcugucggugagggauuuguccgcugauaccgaauaccagaucucaguguccgcaaugaaggguaugacgaguagcgaaccuaucagcauaauggaaaaaacacaacccaugaaggugcaagucgaaugcuccaggggcguggauauaaaagcugauaucgucuuucucguggauggcuccuacucgauuggaauagcuaauuucguuaaagugagagcauuucuggaggugcuugugaagagcuucgagauaagcccaaacagggugcagaucucucuuguccaauauagccgcgauccacacaccgaguuuacccugaagaaguuuaccaagguagaagacaucaucgaggccaucaauaccuuuccuuacagggguggaagcaccaacacuggaaaagcaaugacauacguaagagagaagauuuucguacccucaaaaggcagccgguccaacgugccuaaagugaugauucuuaucacugauggaaaaagcucugaugccuuuagggacccagccauuaaguuacggaacucugauguggagaucuucgcagucggcgucaaggacgccguaaggucggaauuagaggcgauagcuuccccacccgccgaaacccauguguucacuguggaggacuucgaugccuuucagcguauuucauuugaauugacacagagcauaugucuuagaauugagcaagaacucgcugcaauaaaaaagaaagcuuacgugccuccaaaagacuugucauuuagugaggugacaagcuacggguuuaagacgaacuggucucccgccggcgagaauguguuuuccuaccacaucacauauaaggaggcugcaggagaugacgagguaacugucgucgagcccgcaagcuccacgucagucguguuaucuucacucaaaccagaaacucuguauuugguuaacgugacugccgaauaugaggacggcuuuucaauaccccuggcuggcgaagaaacaacagaagaggugaagggcgccccuagaaaucucaaagugacugaugagaccacggauuccuucaaaaucacauggacccaggcaccgggcagagugcucagguaucgaauuauuuaucgaccaguggcaggcggugaauccagagaggucaccacaccucccaaccagaggagaagaacacucgaaaaccugaucccugauacgaaguacgaagugagugugauccccgaauacuuuucggguccagguacccccuugacaggaaaugcggcaaccgaggaagucagaggcaauccccgcgauuuacguguuagcgacccaaccacgaguacuaugaaguuaaguuggagcggugcgcccggcaaggugaagcaguaucugguuacguacacccccguggcuggcggugaaacccaagaggugaccguaagaggagauacaacaaauacgguguugcaggggcugaaggaggguacacaguacgcucucagugugacagcccucuaugcaucuggggccggcgacgcucucuuuggggaagggaccaccuuggaggaacgcgguucaccacaggaccucgucacaaaggauaucacggacacuagcaucggggccuacuggaccucagccccugggauggugcgaggauaucgcguuucauggaagagccuguacgaugacguugacaccggggagaagaaccuuccagaagacgcaauccacacaaugauugagaaccugcagccggagacaaaguaccgaauuuccguuuucgcaacuuacagcagcggcgagggagagcccuuaaccggggacgcuacgacugaacugagucaggauucuaagacacugaagguggacgaagaaacagaaaacaccaugagggugacauggaaaccagcgccaggaaaggugguuaauuaucgcguggucuacagaccccaugggagaggcaagcagaugguugcaaaggugccgccaaccgucacaagcacugugcugaagagguuacagccgcagaccacauaugacauuaccgugcuccccauuuacaaaaugggggagggaaaacuacggcagggguccgggacaaccgccagcagguuuaaaucuccaaggaacuugaaaaccuccgauccuacaaugucauccuuccgagucaccugggagcccgccccgggagaggugaaaggcuacaaagucaccuuucacccuacaggggaugauaggcggcugggcgagcuuguggugggaccuuacgacaauacugugguccuggaagaacuccgggccgggacuacguacaaggucaacguguucggcauguuugaugguggcgagaguagcccacuggucggccaggaaaugacuacgcucagugauaccaccguaaugcccauccuauccagcgggauggagugucucaccagggccgaggccgauauagucuuauuaguggacgguucauggagcauaggccgggccaauuucaggacugucagguccuucauaucccgcauuguugagguguuugacaucggcccuaagcgagugcagauugcauuggcccaauauagcggggacccaagaacagaauggcagcugaaugcccauagggauaaaaagucccugcugcaggcuguggcaaaccucccuuauaagggcggaaauacccuuaccggcauggcgcugaauuuuauuaggcaacagaauuuccgaacucaggccggaaugaggccucgggcucgaaagauuggaguguugauuacagacggaaagucccaggacgacguggaagcuccuagcaagaaauugaaggacgaaggcguggagcuguucgcaauuggcauuaagaaugccgacgaaguagagcuaaaaaugauagccacugaccccgaugauacccaugcguacaacguagcggacuuugaaucuuuaucacggaucguggaugaccugacaaucaaucucugcaacagcgugaagggacccggcgaccuggaggccccgucaaauuuggucauuucugagcggacccauagauccuuucgggugagcuggacuccccccuccgauuccguggaucgguauaaaguggaauauuacccugugucggggggcaagaggcaggaguuuuacguuucuagaauggagacaagcacagugcugaaggaccucaagcccgagacagaauaugucgucaacguguacagcgucguggaggacgaguauagugagccccugaaggguaccgaaaaaacccucccgguuccuguugugucguugaacaucuaugacgucggacccacaaccaugcacguacaguggcagcccguugggggugcaacaggcuauauucuuucauacaagccggugaaggacacagagccuacuaggccuaaagagguccgacugggcccaacagugaacgauaugcaacugacagaccuggugccgaacacagaguaugccgugacggugcaggcugugcuucaugaucuuacuucugaaccagugacuguacgggaagugacacuuccucugcccagaccccaggaucugaagcugcgugaugugacccacaguacgaugaacguuuuuugggagccugucccuggaaaagugcggaaauacaucgugcgauacaagacuccugaagaagauguuaaggaggucgagguagauagaagugagacuucaacuucccucaaagaccuguuuagccaaacuuuguacaccgucuccguaagcgccguccaugaugagggggaguccccccccgugacagcucaagaaacgacucguccgguuccggccccaacuaacuugaagaucacugaaguaacuagcgaaggguuucgcgguacaugggaccacggagcaucugacgugucucuuuauaggaucacaugggccccauuugguucaagcgauaagauggaaaccauucuaaacggcgaugaaaauacucuuguguucgaaaaccuuaacccgaacacuauauacgaggugucuauuacugcuauuuaucccgaugaguccgaauccgacgaucugaucggcucagaaagaacauuaccgaucuugacaacccaggccccaaaauccggccccagaaaccugcaaguauacaacgccacaagcaacuccuugacagucaagugggaccccgcuucuggacggguccagaaguauagaauuacuuaucagccaagcaccggcgaaggcaacgaacagacaacuaccauuggggguagacagaacucgguagugcugcaaaaacugaagcccgauacacccuauacuauuacagucagcucacuguaccccgauggggagggagggcggaugaccggaagggggaagacaaagccacugaauaccgugcgcaaucugagaguguacgaucccuccacuaguacccuuaaugugcggugggaccaugcagaaggaaaucccaggcaguacaaacucuucuacgcucccgcagccgggggaccagaggagcugguuccuaucccagggaauaccaauuaugcaauccugcggaaccugcagccagacacuucauacacaguuaccguagugccugucuacaccgagggagacggcggacgcacgucugauacggggaggacucucaugcgaggccuggcccgaaacguucaggucuacaaccccacaccaaacucauuggaugugagaugggaucccgcccccgggccaguucuccaguaccgggugguuuacagcccuguugauggaaccaggccaagcgaauccaucgucgugccagguaacaccagaaugguucaccuggaaagguugauaccugauacccuguacucaguuaaccucgucgcacuuuauagcgacggggaaggcaacccaucuccagcccagggaagaacacugccacgaagcgggccacggaauuuacguguauuuggcgagacuacuaauucucugucagucgcuugggaucaugcagacggccccguccaacaguaccggauuauauauagcccgacugugggagauccuaucgacgaguauacaaccgugccuggucgccggaauaacgugauccugcagccccuacagcccgacacaccuuauaagaucacagucaucgccguguaugaggacggggacggcggucaccugacuggaaaugguagaaccguuggccuucugccaccucaaaacauccacauuuccgaugagugguacacaagauucagaguguccugggauccguccccuagcccagugcuggguuauaagaucguuuacaagccaguuggcuccaacgaacccauggaagccuucguuggagaaaugaccucauauacccugcauaaucucaaccccucuacuacauacgacgucaaugucuaugcacaguacgacuccggacugucuguuccucuaacugaccagggcacaacguuguaucucaauguuacugaccugaaaaccuaccagauuggaugggauacauucugcgugaagugguccccucaccgggcugcuaccagcuacagacugaagcucuccccugcagacggcacucgcggucaggagaucaccguaagaggcucggaaacaagucauugcuucacaggacugucaccagauacugacuauggagucaccgucuucguccagaccccaaacuuagagggucccggagugucugugaaagaacauaccaccgugaaaccuaccgaggccccgaccgagccccccacacccccuccaccaccaaccauuccuccugcucgcgaugugugcaagggugcaaaggcugacaucguuuucuugacagacgccuccuggagcauuggcgacgauaauuuuaacaaaguggugaaauucaucuucaacaccgugggugguuucgaugaaauuagcccagcugggauucaagugaguuuugugcaguacuccgacgaagugaaguccgaguucaaacucaacaccuacaacgacaaggcuuuggcgcugggcgcucuccagaacauaagauauagagguggcaacacaagaacuggcaaagcucugacguuuauuaaagagaaggugcugacuugggagucaggaaugcgcaagaacgugccuaagguucuugugguugucacugauggaaggucccaggaugaggugaagaaggccgcacuagucauacagcagaguggcuucucuguguuugugguagguguagcagauguugauuauaaugagcuugcgaauauugcguccaaaccuuccgaaagacacguguuuaucgucgaugauuuugaaucuuucgaaaagauugaggauaaccuuauuacauuugugugugagacagcaaccaguaguugcccacucauuuaccucgaugguuauacaaguccgggguuuaagaugcuggaagccuauaaccuaaccgagaagaacuucgccucuguucaaggcgugucucuggaauccgggagcuuccccaguuauagugcuuaccgcauccaaaagaaugcauucgugaaccagccuaccgccgaccuccauccaaacggccucccuccaagcuacacuaucauccugcuguucaggcugcugccugaaacuccuucagaucccuucgcaauuuggcagauuaccgacagagauuacaagccacagguaggugugauugccgaccccagcucaaaaacccugaguuuuuucaauaaagacacuaggggcgaagugcaaaccgucaccuucgacacagaagaaguuaaaacacuauuuuacggcucuuuccacaagguccauauugucgugaccucuaagagugucaagauuuauauugauuguuacgaaauuaucgagaaggacauuaaggaggcuggaaauaucaccaccgacggguaugagauucucgggaagcuauuaaagggcgaacguaaaucagcagccuuucagauccagagcuuugauauuguaugcagccccguguggacuagcagggaccgcugcugugauauuccaucuagacgcgacgagggaaagugcccugcuuucccuaacagcuguacuuguacgcaggauucuguugggccuccagggccuccugggccagcuggcggucccggggcuaaggggcccaggggggagcggggcaucagcggcgcuaucgguccaccuggcccacggggggacaucgggccaccggggccccagggcccaccaggcccucaaggaccaaaugggcucaguaucccaggcgagcagggcagacaggggaugaaaggggaugccggcgagccagggcucccuggucgcacugggacgcccggucucccagguccuccuggaccaaugggcccuccuggcgaccgaggauuuacaggcaaggauggcgccaugggcccucgaggcccccccgguccacccgggucacccgggucucccgguguuacgggucccucaggaaagcccgggaaaccaggcgaucacgggaggccagggccaucaggccugaaaggcgagaagggcgaccguggagauaucgccucucagaauaugaugagggccguugcccggcaggugugugagcagcuaaucucuggacagaugaauagauuuaaucagaugcucaaccagauuccuaaugacuaccagaguaguagaaaucagccaggacccccagggccaccuggccccccugggagcgcgggagcucggggugagccagguccugggggccgcccugguuucccuggcaccccaggcaugcagggaccgccuggagagcgcggucugccuggugaaaagggcgagcgcggcacaggaucuagcggaccgcggggauugcccggaccucccgggccacagggagagagucguacgggaccaccaggaagcacaggaagcagagggcccccugguccuccugggcgaccaggcaacuccgggauacgcggucccccugguccaccuggcuauugcgauucuagucaaugcgccucuauccccuauaauggucaggguuacccaggcucuggcuag

SEQ ID NO: 145707 - RNA, 5700 nt, Artificial Sequence
  derived and/or modified sequence
augaggucucgacugccucccgcccuugccgcuuugggcgccgccuuguugcugucgagcauugaggcagagggaauggagugucucacccgugccgaggcugacauugugcuccuggucgaugggucauggagcauaggucgggccaacuuccggacugugcgguccuuuaucucgcggaucgucgaaguguucgauauuggccccaagagggugcagauagcuuuggcucaguacaguggugauccuaggaccgaauggcaauugaaugcccaucgagauaaaaaaagccucuugcaggcaguugccaaccugccauacaagggugguaauacacucacuggaauggcccugaauuucauucggcagcagaacuuuagaacccaggcaggcaugcguccucgugcccggaaaauaggggugcugauuacugauggcaaaucacaggaugacguagaggcucccucuaagaaacuuaaggaugaagggguggagcuuuucgcgaucggcauaaaaaacgccgacgaggucgaguuaaagaugaucgcuacugaucccgaugacacucacgcuuauaacgucgcagacuuugagaguuuguccaggauuguggaugaucuuacaauuaaccuguguaauucaguuaaggggcccggugaccucgaggcuccauccaauuugguuaucucagaacgcacucaucgauccuucagagugucauggaccccgccgucugauucuguugacagguauaaaguugaauacuauccagucucugguggcaaacgucaggaguucuauguuucucgaauggagacuucuacgguucugaaagaccuuaaacccgaaacggaguaugucguaaacguguacaguguggucgaggacgaguacucagaacccuuaaaagggaccgaaaaaacccugcccguuccaguuguuucauuaaacauuuacgacguggggccaaccacgaugcauguucaguggcagccagucggaggcgcaacaggauauauacugagcuacaagccagucaaagacacugaaccuacccgaccaaaggaaguaagacugggacccacugugaaugauaugcaguuaacagaucuggucccuaacacagaguaugccgugacaguccaggccguccuacaugaccugacaucagagccuguaaccgugcgcgagguuacccuaccucuaccccggccccaggauuugaaacugagagacgugacccauucuacgaugaacgucuuuugggaacccguaccagggaagguuaggaaauauauaguaagguauaagacucccgaggaagaugugaaggaggucgaaguagaccgcagugagacaucaaccagcuugaaggaccuguucucucagacccucuacaccguuuccguuuccgccgugcacgaugaaggagaaagccccccugucaccgcacaagaaacaacucgccccgugcccgcucccaccaaccugaagauuacggaaguuaccagcgagggcuucaggggaaccugggaucacggcgcauccgacgugucccuguacagaaucacaugggccccuuuugggagcagcgauaaaauggagaccauucugaacggcgacgagaacacgcugguguucgagaacuugaauccaaauacaauuuacgaggugucuauuacagcuauuuaccccgacgaaagcgaaagcgaugauuugauaggcuccgaacguacccugcccauacugaccacucaggcgccuaaaagcgggccucgcaaucugcagguuuacaaugcgaccuccaauucucuuacugucaagugggaccccgcuuccggcagaguccagaaguaccguaucaccuaccagccgucuacaggcgagggcaacgagcagaccaccacuauuggaggacgucagaauaguguggugcuucagaaacugaaaccagauacucccuacaccauuacagugagcagucuguacccagacggagaaggcggcagaaugacugggcgaggcaagacaaaacccuuaaauacagugagaaaccucagaguauacgacccaagcacguccacacuaaacguucgcugggaucaugcagaagggaacccaaggcaguacaagcuguuuuaugccccagcagccgggggcccugaggaguugguccccauccccggaaauaccaauuaugcaauucuccgcaaccugcagcccgacacaucuuacacugucacugugguacccgucuauacugagggggacggaggaaggaccagugauacuggaaggacacuaaugcggggccuggcuagaaauguucagguguacaacccgacgccuaacucccuugacgugcgaugggaucccgcuccugguccggugcuacaguacagggugguguauaguccaguagacggaacacgaccuucggaaucgaucguggugccugguaacacuagaauggugcaucucgaaaggcucauuccugacacccuguacagcguuaaucugguugcccuguacuccgauggagagggaaaccccagccccgcacaaggaaggacucuuccacgaucuggcccuaggaaccuccguguguuuggggaaacuacaaacagccuaucugucgcuugggaucaugccgaugggcccguacagcaauaccggaucaucuacuccccaaccgugggugacccgaucgacgaauacacuaccgucccuggacggcgcaacaacgucauccuucagccccuucaacccgacacccccuauaagauaacagugaucgcgguauaugaggauggagauggcggccaccugaccggcaacggccggaccguaggauuacucccuccccaaaacauccacaucucggacgagugguacaccagguucagagucaguugggaucccaguccuucuccugugcucggcuauaagaucguuuacaagcccgugggcucaaaugagcccauggaggcauuugugggagaaaugaccuccuauacucuucacaaccugaauccauccacaaccuaugaugugaauguguaugcccaguacgacagcggcuugucugugccccucacagaucagggcacuacccucuaccuuaaugugaccgaucuuaagacauaucagauagguugggauacauuuugcgugaaguggaguccucaccgggccgcuacaucuuauagauugaaauuauccccugcugacggcacacguggucaagagauuacuguuaggggcucugaaaccagccauuguuuuaccggucucucuccugauacugauuauggagugacaguguuuguccagacgcccaaucuagaggggccuggcguaucugugaaggaacauacaacagugaaaccgacggaggcuccuacugaacccccaaccccacccccaccccccacaaucccuccagccagagacgucugcaaaggggcaaaagcagacaucgucuuccucacagaugccagcuggagcauuggcgacgacaacuucaacaaaguagugaaauucaucuucaauacuguugguggcuucgaugaaauuucucccgcggguauccaagucucauucguccaguauucugacgaagugaagagugaauucaagcugaacacauacaacgacaaggcuuuggcgcucggcgcacuccagaacauccgauacagggggggaaauacgagaaccgguaaggcucugacauuuaucaaagaaaaagugcuuacuugggagucaggaaugagaaagaacgugccgaagguccucguagucguuacagacgggcggagucaggacgagguuaagaaagcagcccuugugauccagcagagcggguucuccguguucgugguuggaguugccgacguagauuacaaugagcucgccaacaucgccagcaagccuucugagcgucauguuuuuaucguggacgauuuugaauccuucgaaaaaauugaggauaauuugauaaccuuuguuugugaaacugccacguccucauguccauuaauauaucuugacggcuacaccagccccggcuucaaaaugcuggaggccuauaaucuuacagaaaagaauuucgccagugugcagggcgucucauuggaaucuggaucguucccuucauacucugcuuaccguauucagaaaaacgccuucguuaaccagccuaccgccgacuugcauccuaauggccuaccuccuucuuacacuauuauccuccucuucagguugcuaccggagaccccuuccgaccccuucgccaucuggcaaaucacugaucgcgacuacaaaccgcagguaggcgucauagcagaccccagcucaaaaacucuguccuucuuuaacaaagauacucgcggggaggugcagaccguaacuuucgauacagaggaagugaaaacacuguuuuauggcagcuuucacaagguucauaucguaguaacuagcaagucuguaaagauauacaucgacuguuacgagauuaucgaaaaagauauaaaggaagcugggaacauuacaacugaugguuaugagauccuuggaaaacugcuuaaaggcgaacggaaguccgcagcuuuucagauucagucauucgacauugugugcagucccguguggaccagccgcgauagaugcugcgauaucccuagccggcgcgacgaggguaagugucccgcauucccaaacaguuguaccugcacacaggauucugucgguccaccgggcccaccugggccugccggggggccgggugcuaaggggccacguggagaaaggggaaucagcggugcuaucggccccccgggcccacggggugauaucgggccuccagggccucaggggccucccggcccacaggguccaaacggccugucuauucccggcgagcagggcaggcaggguaugaagggagaugccggggaacccggccugcccggccggaccgggacacccggucugccgggaccuccugguccaaugggaccaccaggggacagggguuucacaggcaaagacggugcuaugggaccccguggcccaccuggaccucccgggagccccggaucccccggcguuacuggcccauccggcaagccaggcaagccuggggaucacggccgccccgggccuagcgguuugaagggcgaaaagggggaccgcggggacauugcaagucaaaauaugaugcgcgcuguggcccgucaggucugcgaacagcuaaucucaggucagaugaaucgcuucaaccagaugcuuaaucaaauuccaaaugauuaccaaaguucccggaaccagccagggccaccgggaccucccgguccgcccggaagugcaggagcacgcggggagccaggaccaggcgggcguccaggauuuccgggaaccccgggcaugcagggccccccuggagagcgaggccugcccggagagaagggcgagcgcgggaccggcagcagcgggccacggggacuuccuggccccccagggccgcaaggagagagucggacagggccgccuggcagcacuggcagcagagguccccccggcccucccggcaggcccggcaacagcggcaucagggggcccccuggccccccuggguauugcgacagcucacaaugugcauccaucccuuauaacggccagggcuacccaggcagugguuag

SEQ ID NO: 145708 - RNA, 8964 nt, Artificial Sequence
  derived and/or modified sequence
augcgcucucgccuucccccugcccuggcagccuuaggagcugcccuguugcucaguaguaucgaagcagaggucgaucccccuuccgaucugaacuucaaaauaauugacgaaaacacugugcacauguccugggcaaaacccguggauccuauagugggauauagaauuacaguugauccuacaacugauggaccuaccaaggaguuuacgcucagugccucuacgaccgagacauuacugucagaauuagugccugaaacugaguacguugugaccauuacuagcuacgaugagguggaagagucugucccugugaucggucaguuaaccauccagaccggcucaagcacuaaaccuguggagaaaaaacccggaaagacagagauucagaaaugcucggugagugcuuggacugaucuggucuuccugguggacggcagcuggucugucggacggaacaacuuuaaguauauccucgauuucauagccgcacuuguuagcgcuuucgauaucggugaagaaaagacccgggugggugugguucaguauaguucagauacacgaacagaguucaaccugaaccaauauuaccagagggacgaauuacuggcagcgaucaaaaagaucccguacaaggguggcaauaccaugacaggagacgccauagauuaccuuguaaaaaauacauuuacggagucagcgggcgcccgcguuggcuucccuaagguggccaucaucauaacggacgguaaaucgcaggaugaggucgaaauacccgcacgggagcucaggaacgucgguguggagguguucucccuggggaucaaagccgcagaugccaaggagcucaagcagauugcguccacccccucccugaaucacguguuuaauguggcuaauuucgacgccauugucgauauccagaaugaaauuauaucucagguuugcucaggcguugacgaacaacugggggagcuggugaguggugaggaaguagucgaaccaccuucuaaccugauagccauggaggucucuagcaaauacgugaaguugaauuggaacccgaguccaagcccagucacagguuacaaagugauccuuaccccaaugacagcggguucacgucagcacgcucugucgguugggccgcagaccaccacuuugucaguccgcgaucugucugcugacacagaguaccagauuagcguaucagcaaugaaggguaugacuucgagugaacccauuucuaucauggaaaaaacucaacccaugaaaguacaaguugagugcucccgaggagucgauauuaaagccgacaucgucuuccucgucgacggaucguacuccaucgggauagccaauuucguaaaggugagagccuuccuggaagugcuugucaaguccuucgagaucucccccaaccggguccagauuucucugguccaauacucccgggacccacauacggaguucacacugaaaaaguucacuaagguggaagauaucaucgaggcuauaaauacuuucccuuaccggggcggcagcacuaacacaggaaaggcuaugacuuaugugcgcgaaaagauuuucguccccagcaagggaucucgcuccaaugucccuaaaguaaugauccugaucacggacgggaagucuuccgaugccuucagggauccggccaucaaauugagaaacagugauguagagaucuucgccgugggagugaaggacgcagucaggagcgagcuggaagcgaucgcauccccccccgcugagacccacguguucaccguggaagauuucgaugccuuccaaagaauuuccuuugagcuuacucaguccaucugcuuacggaucgaacaggagcucgccgccaucaaaaaaaaagcuuaugugccacccaaagaucuuuccuucuccgaagucacgucauauggguuuaagacuaacugguccccugcgggugagaauguuuuuaguuaccauaucacauauaaggaagcagccggagacgaugaagugaccgugguugagccggccucaucgacguccgucguacuguccagucugaagcccgaaacacuguaucucgugaacguuacugcggaauaugaagacggcuuuaguauuccccuugcaggcgaagaaaccacugaagaggugaaaggggcaccacgaaaucuuaagguaacagacgagacgaccgacagcuuuaagauuaccuggacccaggccccgggccgugugcucagguacaggauaauauacaggccuguggcaggaggggaaagucgugaggugacuaccccacccaaccagagacggcgaacccuagagaauuugauucccgacacaaaguacgaagucuccguuauuccugaguauuuuagcgguccuggcacuccucuuaccgguaacgccgccacagaagagguuagagggaacccgcgggaucugagagugagugauccgaccacauccacaaugaaacuuuccuggaguggagcgccggggaagguaaaacaauaccugguuaccuacaccccaguggccggaggugaaacccaggaaguuacugugcguggugacaccaccaauacugugcuacagggacugaaggaggggacacaguacgccuuguccgugacugcccuguaugcuucuggagcaggcgacgcacuguuuggcgaggggacaacccuggaggaacgcggcagcccucaagaccucgucaccaaggacaucacggacacaagcauuggcgcauacuggaccagugccccaggcauggugcgcgguuacagaguguccuggaaaucccuguaugacgacguggacaccggcgagaaaaaucuccccgaggacgccauccacacaaugaucgaaaaccuucagcccgagaccaaauauagaauauccguuuuugcuaccuauagcucuggcgagggugagccacugacaggagacgccacaacugaauugagccaggauuccaaaacgcugaaaguagaugaggagacggagaacacuaugagaguuacuuggaaaccugccccaggcaagguggucaacuauaggguggucuaccgcccccacggccgagggaagcagaugguggccaaagucccuccgacaguaacguccacaguacucaagcgacuacagccucagaccacuuaugauauaacaguccugccaauuuauaaaaugggugaaggaaagcuuaggcaaggcuccgguacuaccgccucccgguucaaaucuccuaggaaccuaaagacaucggacccaacuaugucuagcuuccgagucacgugggagccugcuccaggugaggugaaaggauacaaggugacguuccacccuacuggcgacgaucgacggcugggagagcuugugguuggaccauaugauaauaccgugguccuggaggaguuaagagccgggacuacuuacaaggugaacguuuucgggauguucgauggaggggagucaucuccucucguggggcaggaaaugaccacccugagcgacacaacagugaugccaauccuuuccagcgggauggaaugccugacuagagcugaggccgauauugucuugcuagucgauggcucguggucaauuggucgcgcuaacuuucgcaccgugcgcagcuucauuaguaggauugucgagguguucgacaucgggccaaagcgcgugcagauugcgcucgcccaguauucaggggacccucguacggaguggcagcugaaugcacaucgcgauaaaaaaucccuucugcaagccguggccaaucucccuuacaaggggggaaacacucucacaggcauggcucuaaauuucauccgacagcaaaauuuuaggacgcaggcuggcaugaggccuagggccagaaaaaucgggguucucaucacggacggaaagucacaagaugacguugaggcacccagcaagaagcuaaaagacgaggggguggagcuguucgcuauuggcaucaagaacgcugaugagguagagcugaaaaugaucgccaccgacccggaugauacucaugcauauaauguagcagacuuugaaucucuaucucgcaucguugaugaucuuacgauuaaucuuugcaauucaguaaaagggccaggcgaucuggaggcccccaguaauuuggugauaucugaacgcacgcacaggagcuuuaggguuucuuggacgccacccagugauuccgucgacagauauaagguggaguauuacccagugucuggcggaaagagacaggaguuuuacgugagccguauggagacaaguacugugcucaaggaccugaaaccagaaacagaguauguugugaacguguauagcguggucgaagaugaauacagugaaccacucaagggcaccgaaaagacacuccccgugcccgucguuagccugaacauauaugaugugggcccaaccaccaugcaugugcaauggcagccugucggcggcgcgacaggcuacauucucaguuacaagccagugaaggacacagagccuacacgccccaaggagguuaggcugggucccacugugaacgauaugcagcugacagacuuggugccgaacacugaguaugccgugacagugcaggccguccugcaugaucucaccuccgagccugugacugugcgcgaagugacacugccccuccccagaccacaggauuugaaauugcgggauguuacacauucuaccaugaauguguuuugggaaccggugccugguaaagugcguaaguacaucguccgguacaagaccccggaagaagauguaaaagaagucgaggucgaucggucugaaacuaguacuucucugaaggaccuguucucccagacccuguacacaguaagcgucagugcaguccacgaugaaggagaaucgccacccguaacggcucaggaaacaacucguccaguacccgcucccacuaacuugaaaauuacugagguaacuucugagggguuccgggggacaugggaccauggagccagugacgucuccuuauaccgcauuacaugggcgccauuuggcaguucugacaagauggaaacaaucuugaauggugaugaaaauacacugguauuugaaaaccuuaauccaaauaccauauaugaggucuccauaacggcuauuuacccugacgaauccgaaagugacgauuugaucggaagugaacgcacucugccaauccuuacaacccaggcgccuaagucagggccuagaaaccugcaagucuauaaugcaacaucaaacucccucacagucaaaugggaucccgcauccggcaggguccagaaauaccguaucacuuaucagcccaguacgggugaagggaaugagcagacaacaacgauaggcgggaggcaaaauuccgucgucuuacagaagcucaagccugauaccccguauaccauuacuguuucaagccuuuaucccgacggggaaggcggaagaaugaccggacguggaaagacgaagccgcugaacaccgugaggaauuuacgcguguacgauccgagcacaagcacuuuaaacgucagaugggaucacgcggaaggaaacccaagacaauauaaacuguuuuacgcaccggccgccgggggcccugaggaauuagugccaauuccagggaacaccaacuacgccauccuucgcaaucuacagcccgacacuucuuacacggugaccgucgugcccguguacacugaaggcgacgguggacguaccagcgacacaggccgaacacuaaugagaggccuggcucggaacguucaaguuuauaauccaaccccuaacucucucgauguuagaugggaccccgcaccuggcccuguacuccaguauagagugguguauagcccuguggauggaacaagacccucagagaguaucguggugcccggaaauacaaggaugguucaucuggaaaggcugaucccagacacacucuauucuguuaaccugguagcucuguauucggauggugaggggaacccaagccccgcucagggccgcacgcugccccgcucuggaccuagaaaucuuagaguguucggagaaaccacaaacagccuaucuguugcuugggaucaugcugauggcccaguacagcaauaucgaaucauuuauucuccuacagucggagaccccauugaugaguauaccaccgugccuggccggcggaauaacguuauccuccagccauugcagccagacacuccauauaaaaucacggugaucgcuguguacgaagauggcgauggaggucaccugacagguaaugggaggaccgucggacugcuuccuccacagaacauucacauuagugaugaaugguauaccagauuccggguguccugggauccuucuccgucccccgugcucggcuacaagaucguguacaagccuguagguagcaacgagccuauggaagcuuuugugggugagaugacuuccuauacccuccacaaccugaacccuuccacuacauaugacgugaacgucuacgcucaguaugacagcggacuuucaguaccuuugaccgaucagggaacaacccucuaccugaaugucacagaccugaaaacauaucagaucggaugggacaccuuuugcgugaaguggagcccccaucgagcggccacaucuuacagacugaagcugagcccagccgaugggacccgcggucaggagauuacugugcgcggaucagaaaccagccacuguuucaccggccuaaguccugacacagauuauggggugaccguuuucgugcagaccccaaauuuagagggaccaggcguguccgugaaggagcacacuacuguuaagccuaccgaggcccccaccgaacccccaacaccuccuccaccuccaacgaucccaccugcaagggacgugugcaagggcgccaaagcggauaucguguucuugacugacgccucuuggucgaucggggacgacaacuucaauaagguugugaaguuuaucuucaacacaguuggaggcuucgacgaaaucuccccugcugguauccaggugagcuucguccaguauucggacgagguuaaguccgaguucaaacugaacacguauaaugauaaagcacucgcacucggcgcacuccaaaauauucguuaucggggcgggaauacucgaacagggaaggcucucacguucaucaaagaaaaagugcugacaugggaguccggaaugagaaaaaauguuccuaagguauuagugguggucacugauggccgaucucaggacgaagugaagaaggcagcccuggugauacaacagagcggauuuucgguguuugucgugggcguugcagauguagacuacaacgagcuggccaacaucgccuccaaaccaucugagcgacacguguucaucguggaugacuucgaaucuuuugagaaaaucgaggacaaucugaucacguuugucugcgagacagcaacgagcaguuguccccuuaucuaucuugacggguauaccucccccggcuuuaagaugcuugaagcuuacaaccugaccgagaagaauuucgcuagcgugcagggggugagucuagaauccggauccuuuccaagcuauucugccuaccgcauucagaaaaaugccuuuguuaaccagccaacugcugaccuacaccccaauggacucccgcccagcuauaccaucauuuugcuguuucgucugcugccggaaacuccuagcgaucccuucgcaaucuggcagauuacagauagggacuacaaaccccaggugggagucauagccgacccuucuucuaagacgcucuccuucuucaacaaagacacacggggcgaaguacagacagugaccuucgacacagaggaagugaagaccuuguucuacggauccuuccacaaaagggaugaggggaaauguccagcauuuccaaauuccugcacgugcacgcaggacagcgugggcccuccagggccacccggcccagcagggggucccggggcgaagggaccucgaggcgagagggggauuaguggcgcaaucgggcccccugggcccagaggggacaucggaccuccugguccccaggguccacccgguccccaaggcccaaacggucuauccauccccggagagcaggggagacaaggcaugaaaggggacgcaggggaaccaggacugccaggaaggaccggaacacccggccuuccaggaccucccgggccaauggggcccccgggcgacagaggcuuuaccgggaaggacggagccaugggaccccggggaccuccuggcccuccagggagccccggaucuccgggggugacaggaccgagcgggaagcccggcaaacccggagaccacggccgcccagggccuuccggccugaaaggcgagaaaggcgaccguggcgauaucgcaucucaaaacaugaugcgugcaguagccagacaggugugcgagcaguugauuuccggucagaugaauagauucaaccaaaugcugaaccagaucccaaaugacuaucagucaucacgcaaucagcccggaccaccuggcccaccuggcccccccggcucggcuggggcaaggggcgagccaggaccggguggcagaccaggguucccaggaacgccugguaugcagggaccgcccggcgagcgaggccucccaggagaaaaaggggagcgugggacaggcucaagcggcccacgcggucugcccggaccccccgguccgcagggagaaucccgcacaggaccccccgguagcaccggaagccgcgguccgcccggccccccuggccgacccggcaauagcgggauuaggggcccgccaggcccaccgggcuauugcgacagcucacagugcgccucaaucccauacaaugggcagggcuacccugguucugguuag

SEQ ID NO: 145709 - RNA, 9192 nt, Artificial Sequence
  derived and/or modified sequence
augagaucuagacucccccccgcccuggcagcccucggagcagcguuguuacucaguuccauugaggcggaggucgacccgccgagcgaucugaauuuuaaaauuauugacgaaaacacuguacauauguccugggcuaagccgguggacccaauugugggauacagaaucaccguugaccccacuacagacggaccaacaaaagaauucacacuuucagccuccacaaccgaaacccuguugucugaacucgucccugagacugaauaugucgugacaaucaccuccuaugaugagguugaagaaagcgugcccgugaucggccagcuuaccauccagaccggauccucuacuaagcccguugaaaaaaaaccugguaaaacagagauucaaaaguguucaguaucugcauggacggaccuaguauuucucguggacggcagcuggagugugggucggaacaacuuuaaauacauccuagacuucauugcagcgcucgugucagcauuugauaucggagaggagaagacacgcguuggcguagugcaguauagcucugauacccgaacagaguucaaucuaaaccaguacuaucaacgagacgaguuacuggcagcaauuaaaaaaaucccuuauaaaggcgguaacacgaugacaggcgacgcgauugauuauuugguuaagaacacuuucacugaaucagccggugcccgcguuggauuuccaaaaguggcuauaauuaucaccgauggcaaaagucaggaugagguggagauuccagcccgcgagcugcguaacguugggguggagguauuuucacuaggcaucaaagcugccgacgcgaaagaauugaaacagaucgcaaguaccccguccuuaaaccauguguucaauguggccaacuucgaugcaaucguggauauccagaacgaaaucauuucacaaguguguagcggcguagacgaacaacucggcgagcugguguccggagaagaaguaguggaacccccuucuaaucugaucgcaauggaagucagcucuaaauaugugaaguugaauuggaacccuaguccaucaccgguuacgggauauaaaguaauauugacccccaugacugccgguucgcgccaacacgcucugucuguaggcccucagacuacaacccugagugugcgugaccugucagccgauaccgaguaucaaauuagcguauccgccaugaagggaaugaccucgagugagcccaucucaauuauggaaaaaacacagccaaugaaagugcaaguggagugcucaaggggaguggacaucaaggcagacaucgucuuccuugucgauggcuccuauucaauugguauugcuaauuuuguuaaggugcgugccuuuuuggaggugcuggugaaaagcuucgagaucaguccaaaccgcgugcaaauuagccucguucaauauucuagggauccacacacagaguucacauuaaaaaaguuuaccaaaguggaggauaucauugaggcaaucaacacauuuccuuauagaggcgggucuacgaauacaggaaaggccaugacauacguucgugagaaaaucuucguaccaucuaaaggcaguagauccaacgucccaaaagucaugauccugauaacagacgguaaguccagugaugcauuuagagacccugccauaaaauuaagaaauagcgacguggagauuuuugccguggguguuaaagacgcagugaggucugaacucgaggcuauugccucccccccagcugaaacacauguguucacgguggaagauuucgacgccuuucagcgcauuagcuucgagcugacacagucaauuugucugaggaucgaacaggaguuagcugcuaucaagaaaaaggcauacgugccgccaaaggaccucucauuuuccgaagugacauccuacgguuucaaaaccaacuggucgcccgcuggggaaaacguguucagcuaccauaucacuuacaaagaagcagcuggagacgaugaggugacugugguugaaccagccucuucaacauccgucgugcugucauccuuaaagccagagacucucuauuuaguuaacguuacagcugaauaugaagacggcuucagcauuccacuggcaggagaagaaaccacagaggaagugaagggcgccccaagaaaccuuaaggugacagacgagacaaccgauuccuucaagauuacguggacccaggcccccggcagagugcugagauauagaauaaucuaccgucccgucgcaggcggagaaagccgagaagucaccacccccccaaaucaacgcaggcguacacuggagaacuugaucccugauacaaaguaugaagugagcgucaucccugaguacuucagcggccccggcacaccacugacggggaacgcugcuacugaagaaguccggggaaauccgagagaccuuagaguguccgauccgacaacaagcaccaugaagcuuaguugguccggagccccugggaaagugaaacaguaucuggugacauacacgccuguagcaggaggcgagacacaagaggugacugucaggggcgacacuacgaacacuguuuugcagggacuuaaagaaggcacccaguacgcccuauccgucacugcacuauacgccuccggcgcaggagaugcuuuguucggcgagggaacgacucuggaggagagaggaagcccgcaggaccuggugaccaaggacauuacagauacauccaucggagcauacuggaccucugcccccggcaugguaaggggcuaucgggugucuuggaaaagucuguaugaugauguagacacaggugaaaagaaucugcccgaggacgcuauacauacuaugauugaaaaccuccagccugaaacaaaguaucgcauaucgguuuucgccacauauaguaguggagaaggggaaccguuaacgggggacgcaacaacagaacugucccaggacagcaagacucugaaaguagacgaggaaacagagaacacaaugcgggugacauggaagccagccccuggaaagguggugaauuaucgugugguuuacagaccccacgggagggguaagcagauggucgccaaggugccuccuacuguuacuucgacaguucugaagcgacugcagccccagaccacauaugauauuacaguucuaccaauuuauaagaugggagagggaaagcuuagacaagggucaggcacaaccgcguccagauucaagagcccucgcaaccugaagacaucugacccuacuaugucuagcuuucguguaaccugggaaccagcacccggcgaggugaagggguauaaggugacauuucaccccacuggagaugauagacguuuaggcgaacugguggucgggcccuacgacaauacuguuguccuugaagagcuccgcgccggaaccacauacaaggucaacguguuugggauguucgaugguggugagagcaguccacuugugggucaagagaugacaaccuugagugauacuacagucaugccaauucuauccucugggauggagugucuuacaagagccgaggccgauauuguguugcucguugacggaaguuggucaauuggcagagcaaacuuuaggacugugcggaguuuuaucucgagaauaguggagguguuugacauaggccccaagaggguucagaucgcuuuggcccaguauaguggagauccuagaacagaauggcagcuaaaugcucauagggauaagaaaagccugcuacaggcugucgcaaauuuaccauauaagggaggcaauacucugacuggaauggcacugaauuucauucggcagcagaauuuucggacacaggcugggaugcgaccuagggcuaggaaaaucggagugcuuauuacugacgggaaaagccaagacgacgucgaagcgccaagcaaaaaguuaaaggaugaaggaguagaacuguucgcaaucgguauuaagaacgcugaugagguggagcugaagaugauagcuaccgaucccgacgacacccaugcuuacaauguggcagacuuugaaagccugucaagaauuguagaugaucuuacaaucaaucuuugcaacagcgugaaaggaccuggagaucuugaagccccaagcaaucuagugaucucugagcgcacccaccggaguuuucguguuaguuggacgccaccuucagauagcgucgauagauacaagguagaauacuacccggugagcgguggaaaacgucaggaguuuuaugucucacguauggaaaccucaacagugcuuaaggaucugaagcccgaaacagaguauguggugaacguauacagugugguagaggaugaguacuccgagcccuugaaagguaccgagaaaacccugccugugcccguggugagucuuaacaucuacgauguuggaccuacaacuaugcauguucaguggcaaccggugggaggagcuaccggauacauccugaguuacaaaccugugaaagauacugagccaacucgucccaaagaaguuagacuuggacccacugugaacgacaugcagcugaccgaucugguacccaauaccgaauaugccgucacggugcaagcuguucugcaugaucugaccuccgaacccguaacugugcgcgaggucacccuaccccuaccccgcccgcaagaccugaaacugcgagacgugacucacucgacuaugaacguguucugggaacccgugccggguaaggugcgcaaguacauuguucgcuauaagacaccagaggaagacguuaaggaaguugaagucgaucgcagcgagacaaguacuucccugaaagaccuguuuagccaaacauuguauacaguguccgugucagccguucaugaugaaggugaauccccuccugugaccgcacaggaaacgacccgucccguaccagcaccgacaaaucugaagauuacagaaguuacuagugaaggcuuuagagguacaugggaucacggcgcaagugauguuagucuguacagaaucaccugggcucccuuuggcuccagcgacaagauggaaacaauauugaacggugaugaaaacacccuuguguucgagaaucuuaacccuaacacuauuuacgaagucucgauuacagcaauuuaucccgacgaaagcgagucugaugaccugaucggaucggaacgaacccugcccauucuuacaacacaagccccuaaaagcggcccaagaaaccuccagguguacaacgccacaucaaauucccuuaccgugaagugggacccagcaucagggcggguacagaaauaucggaucacauaccagcccucuacaggagaaggaaacgagcagacuaccacuauagguggccgucaaaauuccguggugcugcaaaaauugaagccagacacaccauacacgauuacugugaguucucuauacccggauggcgaaggaggcaggaugacaggucgaggaaaaacgaaaccacugaauaccgugcgcaauuuaaggguguaugauccuucuacuuccacucugaacgugcgcugggaucacgcugaagggaacccgcgacaguacaaacuguuuuacgcccccgcugcaggaggccccgaagaacuuguaccaaucccuggcaacacuaauuacgcuauacuccgaaaucuucagccugacacgucauacacuguaaccgucgugccugucuauacugaaggggacgggggcaggacauccgauaccgguaggacacugaugagaggccuggcccggaauguccagguguacaauccgacacccaauucccuugacguccggugggauccggcaccuggcccaguauugcaguacagaguuguauacucacccguugauggaacaaggcccucggaaaguaucguuguucccgggaauacuagaauggugcauuuggagcgacucauccccgauacacucuacucaguuaaccuggucgcguuguauagcgauggggaggggaacccaucuccagcucaaggucgaacacucccuagaucaggucccaggaauuugcgggucuucggcgagacaacaaacagcuuaagcguugccugggaucacgccgaugggccagugcagcaguaucggauaauauacucacccacuguaggagaucccauagacgaauacacaacaguccccggaagacgaaauaacgugauccuccagccucugcagcccgauacccccuauaaaauuacuguuaucgcaguguaugaagauggugauggagggcaucugacuggaaaugggagaacuguaggccuguuacccccccagaauauccauaucucugaugaaugguacacuagguuuagaguuucaugggauccgagucccucgcccgugcuuggcuacaagauaguauacaagccagugggcagcaacgaaccaauggaagccuuugucggcgaaaugacuuccuauacuuugcauaaccucaauccaucuaccacauaugacgugaauguuuaugcccaguacgauagcggacuaagcgugccucuaaccgaucagggaacuacccucuacuuaaaugugacugaccugaaaaccuaucagaucggaugggacaccuucugcguuaaaugguccccacaucgggcggccaccucauacaggcucaagcugucuccugcagacggaacgagaggccaagagaucaccguucgcggcucggaaacaucccacuguuuuacuggauugagucccgauaccgacuacggagugacagucuucgugcaaacuccaaaccucgaaggaccgggggugagcgugaaggaacacacaacuguuaaaccuaccgaagcuccaacugaaccucccacaccucccccgccaccaaccaucccuccagcaagagacguguguaaaggugccaaagcugacauuguuuuccuuacagaugcuucuuggucuauuggagacgauaacuucaacaaagucgucaaguuuaucuuuaacacagugggcgguuuugacgaaaucucuccagcuggcauccaaguuucauucgugcaauauagcgaugaagugaaaagcgaauuuaaguuaaauacauacaacgacaaagcgcucgcccuuggcgcgcugcagaacauuagauaccgaggcgguaauacuagaacuggaaaagcauugacuuucaucaaggagaaagugcucacgugggagaguggaaugagaaagaacgugccaaagguccucguugucgugacagacgguagaucacaggaugaaguaaaaaaggcugcuuuggugauucagcagucaggcuucagugucuuugugguagggguggccgacgucgacuacaaugagcuagcuaacaucgcgucaaaaccgagugaacgucacguguuuaucguggacgauuuugaauccuucgagaagauagaggacaaucuaaucaccuucgugugugagaccgcgacauccuccugcccacugauauaccucgacggcuacacuucuccagguuuuaaaaugcuugaagcauacaaucugacagaaaagaacuucgcuuccguccagggugugagccuagaaagcggauccuuuccauccuacucagcauaucgcauucaaaaaaaugcauucguuaaccagccuacagcagaccugcaccccaacggccugccacccucauauacaaucauccuuuuguuccgauuacuccccgagacacccagugacccauuugccaucuggcaaaucacugauagagacuacaagccgcaaguugguguuauugccgaccccaguuccaagaccuuaucuuucuuuaacaaagacacccgaggcgaggugcaaacagugacuuucgauaccgaggaggucaagacucuauuuuacggcucauuucacaaaguccacauaguggucacuucaaaaagugucaagaucuauauugacuguuaugaaaucaucgagaaggacaucaaagaagcagggaauauuacaacggacggcuacgagauacucggcaaauugcugaagggggagagaaaaucagcagcguuucagauacagucauuugacaucgugugcucacccguguggacaucccgcgauagaugcugcgacauacccucgaggcgggacgaaggaaaguguccagcuuucccaaauucaugcacuuguacccaggacagcgucgggccgcccggucccccagggccagcaggggggccaggagcaaaggguccaaggggggagagagggauuucuggagcaauuggaccaccgggcccccgaggcgacauugggccaccugggccucaaggcccucccgguccucaaggcccuaacggacucuccauacccggggagcagggaagacaaggaaugaagggagaugcgggcgagccagggcugccaggaagaacagggacccccggacuccccggaccgcccggcccgaugggucccccaggagacagaggguucaccggcaaagauggagcuaugggcccgagagguccgcccgggcccccuggaucuccggguucuccuggaguaacaggcccaucuggcaaaccuggcaaacccggcgaucacggaagaccuggcccuucuggccucaagggggaaaagggugacaggggugauauugcuucccagaacaugaugcgagccguggcccgccaggugugugaacaguugaucagcgggcagaugaauagauuuaaccaaaugcugaaucagaucccaaaugacuaucagagcucuagaaaccagcccggaccuccagguccuccaggaccucccggaagcgcaggagcacgcggggagcccggaccgggaggcagacccggauuucccgggacuccaggcaugcaaggcccccccggcgagagaggucugccaggagagaaaggugagaggggaacagggucuuccgguccuaggggccugccgggcccaccaggaccccagggcgaaagcaggacaggccccccgggcagcaccggaucuagaggucccccaggccccccaggcagaccgggcaauucugguauuaggggcccaccuggccccccaggcuauugcgacucuucccagugcgcaaguaucccuuauaauggacaggguuacccaggcagcggcuag

SEQ ID NO: 145710 - RNA, 5700 nt, Artificial Sequence
  derived and/or modified sequence
augagaucccgccugccucccgcacuugccgcucugggugcugcauugcugcucuccuccaucgaagcagaaggaauggaaugucugacccgcgccgaagccgacauuguacuacugguugacggaagcuggucuaucggccgcgcuaacuuccguacgguccggucauucaucagccgcauuguagaaguuuucgacaucgguccaaagcguguccagauugcgcucgcccaauacucaggugauccgaggaccgaguggcagcucaaugcucaccgcgacaagaagagccucuuacaagcuguggcuaauuugcccuacaagggcgggaauacucuaacugguauggccuuaaauuuuauccgccagcagaauuucagaacccaggcgggaaugcgcccacgcgcacgaaaaaucgggguguugaucacagacgguaaaucacaggaugacguggaagcuccuaguaagaaacugaaggaugagggcguugaacuguucgcuauugggauuaaaaacgccgacgaggucgagcugaagaugaucgcaacagacccagacgacacacacgcauauaacguagcagauuucgagucccugagcagaauaguggaugaccucacgaucaaccuguguaacucugugaaggggcccggagaucucgaggcuccuaguaaucuggugaucucugaacggacucauagguccuuccgggugucuuggacaccuccuucugacagcguggaucgauacaaaguugaauauuauccugugagcggugguaaaagacaagaguuuuacguuagccgcauggagaccagcaccgugcucaaagaccuuaaaccugaaaccgaauaugucguaaauguuuauuccgugguggaagacgaauauagcgaaccuuugaaaggaacugagaaaacacugccagugcccgugguuagucugaauauuuaugacguuggcccuaccacuaugcacguccaauggcaaccuguagggggcgccaccggcuacauccucucauauaagcccgugaaggauacagagcccacccgaccuaaagaaguacgacuaggccccacaguuaaugauaugcagcugacagaccucgugcccaauaccgaguacgccgucacugugcaggcugugcugcaugaucuaacaagcgagccaguuaccgugagagaagucacacugccauugcccagaccccaggaucugaaacuacgcgacgugacgcauucuaccaugaaugucuuuugggaacccgucccugguaaaguucgcaaguacaucgugagauacaagaccccggaggaagaugugaaggaaguggaggucgacagauccgagacuagcacuagccuaaaagaccucuucucgcagacauuguauacugugucaguguccgcugugcacgaugaaggugagaguccccccgugacagcccaagaaaccaccagacccgugcccgcgccuaccaauuuaaagaucacggaggugaccuccgagggcuuucgggggacgugggaucacggcgcuucugacgugucguuauaccgaaucaccugggcccccuuuggaucuucggauaaaauggaaacaauucugaacggcgacgagaauacccuggucuuugaaaaucugaaccccaauacaaucuacgaaguuucaauuacugcuauuuacccugaugagucugaguccgacgaucucauaggcucagagaggacgcuccccauccugaccacccaggcccccaaaucuggaccacguaauuuacaaguguauaaugcgacaagcaacagccucacggugaaaugggaccccgccagcgggcgcguucaaaaauacagaaucacauaccagccgagcacaggggaaggcaaugaacagacaacgaccauuggcggccggcaaaacucuguuguuuuacagaaacugaagcccgauaccccguauaccauaacagucucuaguuuauaucccgacggagagggcggaagaaugacaggaagggguaagacuaaaccacugaauaccgucagaaaucucagggucuacgacccuucuacauccaccuugaaugucagaugggaccaugcugaaggaaacccucgacaguauaaacuguucuaugcaccagcagcugguggcccagaggagcuugugccaauaccaggcaacacuaauuacgccauucugaggaaucuccagcccgacaccucuuacacaguuacaguugucccuguuuacaccgaaggugauggcggccgaacaagugauaccggaaggaccuuaaugagaggacuugcuagaaacguccaaguguauaaccccaccccuaacucucuggauguucguugggaccccgcaccagguccugugcugcaguaucgaguaguguacaguccuguugauggaacccgaccuucugagucuauugugguuccugggaauaccagaaugguucaccuggagcggcucauuccggauacauuguauaguguaaauuuagucgcccuguauuccgacggcgaaggaaauccaucuccagcucagggacgaacauugcccaggucuggcccccggaacuugagagucuucggcgaaacaacuaauagccuguccguggcuugggaccacgcagaugguccagugcagcaauaucgcauaauuuacucucccacagugggcgacccgaucgacgaguacacuaccgugcccggcaggaggaauaaugucauacugcaacccuuacaaccggacacaccauacaaaaucacaguaauugccguguaugaagacggagaugggggacaccugacaggaaauggcaggacugugggccuucugcccccacagaacauccauaucucagaugaaugguacaccagguuccgagugaguugggaucccucuccaagucccguccuuggcuauaagauagucuauaaacccgucggaagcaacgaaccuauggaggccuuugucggcgaaaugacuucauacacucuacauaaucuaaacccauccaccaccuaugacgucaacguguaugcccaguacgauuccggccuuuccgugccuuugacagaccaggggaccacauuguaccucaaugucaccgaucuaaaaaccuaucagauagggugggauaccuuuugcgugaagugguccccucaccgcgcugccacaucuuaucgacugaagcuaucgccugccgacgguaccagaggacaagagauaaccguuaggggauccgaaacuucacauugcuucacaggccuaucucccgauaccgauuauggugugacuguuuuuguacagaccccaaaucuugaaggcccuggcguaagcgugaaagaacacacaaccguuaaaccaaccgaagcaccaacugaaccucccacuccaccgccaccuccuaccauaccuccagcucgcgacgugugcaagggcgccaaagcugauauaguuuuucugaccgaugcguccuggucuaucggcgacgacaacuucaauaaggucguaaaauuuaucuuuaauaccgugggcggcuuugacgagaucagccccgccgggauccaggucagcuucguacaguauucggacgaagugaaaagugaguuuaaguuaaacacauacaacgauaaggcccuggcuuuaggagcucuucagaauauccgauacagagggggaaacacacguacuggaaaggccuugacuuuuaucaaggaaaaggugcugacgugggagagugggaugagaaaaaaugucccuaagguuuuggugguugugacugacgguaggagucaagaugaaguaaaaaaagcagcucuggucauacagcaaucuggguucucaguguucgugguuggggucgcugacguggacuacaaugagcuugcaaacaucgccucuaaacccuccgaaagacacgucuucaucguugacgauuucgaauccuucgaaaagauugaagauaaucugauuacauucguuugcgaaacugcaacaagcucauguccucugaucuauuuggauggguacaccucucccgguuucaaaauguuagaagcauacaaucugaccgaaaaaaacuucgccucagugcagggcgucucuuuagagucaggcucauucccaucuuacuccgcauaucgcauucagaagaaugcguucguaaaccagccuacggcugauuugcauccaaacggacuaccgccuaguuauaccauaauucuacuguuuaggcuacuacccgagaccccgucugacccuuuugccaucuggcagauaacagaucgagauuauaagccucaggucggagugauugcugauccaucuaguaaaacauuaagcuuuuuuaacaaggacacccgcggagaagugcagacuguaacauucgacaccgaagaggugaagacauuguucuacggguccuuucauaaagugcacauuguaguaacaucaaaauccgucaaaaucuacauagauugcuacgagauuauugaaaaagacaucaaagaagccgggaauauaacgacagauggauacgagauccugggaaaguuacugaagggcgagagaaagagcgcagccuuccagauucagucauucgauaucguguguucuccaguguggaccaguagagaccgauguugcgauauucccuccagacgcgacgaagggaagugucccgcauucccgaacucuugcaccuguacacaagauucggucggcccuccgggacccccaggaccugcaggcggaccgggagccaagggccccagaggggagagaggcaucuccggagcuauagguccuccaggacccaggggugauaucggccccccaggaccacaaggcccacccggaccacaaggccccaacggacuaaguauaccaggugaacagggcaggcagggaaugaaaggagaugcgggcgaaccuggacugccuggacguaccgggaccccaggccugccgggaccaccaggcccuauggggccccccggagaccgcggcuuuaccgguaaggacggcgcaaugggaccucguggcccccccgguccuccaggauccccaggcagcccaggcguaacgggaccuucugggaagcccggcaagcccggugaccacggcagaccuggaccauccggacucaaaggugagaaaggcgauaggggagacaucgcgucucagaauaugaugcgagcaguugccagacagguaugcgaacaauuaaucuccggccagaugaacagguucaaccaaauguuaaaucagauucccaaugacuaucaguccagcagaaaccagccgggaccacccggcccacccggaccacccggcagugcaggggcuaggggcgaacccggccccggaggucguccuggguucccagguacgccaggcaugcagggaccgcccggcgaacguggacuuccuggcgagaagggugaaagaggaacaggauccagcgggcccagaggucucccaggaccaccuggaccccaaggcgagucgcguaccggacccccgggaucuaccggaucuaggggcccaccagguccacccggcagaccgggaaacucuggcauuagaggccccccaggcccgcccgguuauugugacagcagucaaugcgcuucuauccccuacaacggucagggguauccuggaucaggauag

SEQ ID NO: 145711 - RNA, 8964 nt, Artificial Sequence
  derived and/or modified sequence
augagaucaagacuccccccugcccuagccgccuugggugcagcccuacuguugaguaguaucgaagcugaaguagauccaccgagcgaccuaaacuuuaaaauuauugacgagaauacagugcacaugucaugggcuaaaccaguugauccuaucguggguuacagaaucacuguagacccaacuacugacggaccaacuaaggaauucacacuaucagccucuacaacagagacacuccucagcgaacugguccccgaaacugaauacguagugacuaucacuuccuacgacgaaguggaagaaucugugccuguuauaggacaacucacaauucagaccgggucaucaacaaaacccguggaaaaaaaaccuggaaaaaccgagauccaaaaguguuccgucucagccuggacagaccugguuuucuugguagauggcagcuggucagucggacgcaacaauuuuaaauauauucucgacuuuauugcagcccuugugagcgccuucgacaucggagaagagaagacacguguuggagucguucaguauuccucugacacacgcacugaauucaaccuaaaucaguacuaucagagggacgagcuucucgcggcaauuaagaagauaccuuacaagggugggaauacgaugacuggcgacgccauagauuaccuagucaaaaauacauucacagagucugccggagcacgggucggcuuucccaaaguggcuauuauuauuacggauggcaaaucgcaggacgaaguugaaauuccugcacgcgagcucagaaacgucggcguggaaguguuuucucucgguaucaaagcggcugacgccaaggaacuaaagcagaucgccucaacaccuucacuaaaucauguauucaauguggcuaauuucgaugccauaguagauauacaaaaugagauuaucucucagguaugcucggggguagaugagcagcugggcgagcuugugucaggcgaagaaguaguggaaccacccucuaaccugaucgcuauggaaguaagcagcaaguaugugaaacucaacuggaacccaucucccucaccagugacaggauacaaaguuauacugacaccaaugacugccggaucccgucagcacgcacuuuccguggggccccagacaacaacacuuucggugcgggaucugucagccgauacagaauaucagauaucugucagcgcuaugaagggaaugaccaguuccgaacccauuagcaucauggagaagacccagcccaugaaaguccagguagaguguucgcgagggguugacaucaaagcugauauagucuuucugguugacggcuccuauagcaucggcauugcuaacuucgucaaggugagggcauuucuugaaguucuggugaaauccuuugaaaucucaccuaaccgcgugcaaauuucuuuaguccaguacucuagggacccacauaccgaauucacacuaaaaaaguuuaccaaaguagaggauaucaucgaggcuaucaacaccuuccccuauagaggcggaucuacuaacaccgguaaggcaaugacguacgugcgagaaaagauuuuuguuccuagcaagggaucccguagcaaugugccuaaagugaugauccugauuacagacggcaaaucauccgaugcauuccgcgauccugccauuaaacugaggaauucagaugucgaaauauuugcaguaggggucaaagacgcagugagguccgaauuggaggccaucgcuucaccgcccgcugagacccauguauuuacaguggaagauuucgaugccuuccaaagaauuuccuuugagcuuacucaguccaucugcuuacggaucgaacaggagcucgccgccaucaaaaaaaaagcuuaugugccacccaaagaucuuuccuucuccgaagucacgucauauggguuuaagacuaacugguccccugcgggugagaauguuuuuaguuaccauaucacauauaaggaagcagccggagacgaugaagugaccgugguugagccggccucaucgacguccgucguacuguccagucugaagcccgaaacacuguaucucgugaacgucaccgcagaguacgaggacggauucucaauaccccucgccggagaagaaacuacugaggaggugaagggcgcgccuaggaauuugaaaguuaccgacgagacgaccgacucauuuaagauuacguggacccaggcacccgggagaguacuuagauacagaaucauauauaggccuguagcuggaggcgaaagucgcgagguaaccacacccccaaaucagcgacgccgcacucucgaaaaccuuauccccgauacaaaguacgaaguaaguguaaucccagaauauuuuucuggaccggguacaccguuaacuggaaaugcagccacugaggaagucagggguaacccacgcgaccuacgggugucugauccuacuacuucaacuaugaagcuguccuggagcggcgcuccuggcaaagugaaacaauaccucguuacauacacccccguugcaggcggcgagacccaagaggugacggucagaggagauacuacuaacaccgugcugcagggccucaaggaaggcacacaauacgcucugucgguuacugcucuguacgccucgggugcaggugacgcccuguucggcgaaggcaccacacuggaagaacgcggcuccccucaggacuuagugaccaaggacauaacugacacaagcauaggagccuacuggacuagcgcucccggaaugguaaggggcuaccguguaaguuggaaaagucuguacgaugauguggacaccggugaaaagaaccuccccgaggaugcgauucauaccaugaucgagaaccugcagcccgaaaccaaauaucgaaucagcguguuugccacguacucuucaggagaaggugagccacuaacaggcgacgccacuacugagcugucucaggacucuaaaacucuaaaggucgaugaagaaacugagaauaccaugcgggucacuuggaaaccagccccaggaaagguugugaacuauagggugguauaucguccccacggccgcgggaagcaaauggucgcaaagguuccuccgacgguaacaagcacuguguuaaaacgccuacagccucaaaccacauaugacauuaccguacucccaauuuacaaaaugggugaaggcaaguugagacaagggucuggcacuaccgccucuagauucaaguccccucgaaaucugaaaaccuccgacccaaccaugucuucauuucgcguaacaugggagccggcgcccggcgaggucaagggcuauaaaguuaccuuucaucccacaggagacgaccgacggcucggagaacucguggugggacccuaugacaacacaguggugcuggaagaacugcgcgcaggaaccacauacaaggugaacgucuucgguauguuugacgggggagaauccagcccgcuagugggccaagagaugacgacuuuaagcgauaccacgguuaugccaauucuuucuucaggcauggaaugccuuacgagggccgaagcggacaucguccuccucguugacggaucaugguccaucgggagagccaacuuuagaacugugcgcuccuucaucucucgaaucguggaagucuucgauauuggaccaaaacgugugcagaucgcccucgcacaguauucaggugacccuagaacugaauggcaacugaacgcccaccgugauaaaaaaucucuacugcaggccguugcuaaucugccuuacaaaggcggaaacacauugacagguauggcacucaacuucauccgccaacagaacuuccggacacaagcuggcaugcggccuagggcucguaagauuggaguucugauuacugacggcaaaagccaggacgacguagaagcccccuccaaaaaacuuaaagaugaaggagucgaacucuucgcgaucgggaucaagaaugcugaugagguugaacucaaaaugaucgcuacugacccugacgauacucaugcuuauaacguugccgauuuugaaagcuugucucgcauugucgacgaucuaacuauaaaucuaugcaacucagugaaagggccuggggaucuggaagccccuuccaaucucguuaucucugaaagaacccaccgcucguucagagugagcuggacacccccaagugacagcguagacagauauaaggucgaauauuauccagugucaggaggaaagcggcaggaguucuaugugagcaggauggagacuagcaccguguugaaggaucuaaagccagaaaccgaauacguggugaacguauacucugugguggaagaugaauauucugaaccucugaaaggaacugaaaaaacguugcccguuccugucgugucccugaacaucuaugacgugggcccaacuacaaugcacguccaguggcagccuguggggggggcgaccggauauauucugucauacaagccuguuaaagauaccgagccaacacgccccaaagaggugcggcucgguccaaccguaaaugauaugcagcugaccgaccuaguacccaauaccgaauacgcaguuaccguccaggccguuuugcaugacuugaccagugagccagugaccguccgugaaguuacucuuccucugcccagaccacaggaccuuaagcugcgagacgugacacacaguaccaugaauguguucugggaaccugugccagguaaaguucgaaaauauauuguccgauacaagacuccugaagaagaugugaaggaaguugagguugacagaagcgagacaaguaccuccuugaaagacuuauuuucccagacguuauacacaguuagugucuccgcuguucacgacgaaggagaaucacccccagugacugcacaggaaacaacuaggccaguaccagcaccaacuaaccucaaaaucaccgaagucacuagcgagggguuccgggguacgugggaccauggggcuucugaugucagcuuauauaggaucacaugggccccauucggaagcagcgauaagauggagaccauauuaaacggcgacgagaacaccuugguguucgaaaaucugaauccaaacaccauuuaugagguguccauuacagccauauacccagaugagucugagagugaugacuuaauugggucagagagaacuuuaccaauucucaccacccaagccccaaagagcggcccacgcaauuuacaggucuauaacgcaacaucuaacucccucacagugaaaugggauccagccagcggaagaguccagaaguaucgaauuacauaccagccuaguaccggagaaggcaacgagcagaccacaacuaucgggggcagacagaacuccgucguccuacagaaauuaaagccagacacaccuuacacuaucacuguuucuucccuauauccagacggcgagggcggcagaaugacagggcgagguaaaaccaagccacucaacaccguccgaaaucugagaguuuacgacccaaguaccaguacccugaacgucagaugggaucaugcugaagggaacccgaggcaauacaaguuguuuuaugcgccugccgccggaggucccgaggaguuagugccaaucccggguaacacuaauuacgcuauccugcgaaaccuccagccugacacuuccuacaccgucacuguggugccaguguacacugagggcgacgggggcagaacuagugauaccggccgcacgcuuaugaggggcuuggccagaaacguacaagucuacaauccuacaccaaauucccuagacgugaggugggaccccgccccuggaccuguucugcaguauagagugguuuauagcccgguggauggcaccagacccucagaaaguaucguuguccccgguaacacccgcaugguccaucuggagagacucauucccgacacgcuguacagcgugaaucugguagcgcuguauuccgacggagaagggaaccccaguccagcccaggggagaacauuaccccgguccgggccccgcaaccugagagucuuuggggaaaccacuaauucguugucagucgccugggaccaugccgaugggccaguucagcaguacagaaucauuuauucaccaaccgugggcgauccuauugaugaguacacuacaguccccggacgcaggaauaauguuaucuuacagccccuacagccugauacccccuacaaaaucaccguaauugccguauacgaagacggugacgggggccaucucaccggcaauggcagaaccgugggcuuacuuccuccccagaacauucacaucucagacgagugguacacacgcuuucgagucucuugggaccccaguccuucccccguguuaggauauaagauuguguacaagccagugggcagcaaugagccaauggaggccuucguaggggaaaugaccucauacacccuccacaaucugaauccaucuaccacauacgacgucaacguguacgcccaguacgauucuggguugucagucccuuugaccgaccagggcacuacucuuuaucuuaaugugaccgacuugaagacauaucaaauuggcugggauacauuuugcguaaaguggaguccacacagagcagcgaccucuuacagauuaaagcugucuccugcagauggaacacgcggacaggagauuacagugagaggaucagaaacuagccauugcuucacuggccucagcccugauacugacuacggugugacgguauuuguccaaaccccaaaccucgaggguccuggaguaucagucaaagagcauaccaccguuaaaccgacagaagcgccuacagagcccccuacaccucccccgccacccaccaucccucccgcccgcgacguguguaaaggcgccaaggccgauauaguuuuuuugaccgaugcuagcuggagcauuggggaugacaauuuuaauaaggugguuaaguuuauuuucaauaccgugggugguuuugacgaaauuucucccgcuggcauucagguuucauuuguccaguacagugacgaggucaaguccgaguuuaagcucaacaccuacaaugauaaagcccucgcauugggcgcucuccagaacaucagauauagaggaggaaacacaagaacagguaaagcacugaccuuuauuaaggaaaaaguacuuacaugggagagugggaugaggaaaaauguacccaaagugcuagugguggucacggacgguagaucacaggacgaaguuaagaaagccgcacucguuauucaacaaucaggguuuagugucuuuguagugggcguggccgauguggauuacaacgaacuggccaauaucgccaguaagcccucagaacgucacgucuuuaucguggaugauuuugaaucauucgagaagaucgaggauaauuuaauuacguucgugugugagaccgccacaaguaguugcccacucauuuaccucgacggcuauacgucaccaggcuuuaaaauguuagaggcuuacaaucugacagaaaaaaauuuugcuucugugcagggagucucacucgaaucaggcucguuuccaucuuauucugcuuaccgcauacaaaaaaaugcauuugugaaucaaccaaccgccgaucugcaccccaacggucuuccucccuccuacacgaucauccugcucuuccgccuguuacccgaaaccccuucggauccuuuugcuaucuggcaaaucacagaccgugacuauaagccgcagguaggcgugaucgccgacccaucuagcaaaacauuaaguuuuuucaacaaggauacucgaggagaaguucaaacaguaacuuucgauacagaggaggucaagacccuuuucuacggcagcuuccauaaacgcgaugaaggcaaguguccagccuuuccgaacaguugcacaugcacacaagacucuguugguccuccggguccuccugguccugccggcgggccgggugccaaggguccaagaggcgaacguggcauauccggugcuauuggcccgccaggaccgcggggagauaucggccccccaggaccucaaggaccuccaggaccccaagggccuaacggacuaucuaucccgggugagcagggcagacagggcaugaaaggugacgcuggagagccuggacuuccagggcgcacagguacaccgggccucccugguccaccagggccuauggguccuccuggcgaccgcggguucacagggaaggauggcgcuaugggaccccgcgggccucccgggccgcccggcucacccggcuccccaggcgugacuggcccaaguggcaaaccagguaagcccggagaucauggcagaccaggaccgucaggccucaagggggaaaaaggugaccggggagacauugccucucagaauaugaugagggcuguugccagacaagugugcgaacagcucauuaguggacaaaugaaucgguuuaaucagaugcugaaucagauccccaacgacuaucaauccaguagaaaucagccuggcccccccggcccacccggaccucccggcuccgcaggugcacgaggggaacccggcccuggcggacgcccagguuucccaggaacccccggcaugcagggcccccccggcgaacgcggccuuccaggggagaaaggggagcgcggcacuggaaguucaggaccaagaggccugccuggacccccagguccacaaggcgaaucacggacagguccacccggaaguacaggcucuagaggcccuccaggaccacccggucggccugggaacagcgggaucagaggcccccccggaccgccaggauacugcgacucuucucaaugugccaguaucccauauaauggccaaggguaccccggaucggguuag

SEQ ID NO: 145712 - protein, 1224 aa, Artificial Sequence
  derived and/or modified sequence
MLTKFETKSARVKGLSFHPKRPWILTSLHNGVIQLWDYRMCTLIDKFDEHDGPVRGIDFHKQQPLFVSGGDDYKIKVWNYKLRRCLFTLLGHLDYIRTTFFHHEYPWILSASDDQTIRVWNWQSRTCVCVLTGHNHYVMCAQFHPTEDLVVSASLDQTVRVWDISGLRKKNLSPGAVESDVRGITGVDLFGTTDAVVKHVLEGHDRGVNWAAFHPTMPLIVSGADDRQVKIWRMNESKAWEVDTCRGHYNNVSCAVFHPRQELILSNSEDKSIRVWDMSKRTGVQTFRRDHDRFWVLAAHPNLNLFAAGHDGGMIVFKLERERPAYAVHGNMLHYVKDRFLRQLDFNSSKDVAVMQLRSGSKFPVFNMSYNPAENAVLLCTRASNLENSTYDLYTIPKDADSQNPDAPEGKRSSGLTAVWVARNRFAVLDRMHSLLIKNLKNEITKKVQVPNCDEIFYAGTGNLLLRDADSITLFDVQQKRTLASVKISKVKYVIWSADMSHVALLAKHAIVICNRKLDALCNIHENIRVKSGAWDESGVFIYTTSNHIKYAVTTGDHGIIRTLDLPIYVTRVKGNNVYCLDRECRPRVLTIDPTEFKFKLALINRKYDEVLHMVRNAKLVGQSIIAYLQKKGYPEVALHFVKDEKTRFSLALECGNIEIALEAAKALDDKNCWEKLGEVALLQGNHQIVEMCYQRTKNFDKLSFLYLITGNLEKLRKMMKIAEIRKDMSGHYQNALYLGDVSERVRILKNCGQKSLAYLTAATHGLDEEAESLKETFDPEKETIPDIDPNAKLLQPPAPIMPLDTNWPLLTVSKGFFEGTIASKGKGGALAADIDIDTVGTEGWGEDAELQLDEDGFVEATEGLGDDALGKGQEEGGGWDVEEDLELPPELDISPGAAGGAEDGFFVPPTKGTSPTQIWCNNSQLPVDHILAGSFETAMRLLHDQVGVIQFGPYKQLFLQTYARGRTTYQALPCLPSMYGYPNRNWKDAGLKNGVPAVGLKLNDLIQRLQLCYQLTTVGKFEEAVEKFRSILLSVPLLVVDNKQEIAEAQQLITICREYIVGLSVETERKKLPKETLEQQKRICEMAAYFTHSNLQPVHMILVLRTALNLFFKLKNFKTAATFARRLLELGPKPEVAQQTRKILSACEKNPTDAYQLNYDMHNPFDICAASYRPIYRGKPVEKCPLSGACYSPEFKGQICRVTTVTEIGKDVIGLRISPLQFR

SEQ ID NO: 145713 - DNA, 3675 bp, Artificial Sequence
  derived and/or modified sequence
atgttgaccaagtttgagacaaaatccgcacgggtgaaaggcttgtctttccacccaaagcgtccatggattctcacctcgctgcacaacggagtgattcaactgtgggactaccgcatgtgtaccctcatcgacaagttcgatgagcacgacgggcctgtcaggggcatcgattttcacaaacagcagccacttttcgtttctggaggtgatgattacaaaattaaagtgtggaactataaactgcgacggtgtcttttcaccttgcttggccatctggattacatccgcacaacattttttcatcacgaatatccctggatcttgagtgcatccgatgaccagactatacgcgtatggaattggcagagccgtacctgtgtgtgcgtgctgacaggacataatcactacgtcatgtgcgctcagtttcatcccacagaagacctggtagtatcagctagcctcgaccagacagtgcgtgtgtgggacattagcgggctacgcaagaagaatctctcacccggagccgtcgaatcagatgtgcggggcatcacaggggttgatctctttgggactactgacgctgttgtgaagcatgtgttagaggggcatgaccggggagtaaattgggccgcctttcaccccaccatgccccttatagtaagcggggcagatgaccgtcaggtgaagatctggagaatgaacgaaagtaaggcgtgggaggtggacacctgtagagggcattataataacgtgtcttgcgcagtgtttcatccccgtcaggaactgattctctccaacagcgaggacaagagcattcgggtttgggacatgtccaaacggactggcgtgcagaccttcagacgcgatcatgatcgattttgggtgttggccgcccatccaaatctgaatctatttgcagctggacatgatggagggatgattgtctttaagcttgaacgagagcggccggcctatgccgttcacggtaatatgctgcactacgtgaaggaccggttcttaagacaactggacttcaatagcagcaaggacgtggctgtgatgcaattgagatcagggtccaaatttcccgtctttaacatgtcttacaaccccgcagaaaatgccgtcttgttgtgtactcgggcaagcaatctggagaactctacatatgacttgtacacaatcccaaaggatgcggattctcagaaccctgacgcacctgagggtaaaaggtctagtggcttgacggccgtgtgggtcgctagaaatcgctttgctgtgttggacagaatgcactccctgctcataaagaacctaaagaacgagattactaaaaaggttcaggtacccaattgcgacgagattttttatgccgggactggcaaccttctgctgagggatgctgactccattacacttttcgacgttcaacagaagagaactctcgctagcgtgaagatttctaaggttaagtacgtgatctggagtgccgacatgtctcatgtcgccctgctcgccaagcacgcgattgtgatttgcaataggaagcttgatgctctgtgcaacatacacgaaaatattcgagtaaaaagtggcgcctgggacgagtctggggtgtttatctataccacttcgaatcatattaagtatgctgtgacaacaggtgatcacggcatcatacgaacactcgaccttcccatctacgttacgagagtcaaaggcaacaacgtgtactgcctcgaccgagaatgtagaccaagagtactgaccattgatcccacagagtttaagttcaagctggccctcattaatcgcaagtatgacgaggtactacacatggtgaggaatgccaagcttgtgggtcagtccataatagcatatcttcagaagaaaggctaccctgaggtagcactccacttcgtgaaggatgaaaagacccggttttccttggctctagagtgcggaaacatcgaaattgcccttgaagccgccaaagcactagatgacaagaactgttgggaaaagctcggcgaggtggcactgttacagggcaaccaccagatcgtggaaatgtgctaccaaagaaccaagaatttcgacaagctgagctttctctatttaataactggcaacctcgagaaactccgcaaaatgatgaagatcgctgagatcagaaaggacatgtccggccattatcagaatgcactgtaccttggcgatgttagcgaacgcgtgcgcatcctgaagaattgtgggcaaaagagcctggcttacctgaccgctgccacacacggtctggacgaagaggctgaaagcttgaaggagacctttgacccagagaaggaaacgatccccgacatcgatccgaacgcaaagctacttcagcccccagcccctatcatgcctctggataccaattggcccctgctcacggtaagcaagggattctttgaaggcacaatcgctagcaaaggtaaagggggggcgttagccgccgatatcgatattgacaccgtggggaccgagggctggggtgaagacgcggagttacagctggacgaggatggcttcgtggaagcgaccgagggtctcggcgatgatgccttgggcaagggtcaggaagagggtggcggttgggacgtggaggaagatctggaacttccacctgaactcgacattagtcccggcgctgcaggcggcgccgaggatgggttttttgtgcctccaacaaagggtaccagcccaactcagatttggtgcaacaactcgcaactcccagtcgatcacatcttggctggttcctttgagactgcaatgcgcctgctgcacgatcaagttggcgtcattcagtttgggccctacaaacagctgttcctgcagacatacgctcgggggagaacgacctaccaggccttaccatgcctgcccagcatgtacggctatccaaataggaattggaaagacgcagggctgaagaatggagtgcctgcagtggggctgaagcttaatgacctcattcaaaggctgcaactgtgttatcagcttactacggtggggaagtttgaagaagctgtggagaagttccggtctatccttttgtcagttcccttactcgtggtcgataataaacaagaaatagccgaagcccagcagctcatcactatttgtagggaatatatcgtgggcttgtctgtggagacagagagaaagaagctgcccaaagaaacactcgaacaacagaaacggatatgcgagatggcggcctactttactcactccaacctgcagcctgtgcatatgatattggtattaaggactgctctgaacctgtttttcaagttgaaaaattttaagaccgctgctacatttgcacgccgactgttagaactgggccccaagcccgaggtggcccagcagacccggaagatcctaagcgcctgtgagaagaaccctacagacgcctatcaactgaactacgatatgcacaacccatttgatatctgcgccgcttcctaccgccctatctatagaggtaagccggttgagaagtgtcctctgagcggggcttgttattctcctgaattcaaaggtcagatttgtcgggtgaccactgtaacagagatcggcaaggacgtaatcgggctgagaatcagccccttgcaatttaggtag

SEQ ID NO: 145714 - DNA, 3675 bp, Artificial Sequence
  derived and/or modified sequence
atgctgaccaagtttgagaccaagagcgcccgggtgaagggcctgtccttccaccccaagaggccctggatcctgaccagcctgcacaacggggtcatccagctgtgggactacaggatgtgcaccctgattgacaagtttgatgaacatgatggccctgtgcggggcatcgacttccacaagcagcagcccctgtttgtgtctggaggagatgactacaagatcaaggtgtggaactacaagctgcggcgctgcctcttcaccctgctgggccacctggactacatccgcaccaccttcttccaccacgagtacccctggatcctgagcgccagtgatgaccagaccatccgggtgtggaactggcagagcaggacctgtgtgtgtgtgctgaccggccacaaccactacgtgatgtgtgcccagttccaccccacagaggacctggtggtgtctgccagcctggaccagacagtgcgggtgtgggacatcagcggcctgaggaagaagaacctgagccctggagctgtggagagtgatgtgcggggcatcactggagtggacctgtttggcaccacagatgctgtggtgaagcacgtgctggagggccatgacagaggagtgaactgggccgccttccaccccaccatgcccctcatcgtgtctggagcagatgaccggcaggtgaagatctggaggatgaatgaaagcaaggcctgggaggtggacacctgccggggccactacaacaacgtgtcctgtgctgtgttccacccccggcaggagctgatcctgagcaacagcgaggacaagagcatccgggtgtgggacatgagcaagaggactggagtgcagaccttccggcgggaccatgaccgcttctgggtgctggccgcccaccccaacctgaacctgtttgctgctggccatgatggcggcatgattgtgttcaagctggagcgggagaggcctgcctatgctgtgcacggcaacatgctgcactacgtgaaggaccgcttcctgcggcagctggacttcaacagcagcaaggatgtggccgtgatgcagctgcggagcggcagcaagtttcctgtgttcaacatgagctacaacccagcagaaaatgctgtgctgctgtgcacccgggccagcaacctggagaacagcacctatgacctgtacaccatccccaaggatgctgacagccagaacccagatgcccctgagggcaagaggagcagcggcctgacagctgtgtgggtggccaggaacagatttgctgtgctggacaggatgcacagcctgctgatcaagaacctgaagaatgagatcaccaagaaggtgcaggtgcccaactgtgatgagatcttctacgccggcactggaaacctgctgctgagagatgctgacagcatcaccctgtttgatgtgcagcagaagaggaccctggcctctgtgaagatcagcaaggtgaagtatgtgatctggagcgctgacatgagccacgtggccctgctggccaagcacgccatcgtcatctgcaacaggaagctggatgccctgtgcaacatccacgagaacatccgggtgaagagcggggcctgggatgagagcggggtcttcatctacaccaccagcaaccacatcaagtatgctgtgaccactggagaccacggcatcatccgcaccctggacctgcccatctacgtgaccagggtgaagggcaacaacgtgtactgcctggaccgggagtgccggccccgggtgctgaccatcgaccccacagagttcaagttcaagctggccctgatcaacagaaaatatgatgaggtgctgcacatggtgagaaatgccaagctggtgggccagagcatcatcgcctacctgcagaagaagggctacccagaggtggccctgcactttgtgaaggatgagaagacccgcttcagcctggccctggagtgtggcaacatcgagatcgccctggaggccgccaaggccctggatgacaagaactgctgggagaagctgggggaggtggccctgctgcagggcaaccaccagatcgtggagatgtgctaccagaggaccaagaactttgacaagctgtccttcctgtacctgatcaccggcaacctggagaagctgaggaagatgatgaagattgctgagatcaggaaggacatgagcggccactaccagaatgccctgtacctgggagatgtgtctgagcgggtgcgcatcctgaagaactgtggccagaagagcctggcctacctgacagctgccacccacggcctggatgaggaggccgagagcctgaaggagacctttgatcctgagaaggagaccatcccagacatcgaccccaatgccaagctgctgcagcccccagcccccatcatgcccctggacaccaactggcccctgctgactgtgtccaagggcttctttgagggcaccatcgccagcaaaggaaaaggaggagccctggccgctgacattgatattgacacagtgggcacagagggctggggagaagatgctgagctgcagctggatgaagatggctttgtggaggccacagagggcctgggagatgatgccctgggcaagggccaggaggagggcggcggctgggatgtggaggaggacctggagctgcccccagagctggacatcagccctggagctgctggaggagcagaagatggcttctttgtgccccccaccaagggcaccagccccacccagatctggtgcaacaacagccagctgcctgtggaccacatcctggccggcagctttgaaacagccatgaggctgctgcatgaccaggtgggcgtcatccagtttggcccctacaagcagctgttcctgcagacctacgcccggggccgcaccacctaccaggccctgccctgcctgcccagcatgtatggctaccccaacagaaactggaaggatgctggcctgaagaatggagtgcctgctgtgggcctgaagctgaatgacctgatccagaggctgcagctgtgctaccagctgaccaccgtgggcaagtttgaggaggccgtggagaagttccgcagcatcctgctgtctgtgcccctgctggtggtggacaacaagcaggagattgctgaggcccagcagctgatcaccatctgccgggagtacatcgtgggcctgtctgtggagacagagaggaagaagctgcccaaggagaccctggagcagcagaagaggatctgtgagatggccgcctacttcacccacagcaacctgcagcctgtgcacatgatcctggtgctgaggacagccctgaacctcttcttcaagctgaagaacttcaagacagctgccacctttgcccggcggctgctggagctgggccccaagccagaggtggcccagcagaccaggaagatcctgagcgcctgtgagaagaaccccacagatgcctaccagctgaactatgacatgcacaacccctttgacatctgtgccgccagctaccggcccatctaccggggcaagcctgtggagaagtgccccctgagcggggcctgctacagccctgagttcaagggccagatctgccgggtgaccaccgtgacagaaattggcaaggatgtgattggcctgcgcatcagccccctgcagttcagatag

SEQ ID NO: 145715 - DNA, 3675 bp, Artificial Sequence
  derived and/or modified sequence
atgctgaccaagttcgagaccaagagcgcccgggtgaagggcctgagtttccatccaaagaggccttggattttaacatccttgcataacggcgtgattcagctgtgggactacagaatgtgcactcttatagataagtttgacgaacacgacgggccagtgagggggatcgacttccataagcaacaaccgttgttcgtatcaggaggggacgattacaaaattaaggtctggaattataaacttaggagatgcctctttactttactcgggcacctggactacatccgcactacattcttccaccacgaatacccatggatcttatccgccagtgacgaccaaaccattcgggtgtggaactggcagtccagaacttgcgtatgcgtgctgaccgggcacaatcactatgtgatgtgcgcacaatttcaccctactgaagacctggtggtctccgcctcacttgaccagacagtaagggtgtgggacatctctggcctgagaaagaagaatctaagtcccggggccgtcgagagtgacgtcagaggaatcacaggggtggaccttttcggtaccacagacgctgtggtgaaacacgtcctggagggccatgacaggggagtcaactgggcagcatttcatcccaccatgcctcttattgtgagtggcgctgatgatcgtcaagtcaaaatatggaggatgaacgagagcaaagcctgggaagtggatacttgtaggggacattataataatgtcagctgcgcggtgttccacccacgacaggagctgatcctgagcaactcagaggacaagtccatcagagtctgggatatgagcaagcgcacaggggttcagacctttcgaagggaccatgatcggttttgggtcctcgcagcccacccgaatttaaacctgtttgccgctggacatgatggaggaatgattgtttttaagctagagcgcgagcgccctgcctatgccgtccacggcaatatgctacactatgtgaaggatcgcttccttcgtcagctggatttcaatagttccaaggatgtagctgtgatgcaacttagatcaggttccaaatttcccgtgttcaacatgagttacaatcccgccgaaaatgcggttctgctctgcacacgcgccagcaatctggaaaatagtacatacgacttgtacactatcccaaaggacgccgattctcagaatcccgacgctcctgaggggaagcgcagtagcgggctcacggcagtgtgggttgccaggaatcgcttcgcagtgctggaccgaatgcactccctgctgatcaagaacttgaagaatgaaattaccaagaaagtccaggtacccaattgcgacgagattttctatgcgggtactggtaacctgcttttaagggatgcagactccattacactattcgacgtgcagcagaaaaggaccctcgcctctgtgaagatcagtaaagtgaaatacgtaatctggtcagcagatatgtcacatgttgccctgctggctaagcacgccatcgttatctgtaatcgtaagctggatgcattatgcaacatccatgagaatatcagagtcaaatccggcgcttgggatgagtctggcgttttcatatataccacatctaaccatattaagtatgcagtaaccacaggcgaccacggcattatccgcacactggatttgccaatttacgttacccgggtcaagggaaataatgtttactgcctagaccgcgaatgtcgaccgcgtgtgctgacgatcgacccgacggagtttaaatttaagctggccttgatcaaccggaagtacgatgaagtcctacatatggttcgcaacgctaaactggtgggacaatctattattgcctacctacagaaaaaaggataccctgaagtggccttgcatttcgttaaggatgagaagacgcggttctcactggcgctggagtgcggcaacatcgaaatagccctcgaggctgcaaaagccctagacgataaaaattgttgggagaagctgggggaagtagcactgcttcagggaaatcaccaaatcgttgagatgtgttaccagaggacaaaaaatttcgacaagctttctttcctgtacctaatcactggcaacctggaaaagctgcgaaaaatgatgaagatagcggagattagaaaggacatgtccgggcactatcagaacgccctttatcttggcgatgtctccgagagagtgaggatcctgaagaattgtgggcagaagagcctcgcctatctgacagctgccacgcacggcctagatgaagaggctgaatcactcaaagagaccttcgatcctgaaaaggagactattccggatattgatcccaacgctaagcttttgcagcccccagcaccgattatgcctctcgataccaactggccactgctaaccgtcagtaagggtttttttgagggcactattgccagcaagggaaaggggggtgcactggcggcagacatcgacattgatacggtcgggaccgaaggatggggggaggacgcagagctccagctggatgaagacggatttgtggaggctacagagggtctcggtgacgacgccctcggcaagggccaagaagagggtggtggttgggacgttgaggaggacctggagttaccccctgaattggatattagtcccggtgccgctgggggcgcagaagacgggttttttgtacctccaaccaagggtacaagtccaactcaaatatggtgtaacaatagccagctgcccgtggaccatatcctcgctggctctttcgaaactgcaatgcgtctgctccacgatcaggttggggtgattcagttcgggccctacaaacagttgttcttgcagacatacgcccggggtcgtacgacataccaagctttgccctgcctgccctccatgtacggatatcccaatcgcaattggaaggatgcaggcctcaaaaacggagtcccagcggttggtctgaaactgaatgatctgatccagcggcttcagctgtgctaccagctaaccaccgtgggtaagtttgaagaggccgtggagaaattcaggtctattctgctgtctgtcccactgttggtggtggacaataagcaggagattgcggaggcccagcaattgattacaatctgccgcgaatatattgtgggactgagcgtggagaccgaacgtaaaaagcttccaaaggagaccctcgaacaacagaagcgaatctgcgaaatggctgcgtacttcacgcattctaatctccagccggtccatatgattttagtacttcggacagccctgaacttgttctttaaactgaagaatttcaagactgcggccacctttgcacgccggttgttagagctggggcccaaacccgaggttgcacagcagacaagaaagatcttaagcgcatgtgaaaagaacccaacagacgcataccagttaaattatgacatgcacaatccttttgatatttgcgccgcatcttaccgcccgatctatcgcggaaaaccagtggaaaagtgcccactatccggagcctgctattctccagagttcaagggacagatttgtagagtcactaccgtcaccgagatagggaaggatgtaatcgggctacgtattagcccactgcagtttaggtag

SEQ ID NO: 145716 - DNA, 3675 bp, Artificial Sequence
  derived and/or modified sequence
atgttaaccaagtttgaaaccaagagcgctcgcgtcaagggtctgagctttcatcccaagcgaccctggatccttacttcgttacataacggggtgatccagctatgggactatagaatgtgtaccctgatcgacaagttcgacgaacatgacgggcctgtcagggggatcgattttcacaaacaacagccactgttcgtgtccggtggcgacgattataagataaaagtgtggaactataaactgagacgatgcctgttcacgctgctaggacacctggactatattcgcaccactttttttcaccacgagtacccctggattctgtcggctagcgatgatcagacgatccgggtctggaactggcagagccgcacctgtgtgtgcgttctgacgggccacaaccactacgtcatgtgcgcgcagtttcaccccacggaagaccttgttgtgtccgctagcctggatcaaacagtgcgggtctgggacatctctggcttgagaaagaaaaacctgtcccctggggcagtcgagagtgatgtcaggggcattacaggggtcgatttgttcgggaccacggatgccgtcgtcaagcacgtcctcgagggacatgataggggcgttaactgggccgcatttcacccaacgatgcccctgatagtctccggtgctgacgaccgccaggttaaaatctggcgaatgaacgagtctaaggcgtgggaagttgacacatgccgcggacactacaataatgtgtcgtgcgcagtctttcaccccagacaggagttgatattaagcaatagcgaggataagtccatacgagtctgggatatgtccaaaagaaccggagtgcagaccttcaggcgagaccatgaccggttttgggtgctggctgcgcaccctaacctgaatctcttcgctgccggtcacgacggcggaatgatcgtcttcaaactggagagggagcggccagcatatgcagtgcatggcaacatgttgcattacgttaaggatagatttctcagacagttggactttaatagcagcaaggatgtggcagttatgcagctacgtagcggttctaaattcccagtttttaacatgagttacaaccccgcagaaaatgcagtactgctgtgtacccgggctagtaacctagaaaactccacttacgacttgtatacaatccctaaggacgccgattcacaaaatccggacgcacccgagggaaagcgctcctcggggctaactgctgtctgggtggcaaggaacagatttgccgttcttgatcgaatgcactcactcctcattaagaatcttaagaacgagattacaaaaaaggtgcaggttccaaactgtgacgagattttctacgcaggcaccgggaatttgttgctcagggacgctgactctatcactctgttcgacgttcagcagaaaaggacgctggcctctgtgaaaatttcgaaggtgaaatatgtgatctggagcgccgacatgtcccacgtagccctcctcgctaagcatgctatagtaatatgcaatcggaaactggatgccctttgcaatatacatgagaacatcagagtgaaatccggcgcatgggacgagtctggtgtattcatctatactacaagcaaccacatcaagtatgccgtcacgaccggcgaccatggaatcatcaggaccctggatttgccaatatacgtgacccgggtcaaggggaataacgtctactgtctggacagggagtgtagaccaagagtgttgactatcgacccgaccgaattcaaatttaaactggccctgatcaacaggaagtatgatgaagttctgcatatggttcggaatgccaaacttgtgggtcagtccatcatagcctatttgcagaaaaaagggtatccggaggtggctctgcatttcgtcaaggatgagaagacacgcttttccctggctctggaatgcggtaatatcgagatcgcactggaagctgcgaaagccctggatgacaagaactgttgggagaaactcggagaggtcgcacttctgcagggcaaccaccagatcgtggaaatgtgttaccaacgcactaaaaatttcgacaagttaagttttctttatctgatcactggaaacctggaaaagctcagaaagatgatgaagattgccgaaatacgtaaagacatgtctggccactaccagaacgccctatacctgggcgatgtgagtgaacgagtgcgcatcctcaagaactgtggccagaagtcgctggcatatctcactgcggctacgcatggcctagacgaggaagcggagagtctgaaggaaacgtttgacccagagaaggagaccatccccgatatcgaccccaacgcaaaactgctccagccaccagccccaataatgccactcgataccaattggccactgctgaccgtcagtaaaggatttttcgaaggaacaattgcttccaagggcaagggaggcgctttggcagcggatattgatattgataccgttggtacggaggggtggggggaagacgctgagttgcagttggatgaggacggattcgtggaggccacagagggacttggggacgatgcccttggcaagggtcaagaggagggcggtggctgggacgtagaagaggatctagaactgccgccagagctggacatatctcccggagccgctggcggtgccgaagatggattcttcgttccccctactaaggggacaagccccacacagatttggtgcaataattcccagctgcctgtggaccacattctggccggatctttcgagaccgcaatgcgcttgctgcacgaccaagtaggagtgatccaatttggtccctacaagcagctgttcttgcaaacatacgcaagaggcaggacaacgtatcaggcactgccttgtctgccctctatgtatggatatcctaatcggaactggaaggacgctggcctgaagaatggtgtcccagccgtcggacttaagttgaatgatcttatccagagactgcaattatgttatcagttgaccactgttgggaaattcgaagaggccgtagagaaatttaggagcatcttgttgtccgtgccgctcctggtggtggacaataaacaggagatcgccgaggctcagcaattgattactatttgtagggaatatattgtgggactgtctgtggagaccgagcggaaaaaactccccaaagaaacactggagcagcagaagcgcatctgcgaaatggccgcttactttacccactcaaacctgcagcccgttcacatgattctcgtgctacgaaccgcactgaatttgttttttaagttgaaaaatttcaaaactgcagccacctttgcccgaaggcttcttgaactggggcctaaaccggaagtcgcccagcaaacccgcaagatcctctccgcctgtgagaagaaccccactgacgcgtaccagctgaattacgatatgcacaacccgtttgatatctgcgctgcttcttaccgcccaatctataggggtaagcccgtggagaagtgccccttaagtggagcctgctattcaccggaatttaaaggccagatctgccgagtgacaacagttacagagatcggaaaggatgtgatcggcttgcggattagtcccttgcagtttcgctag

SEQ ID NO: 145717 - DNA, 4789 bp, Artificial Sequence
  derived and/or modified sequence
ccatcttgcctctctgctgagcggaagcccccgttcggctcctgtctgttagcggcctctctaggctaccactgacaccgtctctgtggcccggagcctaagagaccggaagttcgtgtttccaggcgcttccggaaaccgcgggagagggtcgctgacgtggaggcgtccgaagggcagcagggtgtgtcggggctcggattaagacatcggagtcggagacctgagagatgttaaccaaattcgagaccaagagcgcgcgggtcaaagggctcagctttcaccccaaaagaccttggatcctgactagtttacataatggggtcatccagttatgggactatcggatgtgcactctcattgacaagtttgatgaacatgatggtccagtgcgaggcattgacttccataagcagcagccactgttcgtctctggaggagatgactataagattaaggtttggaattacaagcttcggcgctgtcttttcacattgcttgggcacttagattatattcgcaccacgttttttcatcatgaatatccctggattctgagtgcctccgatgatcagaccatccgagtgtggaactggcaatctagaacctgtgtttgtgtgttaacagggcacaaccattatgtgatgtgtgctcagttccaccccacagaagacttggtagtatcagccagcctggaccagactgtgcgcgtttgggatatttctggtctgaggaaaaaaaacctgtcccctggtgcggtggaatcggatgtgagaggaataactggggttgatctatttggaactacagatgcagtggtgaagcatgtactagagggtcacgatcgtggagtaaactgggctgccttccaccccactatgccccttattgtatctggggcagatgatcgtcaagtgaagatctggcgcatgaatgaatcaaaggcatgggaggttgatacctgccggggccattacaacaatgtatcttgtgccgtcttccaccctcgccaagagttgatcctcagcaattctgaggacaagagtattcgagtctgggatatgtctaagcggactggggttcagactttccgcagagaccatgatcgtttctgggtcctagctgctcaccctaaccttaacctctttgcagcaggccatgatggtggtatgattgtgtttaagctggaacgggaacggccagcctatgctgttcatggcaatatgctacactatgtcaaggaccgattcttacgacagctggatttcaacagctccaaagatgtagctgtgatgcagttgcggagtggttccaagtttccagtattcaatatgtcatacaatccagcagaaaatgcagtcctgctttgtacaagagctagcaatctagagaatagtacctatgacctgtacaccatccctaaagatgctgactcccagaatcctgatgcgcctgaagggaaacgatcctcaggcctgacagccgtttgggtcgctcgaaatcggtttgctgtcctagatcggatgcattcgcttctgatcaagaatctgaagaatgagatcaccaaaaaggtacaggtgcccaactgtgatgagatcttctatgctggcacaggcaatctcctgcttcgagatgcggactctatcacactctttgacgtacagcagaagcggactctggcatctgtgaagatttctaaagtgaaatacgttatctggtcagcagacatgtcacatgtagcactactagccaaacacgccattgtgatctgtaaccgcaaactggatgctttatgtaacattcatgagaacattcgtgtcaagagtggggcctgggatgagagtggggtatttatctataccacaagcaaccacatcaaatatgctgtcaccactggggaccacgggatcattcgaactctggatttacccatctatgtcacacgggtgaagggcaacaatgtatactgcctagacagggagtgtcgtccccgggtactcaccattgatcccactgagttcaaattcaagctggccctgatcaacagaaaatatgatgaggtactgcacatggtgaggaatgccaaactagttggccagtctattattgcttatctccagaagaagggctatcctgaagtggcactgcattttgtcaaggatgagaaaactcgctttagtctggcactggagtgtggaaacattgagattgctctggaagcagccaaagcactggatgacaagaactgctgggaaaagctgggagaagtggccctgctgcaggggaaccaccagattgtggaaatgtgctatcagcgtaccaaaaactttgacaaactttccttcctgtatcttatcactggcaacttagaaaaacttcgcaagatgatgaagattgctgagatcagaaaggacatgagtggccactatcagaatgccctatacctgggtgatgtgtcagagcgtgtgcggatcctgaagaactgtggacagaagtccctggcctatctcacagctgctacccatggcttagatgaagaagctgagagcctaaaggagacatttgacccagagaaggagacaatcccagacattgaccctaatgccaagctgctccagccacctgcacctatcatgccattggataccaattggcctttattgactgtatccaaaggattttttgaaggcaccattgccagcaaagggaagggaggagcactggctgctgacattgacattgacactgttggtacagagggctggggagaggatgcagagctgcagttggatgaagatgggtttgtggaggctacagaaggtttgggggatgatgctcttggcaagggacaggaagaaggaggtggctgggatgtagaagaagatctggagctccctcctgagctggatatatcccctggggcagctggtggggctgaagatggtttctttgtgcccccaaccaagggaacaagtccaactcagatctggtgtaataactctcagcttccagttgatcacatcctggcaggctctttcgaaacagccatgcggctccttcatgaccaagtaggggtaatccagtttggcccctacaagcaactgttcctacagacatacgcccgaggccgcacaacctatcaggctctgccctgcctaccctccatgtatggctatcctaatcgcaactggaaggatgcagggctgaagaatggtgtaccagctgtgggcctgaagcttaatgacctcatccaacggttgcagctgtgctaccagctcaccacagttggcaaatttgaggaggctgtggaaaaattccgttccatccttctcagtgtgccacttcttgttgtggacaataaacaagagattgcagaggcccagcagctcatcaccatttgccgtgagtacattgtgggtttgtccgtggagacagaaaggaagaagctgcccaaagagactctagaacagcagaagcgcatctgtgagatggcagcctatttcacccactcaaacctgcagcctgtgcacatgatcctggtgctgcgtacagccctcaatctgttcttcaagctcaagaacttcaagacagctgccacctttgctcggcgcctactagaactcgggcccaagcctgaggtggcccaacagacccgaaaaatcctgtctgcctgtgagaagaatcccacagatgcctaccagctcaattatgacatgcacaacccctttgacatttgtgctgcatcatatcggcccatctaccgtggaaagccagtagaaaagtgtccactcagtggggcctgctattcccctgagttcaaaggtcaaatctgcagggtcaccacagtgacagagattggcaaagatgtgattggtttaaggatcagtcctctgcagtttcgctaaggccccctttgtgtgcatgggtcagtcaccatatgttccccccagagaatgtgtctatatcctccttctaacagcaccttccccctgcagctactcttcagatctggctctctgtaccctaaaacctagtatctttttctcttctatggaaaatccgaaggtctaaacttgacttttttgaggtcttctcaacttgactacagttgtgctcataattgtccttgcctttccagcttaattattttaaggaacaaatgaaaactctgggctgggtggagtggctcatacctgtaatcccagcactttgggaggctacggtgggcagatcatctgaggccaggagttcgagacctgcctggccaacatggcaacaccccgtctctaataaaaatataaaaattagcctggcatggtagcatgcgcctatagtcccagctgctcaggaggctgaggcatgagaatcgcttgaacctaggaggtggaggttgcattcaactgagatcataccacttcattccagcctgggtgacagagcaagactctgtctcaaaaaaaaaaaaaaggaaaactctgtgatggacatttgtttagtaaatcccttcagtatttatccctcctttccccacagcagctttctttcctgtcaactagaaaggagcaggatgtaataaatacattttggtgtgactaggccacaccaactcttaatcatctcccattttccttagacatttaaatttcaaggcaggtaccctctgtgtactcagaaatttgaagaagttatttggttttccaaaatgcacactgcgggttattgatttgttctttacaactattgttctcatatttctcacactaaataaatctctatgagagcttcttga

SEQ ID NO: 145718 - DNA, 3675 bp, Artificial Sequence
  derived and/or modified sequence
atgctgaccaagttcgagaccaagagcgccagagtgaagggcctgagcttccaccccaagagaccctggatcctgaccagcctgcacaacggcgtgatccagctgtgggactacagaatgtgcaccctgatcgacaagttcgacgagcacgacggccccgtgagaggcatcgacttccacaagcagcagcccctgttcgtgagcggcggcgacgactacaagatcaaggtgtggaactacaagctgagaagatgcctgttcaccctgctgggccacctggactacatcagaaccaccttcttccaccacgagtacccctggatcctgagcgccagcgacgaccagaccatcagagtgtggaactggcagagcagaacctgcgtgtgcgtgctgaccggccacaaccactacgtgatgtgcgcccagttccaccccaccgaggacctggtggtgagcgccagcctggaccagaccgtgagagtgtgggacatcagcggcctgagaaagaagaacctgagccccggcgccgtggagagcgacgtgagaggcatcaccggcgtggacctgttcggcaccaccgacgccgtggtgaagcacgtgctggagggccacgacagaggcgtgaactgggccgccttccaccccaccatgcccctgatcgtgagcggcgccgacgacagacaggtgaagatctggagaatgaacgagagcaaggcctgggaggtggacacctgcagaggccactacaacaacgtgagctgcgccgtgttccaccccagacaggagctgatcctgagcaacagcgaggacaagagcatcagagtgtgggacatgagcaagagaaccggcgtgcagaccttcagaagagaccacgacagattctgggtgctggccgcccaccccaacctgaacctgttcgccgccggccacgacggcggcatgatcgtgttcaagctggagagagagagacccgcctacgccgtgcacggcaacatgctgcactacgtgaaggacagattcctgagacagctggacttcaacagcagcaaggacgtggccgtgatgcagctgagaagcggcagcaagttccccgtgttcaacatgagctacaaccccgccgagaacgccgtgctgctgtgcaccagagccagcaacctggagaacagcacctacgacctgtacaccatccccaaggacgccgacagccagaaccccgacgcccccgagggcaagagaagcagcggcctgaccgccgtgtgggtggccagaaacagattcgccgtgctggacagaatgcacagcctgctgatcaagaacctgaagaacgagatcaccaagaaggtgcaggtgcccaactgcgacgagatcttctacgccggcaccggcaacctgctgctgagagacgccgacagcatcaccctgttcgacgtgcagcagaagagaaccctggccagcgtgaagatcagcaaggtgaagtacgtgatctggagcgccgacatgagccacgtggccctgctggccaagcacgccatcgtgatctgcaacagaaagctggacgccctgtgcaacatccacgagaacatcagagtgaagagcggcgcctgggacgagagcggcgtgttcatctacaccaccagcaaccacatcaagtacgccgtgaccaccggcgaccacggcatcatcagaaccctggacctgcccatctacgtgaccagagtgaagggcaacaacgtgtactgcctggacagagagtgcagacccagagtgctgaccatcgaccccaccgagttcaagttcaagctggccctgatcaacagaaagtacgacgaggtgctgcacatggtgagaaacgccaagctggtgggccagagcatcatcgcctacctgcagaagaagggctaccccgaggtggccctgcacttcgtgaaggacgagaagaccagattcagcctggccctggagtgcggcaacatcgagatcgccctggaggccgccaaggccctggacgacaagaactgctgggagaagctgggcgaggtggccctgctgcagggcaaccaccagatcgtggagatgtgctaccagagaaccaagaacttcgacaagctgagcttcctgtacctgatcaccggcaacctggagaagctgagaaagatgatgaagatcgccgagatcagaaaggacatgagcggccactaccagaacgccctgtacctgggcgacgtgagcgagagagtgagaatcctgaagaactgcggccagaagagcctggcctacctgaccgccgccacccacggcctggacgaggaggccgagagcctgaaggagaccttcgaccccgagaaggagaccatccccgacatcgaccccaacgccaagctgctgcagccccccgcccccatcatgcccctggacaccaactggcccctgctgaccgtgagcaagggcttcttcgagggcaccatcgccagcaagggcaagggcggcgccctggccgccgacatcgacatcgacaccgtgggcaccgagggctggggcgaggacgccgagctgcagctggacgaggacggcttcgtggaggccaccgagggcctgggcgacgacgccctgggcaagggccaggaggagggcggcggctgggacgtggaggaggacctggagctgccccccgagctggacatcagccccggcgccgccggcggcgccgaggacggcttcttcgtgccccccaccaagggcaccagccccacccagatctggtgcaacaacagccagctgcccgtggaccacatcctggccggcagcttcgagaccgccatgagactgctgcacgaccaggtgggcgtgatccagttcggcccctacaagcagctgttcctgcagacctacgccagaggcagaaccacctaccaggccctgccctgcctgcccagcatgtacggctaccccaacagaaactggaaggacgccggcctgaagaacggcgtgcccgccgtgggcctgaagctgaacgacctgatccagagactgcagctgtgctaccagctgaccaccgtgggcaagttcgaggaggccgtggagaagttcagaagcatcctgctgagcgtgcccctgctggtggtggacaacaagcaggagatcgccgaggcccagcagctgatcaccatctgcagagagtacatcgtgggcctgagcgtggagaccgagagaaagaagctgcccaaggagaccctggagcagcagaagagaatctgcgagatggccgcctacttcacccacagcaacctgcagcccgtgcacatgatcctggtgctgagaaccgccctgaacctgttcttcaagctgaagaacttcaagaccgccgccaccttcgccagaagactgctggagctgggccccaagcccgaggtggcccagcagaccagaaagatcctgagcgcctgcgagaagaaccccaccgacgcctaccagctgaactacgacatgcacaaccccttcgacatctgcgccgccagctacagacccatctacagaggcaagcccgtggagaagtgccccctgagcggcgcctgctacagccccgagttcaagggccagatctgcagagtgaccaccgtgaccgagatcggcaaggacgtgatcggcctgagaatcagccccctgcagttcagatag

SEQ ID NO: 145719 - protein, 109 aa, Artificial Sequence
  derived and/or modified sequence
MAAVGVFSVSRLLGRSRPQLGRPMSSGAHGEEGSARMWKTLTFFVALPGVAVSMLNVYLKSHHGEHERPEFIAYPHLRIRTKPFPWGDGNHTLFHNPHVNPLPTGYEDE

SEQ ID NO: 145720 - protein, 109 aa, Artificial Sequence
  derived and/or modified sequence
MAVVGVSSVSRLLGRSRPQLGRPMSSGAHGEEGSARMWKTLTFFVALPGVAVSMLNVYLKSHHGEHERPEFIAYPHLRIRTKPFPWGDGNHTLFHNPHVNPLPTGYEDE

SEQ ID NO: 145721 - DNA, 330 bp, Artificial Sequence
  derived and/or modified sequence
atggccgccgtgggcgtgttcagcgtgagcagactgctgggcagaagcagaccccagctgggcagacccatgagcagcggcgcccacggcgaggagggcagcgccagaatgtggaagaccctgaccttcttcgtggccctgcccggcgtggccgtgagcatgctgaacgtgtacctgaagagccaccacggcgagcacgagagacccgagttcatcgcctacccccacctgagaatcagaaccaagcccttcccctggggcgacggcaaccacaccctgttccacaacccccacgtgaaccccctgcccaccggctacgaggacgagtag

SEQ ID NO: 145722 - DNA, 571 bp, Artificial Sequence
  derived and/or modified sequence
ttgcggcgctgcggcagtccagatcaaaaatggcggcagttggtgtgttctcggtttctcggctgctgggtcggtcccgcccacagctggggcggcctatgtcgagtggcgcccatggagaagagggctcagctcgcatgtggaagaccctcaccttcttcgtcgcgctccccggggtggcagtcagcatgctgaatgtgtacctgaagtcgcaccacggagagcacgagagacccgagttcatcgcctacccccatctccgcatcaggaccaagccgtttccctggggagatggtaaccatactctattccataaccctcatgtgaatccacttccaactggctacgaagatgaataaagagaatctggaccactacccgggcaccagggaccacagcactggtttggaccattactctgcacatggaccagaaaaagtatatgggaccttaagctcaccttctttacttgtatcaaatgatgactggtatactggtctcccatccctttgcttgtggcgggagatggcttaaataaataacttaaacttaaaaaaataaaataaaataa

SEQ ID NO: 145723 - DNA, 330 bp, Artificial Sequence
  derived and/or modified sequence
atggccgcggtgggagtcttcagcgtatcacggctgctgggacgcagtcggccacagctcggcaggcctatgtcttccggagcgcacggcgaggaaggtagcgcaagaatgtggaaaactttgactttctttgttgcgcttcccggagtggccgtgagcatgctgaatgtctacctcaagtctcaccacggcgagcatgaacgacccgagtttatagcatacccacatctgaggatacgcactaagccgtttccttggggggacgggaaccacaccctattccataacccacacgtaaaccctctgcccacaggatatgaggatgaatag

SEQ ID NO: 145724 - DNA, 330 bp, Artificial Sequence
  derived and/or modified sequence
atggctgctgtgggcgtcttctctgtgtcccggctgctgggccgcagccggccccagctgggccggcccatgagcagcggggcccatggagaggagggcagcgccaggatgtggaagaccctgaccttctttgtggccctgcccggggtggccgtgtccatgctgaatgtgtacctgaagagccaccacggggagcacgagaggcctgagttcatcgcctacccccacctgcgcatccgcaccaagcccttcccctggggagatggcaaccacaccctcttccacaacccccacgtgaaccccctgcccaccggctatgaagatgaatag

SEQ ID NO: 145725 - DNA, 330 bp, Artificial Sequence
  derived and/or modified sequence
atggccgccgtgggcgtgttcagcgtgagccggctgctgggccggagtcggccacagcttgggcggccaatgagctctggagcccacggcgaagagggttctgctcgcatgtggaagaccttaacattctttgtcgccttaccaggcgtggccgtgtcaatgctcaatgtgtatcttaaatcacaccatggtgaacacgaacgaccggagttcatcgcttatccgcacctgcgaattcgcaccaaaccatttccttggggggacgggaatcacacactcttccacaaccctcatgtgaatccgctccccactggctacgaggatgaatag

SEQ ID NO: 145726 - DNA, 330 bp, Artificial Sequence
  derived and/or modified sequence
atggctgccgtgggcgtcttttccgtctctcggctgctaggccgtagcaggccccagctgggcaggccaatgagttctggagcacacggcgaggagggctccgcacggatgtggaaaacgctcacctttttcgtggccctgccgggtgtagcggtatccatgctcaatgtgtacctaaaaagccatcacggggagcatgaacgcccagagtttattgcatatccccatctcaggatcaggacgaaacctttcccttggggagacggcaatcatacactgttccacaacccccatgtgaacccactgccgacaggttatgaagacgaatag

SEQ ID NO: 145727 - DNA, 330 bp, Artificial Sequence
  derived and/or modified sequence
atggctgtggtgggcgtaagcagcgtcagtcgacttcttggtcgcagccgacctcagctcggtcggcctatgagctccggggcccacggggaggagggctctgcaagaatgtggaagacgctcaccttcttcgtggctttaccaggagtggctgttagcatgctcaatgtgtacctcaagtcacatcacggggaacacgaaaggcctgagtttatcgcctaccctcatctgaggatccggaccaagccattcccctggggcgacgggaatcacacgctgttccacaacccccacgtcaatccacttcccacaggttacgaggatgagtag

SEQ ID NO: 145728 - DNA, 330 bp, Artificial Sequence
  derived and/or modified sequence
atggctgtggtgggcgtgtcctctgtgtcccggctgctgggccgcagccggccccagctgggccggcccatgagcagcggggcccatggagaggagggcagcgccaggatgtggaagaccctgaccttctttgtggccctgcccggggtggccgtgtccatgctgaatgtgtacctgaagagccaccacggggagcacgagaggcctgagttcatcgcctacccccacctgcgcatccgcaccaagcccttcccctggggagatggcaaccacaccctcttccacaacccccacgtgaaccccctgcccaccggctatgaagatgaatag

SEQ ID NO: 145729 - DNA, 330 bp, Artificial Sequence
  derived and/or modified sequence
atggccgtggtgggcgtgagcagcgtgagccggctgctgggccggagccgcccacaacttggtaggccgatgagcagcggagcccacggcgaagaagggtcggcacggatgtggaaaaccctgactttctttgttgcccttcccggcgttgctgtcagtatgctcaacgtatatctgaaatcgcatcatggagagcacgagcgccccgagtttatcgcctatccccatttgaggattaggacgaaacccttcccctggggtgatggtaatcacaccctgttccataatcctcacgtgaaccccctcccaactggctatgaggatgagtag

SEQ ID NO: 145730 - DNA, 330 bp, Artificial Sequence
  derived and/or modified sequence
atggctgtggtgggagtttcgagcgtgagccgtctgttagggaggtcccgccctcagctcggcaggccaatgtcaagcggcgcacatggtgaagaaggctcggccagaatgtggaaaaccctgaccttttttgttgcccttcctggggtggcagtgtctatgctgaatgtttacctgaagagccaccatggcgagcacgaacgccctgagtttattgcatatcctcacttacggatccggaccaaacccttcccctggggcgatggaaatcacaccctattccataacccccatgtgaatccactgccaaccggatacgaagatgagtag

SEQ ID NO: 145731 - DNA, 330 bp, Artificial Sequence
  derived and/or modified sequence
atggccgtggtgggcgtgagcagcgtgagcagactgctgggcagaagcagaccccagctgggcagacccatgagcagcggcgcccacggcgaggagggcagcgccagaatgtggaagaccctgaccttcttcgtggccctgcccggcgtggccgtgagcatgctgaacgtgtacctgaagagccaccacggcgagcacgagagacccgagttcatcgcctacccccacctgagaatcagaaccaagcccttcccctggggcgacggcaaccacaccctgttccacaacccccacgtgaaccccctgcccaccggctacgaggacgagtag

SEQ ID NO: 145732 - DNA, 572 bp, Artificial Sequence
  derived and/or modified sequence
acttccgcttccggcgctgcggcagtccagatcaaaaatggcggtagttggtgtgtcctcggtttctcggctgctgggtcggtcccgcccacagctggggcggcctatgtcgagtggcgcccatggcgaagagggctcagctcgcatgtggaagactctcaccttcttcgtcgcgctccccggggtggcagtcagcatgctgaatgtgtacctgaagtcgcaccacggagagcacgagagacccgagttcatcgcctacccccatctccgcatcaggaccaagccgtttccctggggagatggtaaccatactctattccataaccctcatgtgaatccacttccaactggctacgaagatgaataaagagaatctggaccactacccgggcaccagggaccacagcactggtttggaccgttactctgcacatggaccagaaaaagtatatgggaccttaagctcaccttctttacttgtatcaaatgatgactggtatactggtctcccatccctttgcttgtggcaggagatggcttaaataaataacttaaatttagattggtcatga

SEQ ID NO: 145733 - protein, 75 aa, Artificial Sequence
  derived and/or modified sequence
MAPEVLPKPRMRGLLARRLRNHMAVAFVLSLGVAALYKFRVADQRKKAYADFYRNYDVMKDFEEMRKAGIFQSVK

SEQ ID NO: 145734 - DNA, 228 bp, Artificial Sequence
  derived and/or modified sequence
atggcccctgaagtgttgccaaaacccagaatgagaggactgttggctcggcggttaagaaatcatatggccgtagctttcgtgttgtcacttggcgttgccgctttatataaattcagagtggccgatcagcgcaagaaggcctacgccgacttctataggaactacgacgttatgaaggactttgaagagatgagaaaggccggaatcttccagtccgtgaaatag

SEQ ID NO: 145735 - DNA, 228 bp, Artificial Sequence
  derived and/or modified sequence
atggcccccgaagtcttgcccaaacctcgcatgcgtggcctcttagctcgaagactccgaaaccatatggccgtggcttttgtactttcgcttggtgtggcggctctttataagttcagggtggccgatcaaaggaagaaagcctatgctgatttttaccggaattacgatgtcatgaaagacttcgaggaaatgagaaaagccggcatctttcaatccgtgaaatag

SEQ ID NO: 145736 - DNA, 228 bp, Artificial Sequence
  derived and/or modified sequence
atggcacctgaagtgctgccgaagcctagaatgcgggggcttttagcgcgcagactgagaaaccacatggctgttgcgtttgttctgtctctaggagtggccgcactgtataagtttcgagtggccgaccagaggaagaaggcctacgcagatttttatagaaattacgacgtgatgaaagatttcgaggagatgagaaaggcgggtatcttccagtctgtgaaatag

SEQ ID NO: 145737 - DNA, 228 bp, Artificial Sequence
  derived and/or modified sequence
atggcacctgaagtactgccaaagccccgtatgaggggactgctagcaaggcggcttagaaatcatatggcggtcgcattcgtgctgtcccttggcgtggcagccctttacaaatttcgggtcgcagaccagcgaaaaaaggcttacgcagatttctaccggaattacgatgtgatgaaagactttgaggaaatgaggaaggcgggcatcttccagtcggtcaagtag

SEQ ID NO: 145738 - DNA, 228 bp, Artificial Sequence
  derived and/or modified sequence
atggcccccgaagtattgccaaaacctcggatgcggggtctgctcgcgcgtagactcagaaaccatatggcagtggccttcgtactaagcttaggggtcgccgcactgtataagttccgcgtggccgatcaaaggaaaaaggcctatgcggacttctataggaattacgacgtgatgaaagactttgaggagatgcgaaaggccggcattttccagagcgtaaagtag

SEQ ID NO: 145739 - DNA, 228 bp, Artificial Sequence
  derived and/or modified sequence
atggctcccgaggtgctccccaagccgaggatgcgaggactccttgcgcggcggctaagaaatcacatggccgtggcctttgtacttagcttgggcgtagcagccctctacaagtttcgcgtagcagaccagagaaagaaggcatacgcggacttctataggaactatgatgtgatgaaagacttcgaagagatgcgtaaagctggcatcttccagagcgtgaaatag

SEQ ID NO: 145740 - DNA, 228 bp, Artificial Sequence
  derived and/or modified sequence
atggcacccgaggtgctaccaaagcctcgaatgagaggactgttggcacggcgactgagaaaccacatggcagtagccttcgtgttgtcgctgggggtggcggctctgtataagttcagagttgctgaccagcgaaagaaagcttacgccgacttctacagaaactacgatgtgatgaaggactttgaagaaatgagaaaggcaggtattttccagagtgttaagtag

SEQ ID NO: 145741 - DNA, 228 bp, Artificial Sequence
  derived and/or modified sequence
atggcccccgaggtcctgccgaagcctcgcatgcgaggactactggctagacgactacgaaaccacatggccgtggcattcgtcctgtccctaggcgtagccgcattgtacaaattccgagtcgccgatcagcggaaaaaagcctatgcggacttttataggaactatgacgtcatgaaggattttgaagagatgcgaaaggctggaatctttcaaagtgtaaaatag

SEQ ID NO: 145742 - DNA, 228 bp, Artificial Sequence
  derived and/or modified sequence
atggcacccgaggtcctgcccaagcccaggatgcgaggtctgcttgccaggagattacggaaccacatggccgtcgcctttgtgctatctctgggggtagccgctttgtataagtttagagtggctgaccaaagaaagaaagcatatgcggacttttatagaaactacgatgtcatgaaggactttgaggaaatgcgtaaggctgggatctttcaaagcgtcaaatag

SEQ ID NO: 145743 - DNA, 228 bp, Artificial Sequence
  derived and/or modified sequence
atggctcctgaagtgctacctaagccaagaatgcggggactgttagccagaagactgaggaatcatatggccgttgcctttgtgctctcacttggggtcgccgccctttacaaattccgggtggctgaccagagaaagaaggcatacgccgatttttatcgaaattatgatgtcatgaaggactttgaggaaatgagaaaggccggcatctttcaaagcgtgaaatag

SEQ ID NO: 145744 - DNA, 228 bp, Artificial Sequence
  derived and/or modified sequence
atggcccctgaggtgctgcccaagcccaggatgaggggcctgctggcccggcggctgaggaaccacatggctgtggcctttgtgctgagcctgggcgtggccgccctgtacaagttccgggtggccgaccagaggaagaaggcctatgctgacttctacagaaattatgatgtgatgaaggactttgaggagatgaggaaggccggcatcttccagagcgtgaagtag

SEQ ID NO: 145745 - DNA, 228 bp, Artificial Sequence
  derived and/or modified sequence
atggcccccgaggtgctgcccaagccccggatgcggggcctgctggcccgccggctgagaaaccatatggcggtggcatttgtgctgtccctaggcgtggcagccctgtacaaatttagggtggctgatcagcgcaagaaagcgtatgctgacttctacaggaactacgacgttatgaaggacttcgaggagatgaggaaagccggcatcttccagtccgttaagtag

SEQ ID NO: 145746 - DNA, 228 bp, Artificial Sequence
  derived and/or modified sequence
atggcccccgaggtgctgcccaagccccggatgcggggcctgctggcccgccggcttagaaaccacatggccgtggcgtttgtcttaagcctgggcgtagcagcgttgtacaaattcagggtggccgaccaacggaagaaggcttatgcggatttctatagaaattacgatgtcatgaaagactttgaagagatgcgaaaggccggcatttttcagtctgtaaagtag

SEQ ID NO: 145747 - DNA, 228 bp, Artificial Sequence
  derived and/or modified sequence
atggcccccgaggtgctgcccaagccccggatgcggggcctgctggcaagacgattgcgcaatcacatggccgtggcatttgtgctctcgcttggcgtggccgccttgtacaaatttagagttgcggatcagaggaagaaggcctacgccgatttttataggaactatgacgtgatgaaggatttcgaagagatgcggaaagccgggatcttccagtcagttaagtag

SEQ ID NO: 145748 - DNA, 228 bp, Artificial Sequence
  derived and/or modified sequence
atggcccccgaggtgctgcccaagccccggatgcggggcctgctggcccggcgactccgcaatcacatggccgttgcttttgtcctcagcctcggcgttgccgcgctctacaaatttagagttgctgatcaaaggaaaaaagcttatgcggacttttacagaaattacgatgtgatgaaggattttgaagaaatgcgcaaagctggcatcttccagtccgttaagtag

SEQ ID NO: 145749 - DNA, 228 bp, Artificial Sequence
  derived and/or modified sequence
atggcccccgaggtgctgcccaagccccggatgcggggcctgctggcgcgaaggctgagaaatcacatggccgtggccttcgtattgagcttaggcgtggcagcgctctacaagttcagagttgctgaccagagaaagaaagcttatgctgatttctatcggaactacgatgtcatgaaagattttgaagagatgcgcaaggccggaatctttcagagcgttaaatag

SEQ ID NO: 145750 - DNA, 228 bp, Artificial Sequence
  derived and/or modified sequence
atggcccccgaggtgctgcccaagccccggatgcggggcctgctggccagaaggctgcgcaatcacatggccgttgcttttgtgctgtctctgggagtggccgctttgtataaatttagggtggcagaccagcgcaagaaagcctatgctgacttttatcgcaattatgatgtgatgaaggacttcgaggaaatgagaaaagctggtatcttccagtctgtaaagtag

SEQ ID NO: 145751 - DNA, 228 bp, Artificial Sequence
  derived and/or modified sequence
atggcccccgaggtgctgcccaagccccggatgcggggcctgctggcgaggcggcttcgcaatcatatggctgttgcattcgtgctctccctcggcgtcgccgcactctataagtttagagtggcagatcaacggaagaaagcctatgccgatttttaccgtaactatgatgtgatgaaggatttcgaggagatgcgcaaggcaggcatcttccaaagcgtgaagtag

SEQ ID NO: 145752 - DNA, 228 bp, Artificial Sequence
  derived and/or modified sequence
atggcccccgaggtgctgcccaagccccggatgcggggcctgctggccagacgcctgcgaaaccacatggcggtggccttcgtgttatcactcggggttgcagccttgtacaaattccgggtagcagatcagcgcaaaaaagcctatgctgacttttatcgaaactatgatgtcatgaaagacttcgaagagatgagaaaagctggtatcttccaaagtgtcaaatag

SEQ ID NO: 145753 - DNA, 228 bp, Artificial Sequence
  derived and/or modified sequence
atggcccccgaggtgctgcccaagccccggatgcggggcctgctggcacgacggctgaggaatcacatggcggttgcgttcgtccttagtctgggagtggcggctctgtacaagttccgcgtcgccgaccagagaaaaaaggcgtacgccgacttctatcgaaattacgacgttatgaaagatttcgaagagatgagaaaagctggtatttttcagtcagtgaagtag

SEQ ID NO: 145754 - DNA, 228 bp, Artificial Sequence
  derived and/or modified sequence
atggcccccgaggtgctgcccaagccccggatgcggggcctgctggcccggcgactgagaaaccatatggccgtagccttcgtcctttctctcggtgtggctgccctttataagttccgcgtagccgaccagcgcaaaaaagcctatgctgacttctacaggaactacgatgtgatgaaagactttgaagagatgagaaaggctggaatattccagtcagtgaagtag

SEQ ID NO: 145755 - DNA, 228 bp, Artificial Sequence
  derived and/or modified sequence
atggcgccagaagttctccccaagcccagaatgcggggtctgctcgcccgaaggcttcggaatcatatggccgtcgcatttgttttgtccttaggagtcgccgcattatataaatttcgggtagccgaccagcgaaaaaaggcgtatgcggatttttacaggaactacgatgtgatgaaagacttcgaagagatgcgaaaagcgggtatcttccagtctgttaaatag

SEQ ID NO: 145756 - DNA, 228 bp, Artificial Sequence
  derived and/or modified sequence
atggcgcctgaagtcctgcccaagccacgcatgcgcggtttactcgccagaaggctacggaatcacatggcagtagcgtttgtgttgtcactaggagtggcagcattgtacaagtttcgtgttgcagaccagcggaaaaaagcttacgctgacttctaccgcaactatgacgttatgaaggatttcgaggagatgcgtaaagccggaattttccaatccgtcaagtag

SEQ ID NO: 145757 - DNA, 228 bp, Artificial Sequence
  derived and/or modified sequence
atggccccagaagtactgccgaaacctcggatgcgaggactccttgctcggcgactgagaaatcatatggctgtcgccttcgtgctctcgcttggcgtggcggcattgtacaagtttcgcgtcgccgatcagagaaaaaaggcctatgccgatttttatcgtaattacgacgttatgaaagattttgaagagatgcggaaagccggaatatttcagagtgtcaagtag

SEQ ID NO: 145758 - DNA, 228 bp, Artificial Sequence
  derived and/or modified sequence
atggctccagaagtgctacccaagcctcgcatgcggggactcctggccaggaggttgcgaaatcatatggcagtcgcttttgtgctttcattgggggtagccgctctatacaaattccgggttgccgaccagaggaagaaggcctacgccgacttctaccgcaattacgatgtgatgaaggacttcgaagaaatgagaaaagcaggaatcttccagagtgtaaagtag

SEQ ID NO: 145759 - DNA, 228 bp, Artificial Sequence
  derived and/or modified sequence
atggccccagaggttcttccgaaacctaggatgagaggcttgctggctcggagattacggaaccatatggctgtcgcattcgtccttagccttggtgtggcggctctgtacaagtttcgcgtggcagaccaacggaagaaagcttatgccgacttctaccgcaactacgatgtaatgaaagattttgaagagatgcgtaaagctggaattttccaaagcgtcaaatag

SEQ ID NO: 145760 - DNA, 228 bp, Artificial Sequence
  derived and/or modified sequence
atggctccagaggtgctcccaaaaccgcgtatgaggggtctcctggccagacgactccgtaaccatatggctgtagcattcgtcctgtccttgggagtcgccgctctgtacaagttccgggtggccgaccaacggaagaaggcttacgcagatttctataggaactatgatgtcatgaaggatttcgaagagatgcgcaaagccggaatatttcagagtgtgaaatag

SEQ ID NO: 145761 - DNA, 228 bp, Artificial Sequence
  derived and/or modified sequence
atggccccagaggtcctccctaaaccaagaatgcgcggactgctggccagacggttgagaaaccatatggcagtggcctttgtgcttagtctcggcgtagctgccctgtataaatttagggtggctgatcagaggaagaaggcatacgccgatttctatcggaactacgacgtgatgaaagacttcgaggagatgagaaaggccggtatcttccagtctgtgaaatag

SEQ ID NO: 145762 - DNA, 228 bp, Artificial Sequence
  derived and/or modified sequence
atggcaccagaagtgctcccaaagcctcggatgcgcggattgctcgccagacggcttagaaaccacatggccgtggccttcgtgctgtctctcggcgtggccgctctgtataaatttcgggtggcagatcagcggaaaaaagcctacgccgacttctacaggaactacgacgttatgaaggactttgaggagatgcggaaagccggaattttccaatctgttaaatag

SEQ ID NO: 145763 - DNA, 228 bp, Artificial Sequence
  derived and/or modified sequence
atggcccctgaggtgctacctaagcccaggatgagaggtctgctcgctcggagactaagaaatcatatggcagttgcctttgtcctgtcgttgggcgtggccgcactttacaaattccgcgtagccgaccagcgcaaaaaagcctatgcggacttctatcgcaactacgacgtcatgaaggacttcgaggaaatgcgcaaagctggaatcttccagtccgtgaaatag

SEQ ID NO: 145764 - DNA, 228 bp, Artificial Sequence
  derived and/or modified sequence
atggcccctgaggtgttgcccaaacccaggatgcgcggactactggcacggagacttcggaatcacatggctgtggcatttgtgcttagtctaggagtagccgctttatacaaatttcgtgtggcagatcagcggaagaaagcatacgctgatttctataggaactacgatgtcatgaaggatttcgaggagatgcggaaagctggtatcttccagagcgttaagtag

SEQ ID NO: 145765 - DNA, 433 bp, Artificial Sequence
  derived and/or modified sequence
agcacggttcgtttttcctttagtcaggaaggacgttggtgttgagcatacgtatcaaggacagtaactaccatggctcccgaagttttgccaaaacctcggatgcgtggccttctggccaggcgtctgcgaaatcatatggctgtagcattcgtgctatccctgggggttgcagctttgtataagtttcgtgtggctgatcaaagaaagaaggcatacgcagatttctacagaaactacgatgtcatgaaagattttgaggagatgaggaaggctggtatctttcagagtgtaaagtaatcttggaatataaagaatttcttcaggttgaattacctagaagtttgtcactgacttgtgttcctgaactatgacacatgaatatgtgggctaagaaatagttcctcttgataaataaacaattaacaaatac

SEQ ID NO: 145766 - DNA, 428 bp, Artificial Sequence
  derived and/or modified sequence
acggttcgtttttcctttagtcaggaaggacgttggtgttagcatacgtatcaaggacagtaactaccatggctcccgaagttttgccaaaacctcggatgcgtggccttctggccaggcgtctgcgaaatcatatggctgtagcattcgtgctatccctgggggttgcagctttgtataagtttcgtgtggctgatcaaagaaagaaggcatacgcagatttctacagaaactacgatgtcatgaaagattttgaggagatgaggaaggctggtatctttcagagtgtaaagtaatcttggaatataaagaatttcttcaggttgaattacctagaagtttgtcactgacttgtgttcctgaactatgacacatgaatatgtgggctaagaaatagttcctcttgataaataaacaattaacaaata

SEQ ID NO: 145767 - DNA, 724 bp, Artificial Sequence
  derived and/or modified sequence
tgcgcgcggctacagcacggttcgtttttcctttagtcaggaaggacgttggtgttgaggttagcatacgtatcaaggacagtaactaccatggctcccgaagttttgccaaaacctcggatgcgtggccttctggccaggcgtctgcgaaatcatatggctgtagcattcgtgctatccctgggggttgcagctttgtataagtttcgtgtggctgatcaaagaaagaaggcatacgcagatttctacagaaactacgatgtcatgaaagattttgaggagatgaggaaggctggtatctttcagagtgtaaagtaatcttggaatataaagggtctccctctgtcacccaggccgtagtgctgtagtgcgatcatggctcactgcagcctcaacctcccaggctcaagggatcttcctgcctcagcctcccaagaagctggcactataggcatgtgccaccacacctggctaacttctttatttttagtagagacagggtttcaccatattacctgggctgtgcttgaattcctgggctcaggcgatccgtccaccttggcctcccaaagtgttgggattacaggcgtgagccactgtgcctggcataattttggtattttttgatagtagccatcctaataggtatgaggtggtatcattgtggttttgatttgcatttccctgattatttgtgttcttgagcatcttttcatgtacttat

SEQ ID NO: 145768 - DNA, 571 bp, Artificial Sequence
  derived and/or modified sequence
ttgcatccctaccccgacactgcgggttgtcacaacggcaccctcccgctttctctctgcctcggatttagtcgtgactgtgtgtctccgccgtggtgcagcttcaggcctctcccgcatctactctctcacgcttccgctgcggcctgagggagggcggcgggcggaccacggaccggggttagcatacgtatcaaggacagtaactaccatggctcccgaagttttgccaaaacctcggatgcgtggccttctggccaggcgtctgcgaaatcatatggctgtagcattcgtgctatccctgggggttgcagctttgtataagtttcgtgtggctgatcaaagaaagaaggcatacgcagatttctacagaaactacgatgtcatgaaagattttgaggagatgaggaaggctggtatctttcagagtgtaaagtaatcttggaatataaagaatttcttcaggttgaattacctagaagtttgtcactgacttgtgttcctgaactatgacacatgaatatgtgggctaagaaatagttcctcttgataaataaacaattaacaaata

SEQ ID NO: 145769 - DNA, 828 bp, Artificial Sequence
  derived and/or modified sequence
actgcatgggatcggtattaatctgtttgtctttttcatcttctgggctgtgagctcctagaagtcagctttttcacttttacccaagccaaacggttattcgcgtaaggttggttataattaaaatgtcggtttgtgcacatggtttgggactctgtgtatgagtacgactaatatcttcaatttactaagaagataaagaggtcgataaataaggaggtcaagcccgttttgcaaggtcacacaggaaagaagcagaccacgaaatgaacttcggctgtcacctgcggtgggcgcactagaggtcttttgaactccttcggctaccgtcgccgcgttctcgctgtgcactcttattctgcgcctgcgcgcggctacagcacggttcgtttttcctttagtcaggaaggacgttggtgttgaggttagcatacgtatcaaggacagtaactaccatggctcccgaagttttgccaaaacctcggatgcgtggccttctggccaggcgtctgcgaaatcatatggctgtagcattcgtgctatccctgggggttgcagctttgtataagtttcgtgtggctgatcaaagaaagaaggcatacgcagatttctacagaaactacgatgtcatgaaagattttgaggagatgaggaaggctggtatctttcagagtgtaaagtaatcttggaatataaagaatttcttcaggttgaattacctagaagtttgtcactgacttgtgttcctgaactatgacacatgaatatgtgggctaagaaatagttcctcttgataaataaacaattaacaaatactttggacagtaa

SEQ ID NO: 145770 - DNA, 566 bp, Artificial Sequence
  derived and/or modified sequence
attctgcgcctgcgcgcggctacagcacggttcgtttttcctttagtcaggaaggacgttggtgttgaggttagcatacgtatcaaggacagtaactaccatggctcccgaagttttgccaaaacctcggatgcgtggccttctggccaggcgtctgcgaaatcatatggctgtagcattcgtgctatccctgggggttgcagctttgtataagtttcgtgtggctgatcaaagaaagaaggcatacgcagatttctacagaaactacgatgtcatgaaagattttgaggagatgaggaaggctggtatctttcagagtgtaaagtaatcttggaatataaagaatttcttcaggttgaattacctagaagtttgtcactgacttgtgttcctgaactatgacacatgaatatgtgggctaagaaatagttcctcttgataaataaacaattaacaaatactttggacaccagcccaagaaaaaaggagaaaaatctttcctccacataaatcatctattcaacattaaactcagcactgaaataaaagctctgtttgcctagctc

SEQ ID NO: 145771 - DNA, 562 bp, Artificial Sequence
  derived and/or modified sequence
ttctgcgcctgcgcgcggctacagcacggttcgtttttcctttagtcaggaaggacgttggtgttgaggttagcatacgtatcaaggacagtaactaccatggctcccgaagttttgccaaaacctcggatgcgtggccttctggccaggcgtctgcgaaatcatatggctgtagcattcgtgctatccctgggggttgcagctttgtataagtttcgtgtggctgatcaaagaaagaaggcatacgcagatttctacagaaactacgatgtcatgaaagattttgaggagatgaggaaggctggtatctttcagagtgtaaagtaatcttggaatataaagaatttcttcaggttgaattacctagaagtttgtcactgacttgtgttcctgaactatgacacatgaatatgtgggctaagaaatagttcctcttgataaataaacaattaacaaatactttggacactatgatgattctccacagtacctgcctcaaacaaaaatacaagagaaggatcacagttgaagacagttcaacagcaaaagaaatctgcagtct

SEQ ID NO: 145772 - DNA, 694 bp, Artificial Sequence
  derived and/or modified sequence
tttgcatccctaccccgacactgcgggttgtcacaacggcaccctcccgctttctctctgcctcggatttagtcgtgactgtgtgtctccgccgtggtgcagcttcaggcctctcccgcatctactctctcacgcttccgctgcggcctgagggagggcggcgggcggaccacggaccggggtgggttgcgacggccccaccgaagccgggtgggctgcgggaccctcgagaacccagctggcttcggagtgagctggcccggggctggtacccgctgcgctttttcacagccattgtgaccttggttagcatacgtatcaaggacagtaactaccatggctcccgaagttttgccaaaacctcggatgcgtggccttctggccaggcgtctgcgaaatcatatggctgtagcattcgtgctatccctgggggttgcagctttgtataagtttcgtgtggctgatcaaagaaagaaggcatacgcagatttctacagaaactacgatgtcatgaaagattttgaggagatgaggaaggctggtatctttcagagtgtaaagtaatcttggaatataaagaatttcttcaggttgaattacctagaagtttgtcactgacttgtgttcctgaactatgacacatgaatatgtgggctaagaaatagttcctcttgataaataaacaattaacaaa

SEQ ID NO: 145773 - DNA, 745 bp, Artificial Sequence
  derived and/or modified sequence
cggttcgtttttcctttagtcaggaaggacgttggtgttgaggttagcatacgtatcaaggacagtaactaccatggctcccgaagttttgccaaaacctcggatgcgtggccttctggccaggcgtctgcgaaatcatatggctgtagcattcgtgctatccctgggggttgcagctttgtataagtttcgtgtggctgatcaaagaaagaaggcatacgcagatttctacagaaactacgatgtcatgaaagattttgaggagatgaggaaggctggtatctttcagagtgtaaagtaatcttggaatataaaggtaatatggttatttgaagttacttaaaaaaaaatttctaattgtggtaaaatgcaaatacaggtgactgtccctcacaatgtttagacttaagattttttgactttacgatggtgtggaagtgatacacatttggtagaaaccatactttgaattttgatctttgtccacatgagcaataagtggcacaatacttttgtgatgtgggggagcaccaatgaccacatcccccagtcagaaacataatcacaagggtaaacagctgatgctgtactctgtagtgttgtgtgagatactcagtgttttattataagctaggctttgtgttagatgattttcttcagctgtaggctaacataagtgttctgagcacatttaaggtagggaaggctaagctatgatgtaagttaggtgtattaaatgcatttt

SEQ ID NO: 145774 - DNA, 513 bp, Artificial Sequence
  derived and/or modified sequence
gcaggaggggaaggatgggcttcctgcaacctcccttgccccacggcttcccatcctacccccggccgcgttagctgaaggccagcagggacgcaaaagtttttaggccccttaggtctttaggttagcatacgtatcaaggacagtaactaccatggctcccgaagttttgccaaaacctcggatgcgtggccttctggccaggcgtctgcgaaatcatatggctgtagcattcgtgctatccctgggggttgcagctttgtataagtttcgtgtggctgatcaaagaaagaaggcatacgcagatttctacagaaactacgatgtcatgaaagattttgaggagatgaggaaggctggtatctttcagagtgtaaagtaatcttggaatataaagaatttcttcaggttgaattacctagaagtttgtcactgacttgtgttcctgaactatgacacatgaatatgtgggctaagaaatagttcctcttgataaataaacaattaacaaat

SEQ ID NO: 145775 - DNA, 228 bp, Artificial Sequence
  derived and/or modified sequence
atggcccccgaggtgctgcccaagcccagaatgagaggcctgctggccagaagactgagaaaccacatggccgtggccttcgtgctgagcctgggcgtggccgccctgtacaagttcagagtggccgaccagagaaagaaggcctacgccgacttctacagaaactacgacgtgatgaaggacttcgaggagatgagaaaggccggcatcttccagagcgtgaagtag

SEQ ID NO: 145776 - protein, 388 aa, Artificial Sequence
  derived and/or modified sequence
MQRLLFPPLRALKGRQYLPLLAPRAAPRAQCDCIRRPLRPGQYSTISEVALQSGRGTVSLPSKAAERVVGRWLLVCSGTVAGAVILGGVTRLTESGLSMVDWHLIKEMKPPTSQEEWEAEFQRYQQFPEFKILNHDMTLTEFKFIWYMEYSHRMWGRLVGLVYILPAAYFWRKGWLSRGMKGRVLALCGLVCFQGLLGWYMVKSGLEEKSDSHDIPRVSQYRLAAHLGSALVLYCASLWTSLSLLLPPHKLPETHQLLQLRRFAHGTAGLVFLTALSGAFVAGLDAGLVYNSFPKMGESWIPEDLFTFSPILRNVFENPTMVQFDHRILGITSVTAITVLYFLSRRIPLPRRTKMAAVTLLALAYTQGPVLFNFTFKISDLDEGIRNI

SEQ ID NO: 145777 - DNA, 1167 bp, Artificial Sequence
  derived and/or modified sequence
atgcagcggctgctgtttcctcccctgcgggccctgaaaggaaggcagtatctgcccctgttggctccgcgcgctgcacctagagcgcagtgtgattgtattcgccggcccctacgcccaggacagtactccacaatctctgaagtggcattacagagtggcaggggcacggtctctctgccatctaaagcagctgagcgcgtcgtcgggcgttggcttctggtctgttcaggcactgtcgctggcgctgtgatccttggcggcgtcactcgattaactgagtccgggctgagcatggtggactggcacctgatcaaagaaatgaagccgcccacctcacaagaagaatgggaggccgaattccagagataccagcagttccccgagtttaaaattctgaaccatgatatgacgcttactgaatttaagtttatttggtatatggaatattcccacagaatgtggggccgactggtaggcttggtgtatattcttcctgctgcttacttctggcgtaagggctggctctcccgggggatgaaggggagagtcctagccctctgtgggcttgtgtgtttccaaggcctcctcggttggtatatggtgaagtctgggctagaggaaaagtctgactctcacgacattccccgcgtgagccagtaccggctggcagcccatctcggttcggcacttgtcctctattgtgcttcactgtggacctctctgtctctgctcctgccccctcataaattaccagagactcaccagctcctgcaactccggcgtttcgcacatggtaccgccggccttgtgttcctcaccgctctgagcggggcattcgtagctggtctagacgccgggctagtttacaacagctttccgaagatgggcgaatcgtggatccctgaggacttattcaccttctcaccgatcttgcggaacgtgtttgagaaccctacgatggtccagttcgaccataggatcttgggcatcacttcggtgaccgcaattacagtgctgtatttcctgagcaggaggatccccctacctcgcagaacaaagatggctgccgtgactctgctggctctggcctacacccaaggcccagttctgtttaatttcactttcaaaatatctgacttggacgaaggtattcggaatatctag

SEQ ID NO: 145778 - DNA, 1167 bp, Artificial Sequence
  derived and/or modified sequence
atgcagaggctgctcttcccccccctgcgggccctgaagggccggcagtacctgcccctgctggcccccagggctgccccccgggcccagtgtgactgcatcagaagacccctgcggcccggccagtacagcaccatcagcgaggtggccctgcagagcggccggggcaccgtgtccctgcccagcaaggctgctgagcgggtggtgggccgctggctgctggtgtgcagcggcaccgtggccggggctgtgatcctgggcggcgtgacccggctgacagaaagtggcctgtccatggtggactggcacctgatcaaggagatgaagccacccaccagccaggaggagtgggaggccgagttccagcgctaccagcagtttcctgagttcaagatcctgaaccacgacatgaccctgacagagttcaagttcatctggtacatggagtacagccacaggatgtggggccgcctggtgggcctggtgtacatcctgcctgctgcctacttctggaggaagggctggctgagccggggcatgaagggccgggtgctggccctgtgtggcctggtgtgcttccagggcctgctgggctggtacatggtgaagagcggcctggaggagaagagtgacagccatgacatcccccgggtgtcccagtaccgcctggccgcccacctgggcagcgccctggtgctgtactgtgccagcctgtggaccagcctgagcctgctgctgcccccccacaagctgcctgagacccaccagctgctgcagctgcggagatttgcccatggaacagctggcctggtgttcctgacagccctgagcggggcctttgtggccggcctggatgctggcctggtgtacaacagcttccccaagatgggagagagctggatcccagaagatctcttcaccttcagccccatcctgagaaatgtgtttgagaaccccaccatggtgcagtttgaccaccgcatcctgggcatcacctctgtgacagccatcaccgtgctgtacttcctgagccgccgcatccccctgcccaggaggaccaagatggctgctgtgaccctgctggccctggcctacacccagggccctgtgctcttcaacttcaccttcaagatcagtgacctggatgagggcatccggaacatctag

SEQ ID NO: 145779 - DNA, 1167 bp, Artificial Sequence
  derived and/or modified sequence
atgcagcggctgctgttcccccccctgcgggccctgaagggccggcagtacttgccactcctcgcgccacgtgccgcacctcgggctcagtgcgattgcatccgacggccgctgagacccggacagtattccactatttctgaagtggctcttcagtctggccgggggaccgtttctctgcctagcaaggccgccgagcgcgtagtggggagatggctgctggtctgttcaggtaccgtggccggggccgtgattctcggaggcgtgacgcggttaacggaatccggactgtccatggtcgattggcaccttataaaagagatgaaacccccaaccagccaggaagagtgggaagccgaatttcagcggtaccaacagttccccgagttcaagattttgaaccatgatatgacgctcacagagtttaagttcatctggtatatggaatatagtcatcgcatgtggggccggctcgtcggattggtctatatcctgcctgccgcttacttttggagaaaaggatggctgtcccggggaatgaaaggcagggtactcgccttatgcggactcgtctgtttccaggggcttctcggttggtacatggtgaagagcgggctggaagagaagagcgattcccacgatatccccagagtgagccagtatcgtttagcagcacacctcggttcggctctagtgctctactgcgcgagcctgtggacctctctcagtctgcttttgccaccacacaaactgcccgaaacgcatcagttgcttcagttgaggagatttgctcacggcacagctggattagtgtttttaaccgcgttgtcaggggcgtttgtcgccggattggacgccggcctcgtctataatagcttccccaagatgggcgagagttggattccagaggatctgttcactttttcacccatcctgcgcaatgtcttcgagaaccccacaatggtccagttcgatcatcgaatactgggaatcacatcggtcacggcaataaccgtgctctacttcctgtcaagacggatccctttaccgcgacgcacaaagatggccgctgttactttgctggccctggcttatacccagggcccagttctgtttaattttactttcaagatctctgacttagacgagggcattaggaacatatag

SEQ ID NO: 145780 - DNA, 1167 bp, Artificial Sequence
  derived and/or modified sequence
atgcaacgcctgcttttcccccctttacgggctttaaagggtaggcagtatcttccgttactggcaccacgggcagctccgagggcacaatgcgattgcattcggagaccactgcggccaggccagtactccactatctctgaggtcgccctgcagagcgggcgagggacagtgagcctcccatctaaagctgcagaaagagtagttggcagatggctcttagtgtgttccgggaccgtggcaggagcagttatcctgggtggggttacacggctgactgagagtggtctctccatggttgactggcatttaatcaaagagatgaaacctccaacatcgcaggaagaatgggaggcagaattccaacgctatcagcagtttccggaattcaaaattcttaatcatgacatgaccctgactgagttcaaattcatatggtacatggagtacagccatcgtatgtgggggcgtctggtcgggctggtgtacattctgcccgcagcatacttttggaggaaaggctggctgagcaggggcatgaagggcagggtgctggccttgtgcggtctggtctgcttccagggattgctgggatggtatatggtgaagtctggcctggaggagaaatccgattcacatgacatccctcgggtgtctcagtatcgccttgcagcacatcttggaagtgctctggtattatactgcgcttctctttggacttcactgagcctgcttctgccgccacacaaattgccagaaactcatcaactgctgcagctccgacgattcgcgcatggaaccgccggtctcgtctttctgaccgcactctctggtgcattcgtggccggactcgacgcaggcctggtatacaatagctttcctaaaatgggtgagtcatggatccccgaggaccttttcactttctctcccattcttcgcaatgtgttcgagaatcccaccatggtgcagttcgaccaccgcatcctgggtattacgagcgttacagccatcactgtcctgtacttcctctcccggagaattccacttcctcgtaggaccaagatggctgccgtgacgttacttgcgctggcttacactcaggggcctgttctgtttaactttaccttcaaaatttcggacttggacgagggaatccgcaacatatag

SEQ ID NO: 145781 - DNA, 2788 bp, Artificial Sequence
  derived and/or modified sequence
agaccacagagccctgggttgtggaagaggtggctgttccctgtcatcagtatgcagcgattgctctttccgccgttgagggccttgaaggggaggcagtatctgccgctcctggctcctagggcagcgcctagagcacagtgtgattgcatcaggcgccctttgaggccagggcaatacagcaccatctctgaagtagctttgcaatctggaaggggtacagtgtcccttccctcaaaggctgctgagcgggtggtgggccgatggctcctggtctgcagtggaacagtggctggagcagttattcttggtggagtaactaggttgacagagtctggcctctcgatggtagattggcatttaataaaggagatgaagccacctacaagccaagaggaatgggaagcagaattccaaagataccagcaatttccagaatttaaaatcttgaatcatgatatgacactgacagaattcaagttcatctggtacatggagtactcacaccgaatgtggggtcgccttgtaggccttgtgtacatcctgcctgctgcctacttttggagaaagggctggctcagccgtggcatgaaaggacgtgttcttgccctctgtggcctcgtctgcttccagggtctgttgggatggtatatggtgaaaagtggactagaagaaaaatcagactcccatgacatccctcgggtcagtcagtaccgccttgctgcccacctgggatcagccctggttctttattgtgccagcttgtggacctcactgtcactgctactccctccgcacaagttgcctgaaacccaccaactcctacagttgagacgatttgctcatggaacagcaggtctggtgttccttacggccctctcaggggcttttgtggcagggctagatgctgggcttgtttataactcctttcccaaaatgggagaatcctggatcccggaggacctctttaccttctcccccatcctgaggaatgtttttgagaatcccaccatggtgcagtttgatcaccggattctgggaatcacttcagtcactgccattacagtgctctacttcctctctcggagaattccccttcctagaaggaccaagatggcagcagtgactctgctggctttggcgtatacacagggccctgtcttattcaactttacttttaaaatcagtgatttggatgaaggcatcagaaacatctgatttgaggatggagcaacccaatattgctaatataatagatgacagtggcaactgaaaacagtcccagaatgaccccatcgagatgaaattaaacagattagaaatgtaacatactcatttaaattaaataagttgtataagtttgggctgaagaaacctggccttatatcatttcatataaaaaagacgggattttagttgtcctcaggttcaatatgaaccaagtagtattcatgttgttattatatgataacagaaaaattagtggtacttcaggttttatcagtagaagtgtcacagccatagtcaaaatacccctaacatactgcatttcactctgggtaccaaatttaagcaagatattgatggccactaagtgtgtatccagaagaagagatcagaatgatgagtccagaacccctgtcacacagggaataggtgaaggaactagggatatttaactggagcagagaacatctggagagagagcaagattcctgtccttgagaagttgaagccgtctcatgcagaagagggaatgagcttccattatgctgcagagctggcagcaatggatgaaagttgcaggaagttagttttagttctgtagaaggcaagagtagggtagaccaaatcaaatgctcactggggtcaggctgatggagacagtaacactggcgagcaggtgccccagctcggactatactgctgagttctggtctgttgctgccactctacaggtccagggttgttagatcttctgggtttttgttttgctttttgaaataaggaaaataagcttatcttaagtttatttttccttggatatacctagattccatacagtgacaatacaaatacaaaggaagaacatctggatttcatccttgacctcatttacaaagcaaaaagagatgctggattcagatataaatgtttaattttgcagtgtttaagtcagcaaatcttctgttttttaaaaataagccacatatctagatttttctgtgaaagctctcaattaagtgttgggaactaatttcaagattttaaaaaatgttatgcaggcttaacgtgtctgagagccataaatgacctaacgtttcccgttagtctctgaactaggtgatctcagttctctttcaactccagtactctgtaagtttctgtgacctgtagtgtaccattctcaggtggtgatatggtttggatgttttgtcccctccaaatctcatgttcaaagtgtgacattcagtgttagaggtgggcctagtaggaggtatttgggtcatgggggcggatcccttatgtatgactttgtgccatccccatagtaatgagtgagttctcactctggttgtttatgcaagagctggttgtttaaaagagcctggaacttcctcctctctcgcttgctctctctcaccatgtgacacactggctccccttcaccttctgccatgattgtaagcttcgtgaggccctcaccagaagcagatgccagcgccatgcttcctatacagttctatgcagaacagtgagccaaataaacctcttttctttctaaaaa

SEQ ID NO: 145782 - DNA, 1167 bp, Artificial Sequence
  derived and/or modified sequence
atgcagagactgctgttcccccccctgagagccctgaagggcagacagtacctgcccctgctggcccccagagccgcccccagagcccagtgcgactgcatcagaagacccctgagacccggccagtacagcaccatcagcgaggtggccctgcagagcggcagaggcaccgtgagcctgcccagcaaggccgccgagagagtggtgggcagatggctgctggtgtgcagcggcaccgtggccggcgccgtgatcctgggcggcgtgaccagactgaccgagagcggcctgagcatggtggactggcacctgatcaaggagatgaagccccccaccagccaggaggagtgggaggccgagttccagagataccagcagttccccgagttcaagatcctgaaccacgacatgaccctgaccgagttcaagttcatctggtacatggagtacagccacagaatgtggggcagactggtgggcctggtgtacatcctgcccgccgcctacttctggagaaagggctggctgagcagaggcatgaagggcagagtgctggccctgtgcggcctggtgtgcttccagggcctgctgggctggtacatggtgaagagcggcctggaggagaagagcgacagccacgacatccccagagtgagccagtacagactggccgcccacctgggcagcgccctggtgctgtactgcgccagcctgtggaccagcctgagcctgctgctgcccccccacaagctgcccgagacccaccagctgctgcagctgagaagattcgcccacggcaccgccggcctggtgttcctgaccgccctgagcggcgccttcgtggccggcctggacgccggcctggtgtacaacagcttccccaagatgggcgagagctggatccccgaggacctgttcaccttcagccccatcctgagaaacgtgttcgagaaccccaccatggtgcagttcgaccacagaatcctgggcatcaccagcgtgaccgccatcaccgtgctgtacttcctgagcagaagaatccccctgcccagaagaaccaagatggccgccgtgaccctgctggccctggcctacacccagggccccgtgctgttcaacttcaccttcaagatcagcgacctggacgagggcatcagaaacatctag

SEQ ID NO: 145783 - protein, 772 aa, Artificial Sequence
  derived and/or modified sequence
MAEAHQAVAFQFTVTPDGVDFRLSREALKHVYLSGINSWKKRLIRIKNGILRGVYPGSPTSWLVVIMATVGSSFCNVDISLGLVSCIQRCLPQGCGPYQTPQTRALLSMAIFSTGVWVTGIFFFRQTLKLLLCYHGWMFEMHGKTSNLTRIWAMCIRLLSSRHPMLYSFQTSLPKLPVPRVSATIQRYLESVRPLLDDEEYYRMELLAKEFQDKTAPRLQKYLVLKSWWASNYVSDWWEEYIYLRGRSPLMVNSNYYVMDLVLIKNTDVQAARLGNIIHAMIMYRRKLDREEIKPVMALGIVPMCSYQMERMFNTTRIPGKDTDVLQHLSDSRHVAVYHKGRFFKLWLYEGARLLKPQDLEMQFQRILDDPSPPQPGEEKLAALTAGGRVEWAQARQAFFSSGKNKAALEAIERAAFFVALDEESYSYDPEDEASLSLYGKALLHGNCYNRWFDKSFTLISFKNGQLGLNAEHAWADAPIIGHLWEFVLGTDSFHLGYTETGHCLGKPNPALAPPTRLQWDIPKQCQAVIESSYQVAKALADDVELYCFQFLPFGKGLIKKCRTSPDAFVQIALQLAHFRDRGKFCLTYEASMTRMFREGRTETVRSCTSESTAFVQAMMEGSHTKADLRDLFQKAAKKHQNMYRLAMTGAGIDRHLFCLYLVSKYLGVSSPFLAEVLSEPWRLSTSQIPQSQIRMFDPEQHPNHLGAGGGFGPVADDGYGVSYMIAGENTIFFHISSKFSSSETNAQRFGNHIRKALLDIADLFQVPKAYS

SEQ ID NO: 145784 - protein, 567 aa, Artificial Sequence
  derived and/or modified sequence
MELLAKEFQDKTAPRLQKYLVLKSWWASNYVSDWWEEYIYLRGRSPLMVNSNYYVMDLVLIKNTDVQAARLGNIIHAMIMYRRKLDREEIKPVMALGIVPMCSYQMERMFNTTRIPGKDTDVLQHLSDSRHVAVYHKGRFFKLWLYEGARLLKPQDLEMQFQRILDDPSPPQPGEEKLAALTAGGRVEWAQARQAFFSSGKNKAALEAIERAAFFVALDEESYSYDPEDEASLSLYGKALLHGNCYNRWFDKSFTLISFKNGQLGLNAEHAWADAPIIGHLWEFVLGTDSFHLGYTETGHCLGKPNPALAPPTRLQWDIPKQAVIESSYQVAKALADDVELYCFQFLPFGKGLIKKCRTSPDAFVQIALQLAHFRDRGKFCLTYEASMTRMFREGRTETVRSCTSESTAFVQAMMEGSHTKADLRDLFQKAAKKHQNMYRLAMTGAGIDRHLFCLYLVSKYLGVSSPFLAEVLSEPWRLSTSQIPQSQIRMFDPEQHPNHLGAGGGFGPVADDGYGVSYMIAGENTIFFHISSKFSSSETNAQRFGNHIRKALLDIADLFQVPKAYS

SEQ ID NO: 145785 - protein, 691 aa, Artificial Sequence
  derived and/or modified sequence
MAEAHQAVAFQFTVTPDGVDFRLSREALKHVYLSGINSWKKRLIRIKNGILRGVYPGSPTSWLVVIMATVGSSFCNVDISLGLVSCIQRCLPQGCGPYQTPQTRALLSMAIFSTGVWVTGIFFFRQTLKLLLCYHGWMFEMHGKTSNLTRIWAMCIRLLSSRHPMLYSFQTSLPKLPVPRVSATIQRYLESVRPLLDDEEYYRMELLAKEFQDKTAPRLQKYLVLKSWWASNYVSDWWEEYIYLRGRSPLMVNSNYYVMDLVLIKNTDVQAARLGNIIHAMIMYRRKLDREEIKPVMALGIVPMCSYQMERMFNTTRIPGKDTDVLQHLSDSRHVAVYHKGRFFKLWLYEGARLLSLYGKALLHGNCYNRWFDKSFTLISFKNGQLGLNAEHAWADAPIIGHLWEFVLGTDSFHLGYTETGHCLGKPNPALAPPTRLQWDIPKQCQAVIESSYQVAKALADDVELYCFQFLPFGKGLIKKCRTSPDAFVQIALQLAHFRDRGKFCLTYEASMTRMFREGRTETVRSCTSESTAFVQAMMEGSHTKADLRDLFQKAAKKHQNMYRLAMTGAGIDRHLFCLYLVSKYLGVSSPFLAEVLSEPWRLSTSQIPQSQIRMFDPEQHPNHLGAGGGFGPVADDGYGVSYMIAGENTIFFHISSKFSSSETNAQRFGNHIRKALLDIADLFQVPKAYS

SEQ ID NO: 145786 - DNA, 2319 bp, Artificial Sequence
  derived and/or modified sequence
atggctgaagcccaccaggcagtggcttttcaattcaccgtcacacctgacggcgtcgacttccgtctatcaagggaggcactgaagcatgtgtatctgtctggcattaattcctggaaaaaacgtctcatccggatcaagaacggaatcctacgtggagtttatcctggaagtcctacttcatggctcgttgtgattatggcaactgtggggtctagcttctgtaacgttgacattagcctcggactggtgagttgcatacagaggtgtctgccccagggatgcggcccctatcagaccccgcagactagagcgctgctgagtatggcgatcttttccactggcgtatgggtgactggtattttcttttttcgacagacccttaagttactactctgttaccatggctggatgttcgagatgcacggaaagacctccaatctcactcgcatctgggctatgtgtatacggcttctgtcttcccggcaccccatgctgtatagctttcagacttctctccccaagctcccagtgcctagggtgagcgccacaattcagagatatctagagtctgtcagaccacttcttgatgacgaggaatactacagaatggagctgctggcaaaagagtttcaggacaaaaccgcgcctagacttcagaagtacctggttctgaaatcctggtgggcctccaactatgttagcgattggtgggaagagtacatatacttgcggggtagaagtcccctcatggtgaacagcaattattacgtgatggatttggtgctgataaagaacactgatgtccaggccgctcgactgggaaacattatccacgccatgatcatgtatagaagaaaactggaccgggaggagatcaagcccgtgatggctttagggattgtcccaatgtgttcataccagatggagagaatgttcaataccacccgcattccaggcaaggatactgatgtgctccagcacctgagcgactctcgacatgttgcagtgtaccataaaggaagattcttcaagctgtggctgtacgagggcgctcgtctcctgaagccccaagatttagaaatgcaatttcaacgcatactggacgatcccagccctccacagcccggcgaggaaaaactcgctgccctgaccgccggtggacgtgtagagtgggcacaggctagacaggctttttttagtagcggaaaaaataaggctgcactcgaagccatcgaacgggcagctttctttgttgcactcgacgaagaatcctacagctacgatcccgaggatgaagcttctctatccttgtacggcaaagcacttctccacggcaattgttacaatcgctggttcgataagtcttttacactgataagcttcaagaatggccagctgggcctgaatgccgagcacgcgtgggccgatgcccctatcatcggccacctttgggaatttgtgctgggtaccgactcatttcaccttggatacacagaaacgggacattgcttggggaagcctaaccctgccctggcaccaccaactcgtctgcaatgggacatcccaaagcagtgtcaggccgtgatcgagtctagctaccaggtggccaaggctttggcagatgatgtggagttgtactgttttcaattcttgccgtttgggaagggcttgatcaagaaatgccgaactagccccgatgcgtttgtgcagattgctctacagcttgcacattttcgagatagggggaagttttgcctgacttatgaggcctccatgaccaggatgttccgcgaaggaaggaccgaaactgtgaggagctgcacgtctgagtcgaccgcctttgtccaagccatgatggagggaagtcacaccaaagcagatttgcgcgacttgtttcagaaggcagctaaaaaacaccagaatatgtaccgcctggctatgactggggccggaatagatagacacctgttctgcctgtatctggtgtctaagtacctgggagtgagttctcccttcctggccgaggttctctccgagccatggaggctctccacatctcagatcccacagtcacagattcggatgtttgatcccgaacagcaccccaaccatctgggcgcaggtggcggctttggccccgtcgccgacgacgggtatggcgttagctacatgattgcaggagagaatactatctttttccacatttccagtaagttctccagttccgagacaaacgcacaaagatttggtaatcacatacgcaaagcactcctggatattgcagacctctttcaagtccccaaagcctacagttag

SEQ ID NO: 145787 - DNA, 2319 bp, Artificial Sequence
  derived and/or modified sequence
atggccgaggctcatcaggcagtggccttccaattcacagttacccctgatggggttgatttccgcctgagtcgggaggcactcaaacatgtctacctgagcggcatcaactcatggaagaaacgtttaataaggattaagaacggaatattgagaggtgtatatcccgggtcacccaccagctggttggtggttattatggctaccgttggctcgtctttttgcaacgtcgacatctccctcggtctggtgtcatgcattcagcgctgtctgcctcagggttgtggaccctaccagacccctcagacaagagcgctgctctctatggcgatcttcagcaccggcgtgtgggtaaccggcatcttcttcttcagacaaacgctgaagctgctattgtgttatcacggttggatgttcgagatgcatggaaagaccagtaatctaacgagaatttgggccatgtgtatcagactgctgagtagcaggcatcccatgctgtattcttttcagacatctcttcctaaactaccggtgccaagagtgtctgcaactatacagcggtacctagagtccgtcaggcccttgttagatgatgaagagtactaccgcatggaactgcttgcgaaagaatttcaggataagactgcacctcgtctccagaaatacctcgtcctgaagtcctggtgggcatctaactatgtctcagactggtgggaggaatatatctacttgcggggccggtccccattgatggttaactctaactactatgtcatggaccttgtcctaattaagaacaccgacgtgcaggccgcacggctcggtaatatcattcacgccatgatcatgtacagaaggaagctggaccgtgaagagataaagcccgtgatggccctggggattgtgcccatgtgctcatatcagatggagaggatgttcaacacaacaagaattcccggcaaggatacggacgtgctgcagcatctctccgactcaaggcatgtggctgtctaccataaggggcgcttttttaagttgtggctttacgaaggtgccagactcctgaagccacaggatctggagatgcagttccagaggatacttgacgatccctctcctcctcaacctggcgaagagaaattagcagccttaacagccggaggacgggttgaatgggcccaggcccgccaggctttcttttcctctggcaaaaataaggccgcacttgaggcaatagagagagctgcatttttcgtggctttggacgaggagtcctactcctacgatccggaagatgaggcctccctatctctgtatggcaaggccctccttcacggcaactgttacaacagatggttcgacaagtcctttactctcatctccttcaagaacgggcagctcggtcttaacgctgaacacgcctgggctgacgcccccattattgggcatctctgggagtttgtccttggtactgatagcttccacctggggtacacggaaaccggccattgcctgggcaaaccaaatccagctctagcccctccaacaagactgcagtgggacattccgaagcagtgccaagcggtgattgaatccagctaccaagtggctaaggctcttgctgatgatgttgaactgtactgcttccagttcctgccatttgggaagggtctgatcaagaaatgccggaccagccccgatgcctttgtccaaattgccctgcagctggctcacttccgcgacagggggaagttttgtctgacttatgaggcatccatgacacgaatgttccgtgagggtagaactgaaaccgtcagatcatgtacctctgagagtactgcttttgttcaggcaatgatggagggaagtcacacaaaggctgatttacgcgaccttttccagaaagcagcaaagaaacaccagaacatgtaccggttagctatgacgggtgctggtatcgacagacacctgttctgtttatacctagtctccaagtacctgggggtctcttccccctttcttgcagaggtgctatccgaaccatggcgcttaagcacaagtcagatcccacagagtcaaattcggatgttcgacccagaacaacaccctaatcacttgggcgccggtggcggcttcggcccagtggctgacgatggatatggtgtgtcttacatgatagccggcgagaacacaatcttcttccacattagcagcaagttttccagctcagaaaccaacgctcagcgctttggcaaccatatccgtaaagctctactggacatcgcggacctgttccaagtgcctaaagcctattcatag

SEQ ID NO: 145788 - DNA, 2319 bp, Artificial Sequence
  derived and/or modified sequence
atggcagaagcacaccaggccgtggcctttcaatttaccgtcacccctgacggagtggatttcagattgagccgagaggcactgaagcacgtttatcttagcggaatcaacagctggaaaaaaagactcataagaataaagaacggcatcctgcgcggggtgtatccgggctcacctaccagttggctggtggtgattatggccacagtgggatcaagcttctgtaacgtggacatatccctggggctcgtctcatgtatccagcgttgcctcccgcaaggatgcggtccctaccaaacaccccagacaagagcactgctgagtatggccatattttcgactggggtatgggtgaccggtattttctttttcagacaaaccctgaagctgctgttgtgttatcacggatggatgttcgaaatgcatgggaaaactagcaatctgactaggatatgggcaatgtgcatacgcctcctgagcagtcgccacccgatgctgtactctttccagaccagcctccccaagctgccagttccaagagtgagcgcaaccatccagaggtacctggagtcagttagacccctccttgatgatgaggagtactatagaatggaattgcttgctaaggagttccaagacaagaccgccccgcgactgcaaaaatatctcgtgctaaaatcctggtgggcatctaattatgtgtctgattggtgggaagagtacatctatctccgcgggagaagtcccctcatggtgaatagcaattattacgttatggatctggtgctcattaagaatacagatgtacaggctgcccgattgggcaatataatccatgccatgataatgtatcgcaggaagctggatagagaagaaattaagccagttatggctctggggatcgtgccaatgtgcagctaccagatggagcgtatgtttaacactacaagaattcccggtaaagacacagacgtattacagcatttgtctgacagtcgccacgtggcggtgtatcacaagggacggttcttcaaattgtggctgtatgaaggggcgagactcctcaagccccaagatctggaaatgcagtttcagcgcattctcgacgacccctccccacctcaacctggagaagagaagctggcggccctcactgctggaggccgagtcgagtgggcgcaggcgcgacaggcctttttttcgagtggtaagaacaaagctgcactggaggctatagagagagcagccttctttgtcgcccttgatgaggagtcctactcttacgatccagaagacgaggcttccctgtcactttacggcaaggccctactgcatgggaattgctacaacagatggtttgataagtcattcactctgatctccttcaagaacgggcagctcggactgaacgctgaacacgcctgggcagacgccccgatcatcgggcatttatgggaattcgtacttggaaccgacagtttccacttgggatataccgagacgggccattgcctcggcaaacccaatccagcgcttgcaccaccaacacggcttcaatgggacattcccaaacagtgtcaggcagttatcgaaagtagctatcaggtcgccaaagcgctcgcagatgatgtggaactttactgtttccagttccttccattcggtaagggactgattaagaaatgcagaacgtctcctgatgcctttgtgcagatcgccttgcagctagcacattttagagatagagggaaattttgcctgacgtacgaggcttccatgacccggatgtttcgggaaggcaggacggagacggtccgaagttgcaccagtgaatctactgcttttgtccaagccatgatggagggttcacacaccaaggcagacctaagagacctcttccaaaaggccgcaaaaaaacatcaaaatatgtatcgcctggctatgacaggcgcaggaatcgataggcatctattctgtctgtacttagtgtctaagtatctgggcgtctcctccccctttctcgcggaggtcctgtcggaaccatggcgcctttccacctctcaaattccccagtcgcagatcaggatgtttgatccagagcaacatccgaaccatctcggagcggggggtggttttgggcccgtggccgacgacgggtacggggtatcttacatgatcgcaggggagaataccatcttttttcacatctcctccaagttctccagctccgaaaccaatgcgcagcggtttggaaaccatattagaaaggccctgttagacatcgctgatctgttccaggtacccaaagcgtactcgtag

SEQ ID NO: 145789 - DNA, 2319 bp, Artificial Sequence
  derived and/or modified sequence
atggctgaagcccatcaggcggtcgcctttcagttcaccgttactcccgatggggtggatttcaggctttcccgggaggcactcaaacacgtgtaccttagtggaattaattcctggaaaaagcgtctcattaggattaagaatggtatcctacgtggcgtgtacccgggaagtccaacctcatggctggtagtcatcatggccacggtgggctcatctttctgtaacgtggacatttccctcggcctggtgtcgtgcatccagcggtgcttgccacaaggctgtggaccgtatcaaacccctcagaccagggccctgctgagtatggccattttctcgacgggagtctgggtcactggaattttctttttccgtcaaaccttaaagcttctgctgtgttatcacgggtggatgttcgagatgcacggcaagaccagcaatttgaccagaatctgggccatgtgcataagattattgagctcaagacaccccatgctctactcctttcagactagcctgccaaagctgcctgtgcctcgtgtatctgccaccatccaaagatatcttgagtccgtaaggccacttctcgacgatgaagagtactaccgcatggaactgctcgctaaagaatttcaggataaaactgctccaagactgcagaagtatctagtgctcaaatcctggtgggcctcaaattacgtgtccgattggtgggaagaatatatttacctgagaggccggagccctctgatggtcaacagcaattactacgtcatggacctggtgttaatcaagaacacagacgtgcaggctgcccgcctgggcaacattattcacgctatgataatgtatcgcaggaagctcgatagagaggagattaaacccgtaatggcattgggcattgtgccgatgtgctcctatcagatggaacgcatgttcaatacaaccagaattccaggaaaggatacagacgttttacagcacctgagcgactcccgccacgttgccgtatatcacaaaggtcgtttttttaagctgtggctgtatgaaggtgcacggctgctgaagcctcaagatctggagatgcagtttcaaagaattctggacgacccaagccccccccagccaggagaagagaaacttgcggcactgaccgcgggcggacgcgtagaatgggctcaggctaggcaggcattctttagcagtggaaaaaataaggctgccctggaggccatagagagagccgcctttttcgtggcactggatgaggaatcttattcatacgaccccgaagatgaggcttcccttagcctctacggcaaggccctactgcatggaaactgctataatcgatggtttgacaagtctttcaccctgatttcgtttaagaatggtcagctggggctgaacgctgaacacgcctgggctgatgccccaataattgggcatctgtgggagtttgtgctaggaacagattcctttcacctgggttacacagagacaggacactgtttgggcaaacccaaccccgcccttgcacctccgactcggctccagtgggatattccaaagcagtgccaggccgttattgagtctagttaccaggtggccaaggcgctcgccgatgacgtggaactgtactgtttccagtttctgccttttgggaaggggctgataaaaaaatgcaggacatcccccgatgcctttgtgcagatcgccctgcagctggcccactttagagaccgcggcaaattttgcctaacctatgaggcaagcatgaccagaatgtttagagaaggaagaacagaaaccgtgcggtcttgcacatcagagtctacagcgttcgtccaggccatgatggaaggctcacataccaaggctgacctgagagatctattccagaaggcagctaagaaacatcagaatatgtaccggctcgctatgaccggcgctggaatcgacagacaccttttctgtctctacctggtgtcaaaatatctcggcgtctccagtccatttctggctgaggtgcttagcgagccatggcgcctgtcaaccagtcagatccctcagagtcagatccggatgttcgatccagagcagcatccaaaccatttgggcgcaggtggcggctttggcccagtcgccgatgacggttacggagtgtcttacatgattgctggtgagaataccatattctttcacatcagcagtaagtttagttcatccgaaacaaacgctcagaggttcggaaaccacatacggaaagctctactggacatagccgatctctttcaggtgcccaaggcatacagttag

SEQ ID NO: 145790 - DNA, 1704 bp, Artificial Sequence
  derived and/or modified sequence
atggagcttcttgccaaagagtttcaggataaaaccgccccaagattgcaaaagtacctggtcctgaagagttggtgggcaagtaattatgtatctgattggtgggaggagtatatctatttgcgggggagatctcctctgatggtcaacagcaattattatgtgatggatctcgttctgatcaaaaatactgatgtgcaggccgcccggctgggcaatatcattcatgcaatgatcatgtacagacgcaagttggacagggaagagattaaaccagtgatggctctgggaattgtgccgatgtgtagttaccaaatggaaaggatgttcaacacaacccggataccagggaaggatactgacgtactccagcatctttccgattcccgccacgtggccgtgtaccataagggtcgctttttcaaactgtggctgtatgagggggcgaggcttctgaagcctcaggatctggaaatgcagttccagagaattctggacgatccttcaccaccccagcccggggaagagaaactcgcggcgctgacggctggcggacgagtggaatgggcccaggcaaggcaagctttcttctcttcgggcaagaacaaagcagccttggaggctattgaaagagccgcattcttcgtggccctggacgaggagtcctactcctacgacccagaagatgaagccagtctttcattgtatggcaaggctttactccatggtaattgttacaacaggtggttcgacaaatcgttcaccctgattagttttaagaatggacagctgggattgaatgccgagcatgcctgggccgacgcacccattatcggacacctgtgggagttcgtactaggtactgacagctttcaccttgggtacaccgaaacagggcactgtctagggaaacccaaccccgctttggcaccaccaaccagactccaatgggatattcctaagcaggccgtgatcgaaagctcgtaccaggtagccaaggctctggccgatgacgtggagctttactgttttcagttcctgcccttcggaaaaggccttataaagaaatgccggacaagcccagacgcatttgttcagatcgcactccaacttgcacactttagagaccgtgggaaattctgtttgacctacgaagccagtatgacccggatgtttcgcgagggccgaaccgaaaccgtccggtcatgcacctccgagagcaccgcctttgtgcaagctatgatggaggggagtcatactaaggccgacctccgagacctcttccagaaagccgcgaaaaaacaccaaaatatgtaccgtctggctatgaccggggcggggatcgaccgccacctcttctgcctgtacctggtgagcaaatacctcggagtttcgagtccgttcctggcagaagtgctttccgagccctggcggctatccacatctcagataccacaaagccagatcagaatgttcgatcccgagcagcatcccaatcatcttggagccggtggcgggttcggcccagttgcagatgacggttacggcgtgtcatatatgatagctggggaaaacactatttttttccatatttctagcaagtttagtagctctgaaactaacgctcagcggttcggcaatcacattcgcaaagccttgctcgacatcgctgatctgttccaggtgcccaaagcttattcgtag

SEQ ID NO: 145791 - DNA, 2076 bp, Artificial Sequence
  derived and/or modified sequence
atggcagaggcgcatcaggcggtggccttccagttcacggtcactcctgatggcgtggactttcggcttagcagggaggcactcaagcatgtctacctgagtggaataaattcctggaaaaagaggctcataaggattaagaatggcatccttcgaggagtctaccccggaagtcccacctcctggctggtcgttataatggcaaccgtgggaagctcattttgtaatgtggacatcagtctcgggctcgtatcctgcatccagcggtgtctgccccagggctgcggcccttaccaaactcctcaaaccagagcactgctatccatggctatattctccaccggcgtgtgggtgaccggaatattttttttccggcagaccctgaaactgttactgtgctatcacggatggatgtttgaaatgcacggaaagacaagcaacctgactcgcatttgggcaatgtgtatcaggctcttgagcagccgccatcccatgctgtactcatttcaaacctctctgcccaaactgcccgtacctcgggtgtccgccacaattcagaggtacctcgagtctgtgaggccgctgctggatgatgaggagtactacagaatggagctcctggccaaagagttccaggacaaaactgctccccgtctgcaaaagtacctggtgctgaagtcttggtgggcctcaaattacgttagcgactggtgggaggagtatatttacttacgcggaagaagtccactgatggttaactctaactattacgttatggatctcgtgctgattaaaaacactgatgtgcaggctgccagactggggaatataattcacgcaatgatcatgtacaggagaaagttagaccgcgaggagatcaaaccagtcatggccttaggaattgtccctatgtgttcctatcagatggagcgtatgttcaacaccacccgtataccgggaaaagataccgacgtgctgcagcacctatccgattctcggcacgtggccgtataccataaaggcaggtttttcaagctgtggctgtacgagggcgcccggctccttagtctctacggaaaggcactgctgcatgggaattgctataatcgctggttcgataaatccttcactcttatttcttttaaaaacgggcagcttggcctaaatgctgaacatgcctgggcggacgctccaattatcgggcacctgtgggagttcgtgcttggaaccgattccttccacctgggctacaccgagactggtcactgtcttggaaagcccaacccagctttggcaccccccacgagactgcaatgggacatccctaagcagtgtcaagctgtgatcgagtcctcataccaggtggctaaagccttggccgatgatgtggaactgtattgtttccagttcctgccctttggaaaagggctgatcaaaaaatgtagaaccagtccagacgcgttcgttcagatcgctctccagctggctcatttccgggaccgtggcaaattctgcctcacatacgaggcttccatgacaagaatgttcagggaagggaggaccgagacagtgcgttcctgcacaagtgagtctacggctttcgtccaagcgatgatggaggggtcccacaccaaggctgatttgagagatctctttcaaaaagcagcgaagaaacatcagaatatgtacaggctggccatgaccggggccggtatcgataggcacttgttttgcctgtatctggtctctaagtacctgggggtgtcttcccccttccttgcggaagttctgtcggaaccctggcgactgtcaacatcacagataccacaaagccagatcaggatgtttgatcccgaacaacatcctaaccaccttggagccggcgggggctttggtcctgtcgcagacgacggctacggggtgtcttatatgatcgccggagaaaacaccatctttttccacatcagttcaaaattctcctcctctgaaaccaacgcccagaggtttggcaaccacattaggaaggccctgctcgacattgccgatctttttcaggtaccaaaagcttattcttag

SEQ ID NO: 145792 - DNA, 2319 bp, Artificial Sequence
  derived and/or modified sequence
atggccgaggcccaccaggccgtggccttccagttcaccgtgaccccagatggagtggacttccggctgagccgggaggccctgaagcacgtgtacctgagcggcatcaacagctggaagaagaggctcatccgcatcaagaatggcatcctgcggggcgtgtacccaggcagccccacctcctggctggtggtgatcatggccaccgtgggcagcagcttctgcaatgtggacatcagcctgggcctggtgtcctgcatccagcgctgcctgccccagggctgcggcccctaccagaccccccagacccgggccctgctgtccatggccatcttcagcactggagtgtgggtgacaggcatcttcttcttccggcagaccctgaagctgctgctgtgctaccacggctggatgtttgagatgcacggcaagaccagcaacctgacccgcatctgggccatgtgcatccggctgctgagcagccgccaccccatgctgtacagcttccagaccagcctgcccaagctgcctgtgccccgggtgtctgccaccatccagcgctacctggagagcgtgcggcccctgctggatgatgaggagtactacaggatggagctgctggccaaggagttccaggacaagacagccccccggctgcagaagtacctggtgctgaagtcctggtgggccagcaactacgtgtctgactggtgggaggagtacatctacctgcggggccgcagccccctgatggtgaacagcaactactacgtgatggacctggtgctgatcaagaacacagatgtgcaggccgcccggctgggcaacatcatccacgccatgatcatgtacagaaggaagctggaccgggaggagatcaagcctgtgatggccctgggcatcgtgcccatgtgcagctaccagatggagaggatgttcaacaccacccgcatccctgggaaggacacagatgtgctgcagcacctgagtgacagccgccacgtggccgtgtaccacaagggccgcttcttcaagctgtggctgtatgaaggagcccggctgctgaagccccaggacctggagatgcagttccagaggatcctggatgaccccagccccccccagcccggggaggagaagctggccgccctgacagctgggggccgggtggagtgggcccaggcccggcaggccttcttcagcagcggcaagaacaaggccgccctggaggccatcgagagagctgccttctttgtggccctggatgaggagagctacagctatgaccctgaagatgaggccagcctgagcctgtatggcaaggccctgctgcacggcaactgctacaaccgctggtttgacaagagcttcaccctcatctccttcaagaatggccagctgggcctgaatgctgagcacgcctgggcagatgcccccatcatcggccacctgtgggagtttgtgctgggcacagacagcttccacctgggctacacagaaacaggccactgcctgggcaagcccaacccagccctggccccacccacccggctgcagtgggacatccccaagcagtgccaggccgtcatcgagagcagctaccaggtggccaaggccctggctgatgatgtggagctgtactgcttccagttcctgccctttgggaagggcctcatcaagaagtgcaggaccagcccagatgcctttgtgcagatcgccctgcagctggcccacttccgggaccggggcaagttctgcctgacctatgaggcctccatgaccaggatgttccgggagggccgcacagagaccgtgcgcagctgcaccagcgagagcacagcctttgtgcaggccatgatggagggcagccacaccaaggctgacctgcgggacctcttccagaaggccgccaagaagcaccagaacatgtaccgcctggccatgactggagctggcatcgacagacacctgttctgcctgtacctggtgtccaagtacctgggcgtgagcagccccttcctggccgaggtgctgtctgagccctggaggctgagcaccagccagatcccccagagccagatccgcatgtttgatcctgagcagcaccccaaccacctgggcgctgggggcggcttcggccctgtggctgatgatggctacggcgtgtcctacatgattgctggggagaacaccatcttcttccacatcagcagcaagttcagcagcagcgagaccaatgcccagcgcttcggcaaccacatcaggaaggccctgctggacattgctgacctcttccaggtgcccaaggcctacagctag

SEQ ID NO: 145793 - DNA, 1704 bp, Artificial Sequence
  derived and/or modified sequence
atggagctgctggccaaggagttccaggacaagacagccccccggctgcagaagtacctggtgctgaagtcctggtgggccagcaactacgtgtctgactggtgggaggagtacatctacctgcggggccgcagccccctgatggtgaacagcaactactacgtgatggacctggtgctgatcaagaacacagatgtgcaggccgcccggctgggcaacatcatccacgccatgatcatgtacagaaggaagctggaccgggaggagatcaagcctgtgatggccctgggcatcgtgcccatgtgcagctaccagatggagaggatgttcaacaccacccgcatccctgggaaggacacagatgtgctgcagcacctgagtgacagcagacatgtggccgtgtaccacaagggccgcttcttcaagctgtggctgtatgagggcgcccggctgctgaagccccaggacctggagatgcagttccagaggatcctggatgaccccagccccccccagcctggagaggagaagctggccgccctgacagctgggggccgggtggagtgggcccaggcccggcaggccttcttcagcagcggcaagaacaaggccgccctggaggccatcgagcgggccgccttctttgtggccctggatgaggagagctacagctatgaccctgaagatgaggccagcctgagcctgtatggcaaggccctgctgcacggcaactgctacaaccgctggtttgacaagagcttcaccctcatctccttcaagaatggccagctgggcctgaatgctgagcacgcctgggcagatgcccccatcatcggccacctgtgggagtttgtgctgggcacagacagcttccacctgggctacacagagaccggccactgcctgggcaagcccaacccagccctggccccacccacccggctgcagtgggacatccccaagcaggccgtgattgagagcagctaccaggtggccaaggccctggctgatgatgtggagctgtactgcttccagttcctgccctttgggaagggcctcatcaagaagtgcaggaccagcccagatgcctttgtgcagatcgccctgcagctggcccacttccgggaccggggcaagttctgcctgacctatgaggcctccatgaccaggatgttccgggagggccgcacagaaacagtgcgcagctgcaccagcgagagcacagcctttgtgcaggccatgatggagggcagccacaccaaggctgacctgcgggacctcttccagaaggccgccaagaagcaccagaacatgtaccgcctggccatgaccggggccggcatcgacagacacctgttctgcctgtacctggtgtccaagtacctgggcgtgagcagccccttcctggccgaggtgctgtctgagccctggaggctgagcaccagccagatcccccagagccagatccgcatgtttgatcctgagcagcaccccaaccacctgggcgccggcggcggctttggacctgtggctgatgatggctatggagtgtcctacatgattgctggggagaacaccatcttcttccacatcagcagcaagttcagcagcagcgagaccaatgcccagagatttggaaaccacatcaggaaggccctgctggacattgctgacctcttccaggtgcccaaggcctacagctag

SEQ ID NO: 145794 - DNA, 2076 bp, Artificial Sequence
  derived and/or modified sequence
atggccgaggcccaccaggccgtggccttccagttcaccgtgaccccagatggagtggacttccggctgagccgggaggccctgaagcacgtgtacctgagcggcatcaacagctggaagaagaggctcatccgcatcaagaatggcatcctgcggggcgtgtacccaggcagccccacctcctggctggtggtgatcatggccaccgtgggcagcagcttctgcaatgtggacatcagcctgggcctggtgtcctgcatccagcgctgcctgccccagggctgcggcccctaccagaccccccagacccgggccctgctgtccatggccatcttcagcactggagtgtgggtgacaggcatcttcttcttccggcagaccctgaagctgctgctgtgctaccacggctggatgtttgagatgcacggcaagaccagcaacctgacccgcatctgggccatgtgcatccggctgctgagcagccgccaccccatgctgtacagcttccagaccagcctgcccaagctgcctgtgccccgggtgtctgccaccatccagcgctacctggagagcgtgcggcccctgctggatgatgaggagtactacaggatggagctgctggccaaggagttccaggacaagacagccccccggctgcagaagtacctggtgctgaagtcctggtgggccagcaactacgtgtctgactggtgggaggagtacatctacctgcggggccgcagccccctgatggtgaacagcaactactacgtgatggacctggtgctgatcaagaacacagatgtgcaggccgcccggctgggcaacatcatccacgccatgatcatgtacagaaggaagctggaccgggaggagatcaagcctgtgatggccctgggcatcgtgcccatgtgcagctaccagatggagaggatgttcaacaccacccgcatccctgggaaggacacagatgtgctgcagcacctgagtgacagccgccacgtggccgtgtaccacaagggccgcttcttcaagctgtggctgtatgaaggagcccggctgctgagcctgtatggcaaggccctgctgcacggcaactgctacaaccgctggtttgacaagagcttcaccctcatctccttcaagaatggccagctgggcctgaatgctgagcacgcctgggcagatgcccccatcatcggccacctgtgggagtttgtgctgggcacagacagcttccacctgggctacacagagaccggccactgcctgggcaagcccaacccagccctggccccacccacccggctgcagtgggacatccccaagcagtgccaggccgtgattgagagcagctaccaggtggccaaggccctggctgatgatgtggagctgtactgcttccagttcctgccctttgggaagggcctcatcaagaagtgcaggaccagcccagatgcctttgtgcagatcgccctgcagctggcccacttccgggaccggggcaagttctgcctgacctatgaggcctccatgaccaggatgttccgggagggccgcacagaaacagtgcgcagctgcaccagcgagagcacagcctttgtgcaggccatgatggagggcagccacaccaaggctgacctgcgggacctcttccagaaggccgccaagaagcaccagaacatgtaccgcctggccatgaccggggccggcatcgacagacacctgttctgcctgtacctggtgtccaagtacctgggcgtgagcagccccttcctggccgaggtgctgtctgagccctggaggctgagcaccagccagatcccccagagccagatccgcatgtttgatcctgagcagcaccccaaccacctgggcgccggcggcggctttggacctgtggctgatgatggctatggagtgtcctacatgattgctggggagaacaccatcttcttccacatcagcagcaagttcagcagcagcgagaccaatgcccagagatttggaaaccacatcaggaaggccctgctggacattgctgacctcttccaggtgcccaaggcctacagctag

SEQ ID NO: 145795 - DNA, 2319 bp, Artificial Sequence
  derived and/or modified sequence
atggccgaggcccaccaggccgtggccttccagttcaccgtgaccccagacggggtggactttagattgtcaagagaggcactgaagcacgtctatctgtcaggcattaactcctggaagaagcgacttattaggatcaagaatggaatcttgcgtggcgtttacccaggcagccctactagctggctcgtcgtgataatggcaacggtcgggtcctctttttgcaatgttgacatctccctgggccttgtgagttgcatccagagatgcttaccacaggggtgcggtccttaccagacaccacagacgcgggcactgctttcaatggcaattttttcgaccggcgtgtgggtgaccggaatcttcttttttagacagacattgaagctcctgttatgttaccacggctggatgttcgagatgcacggcaaaacctccaatctgactagaatctgggctatgtgtatccgcctgctgagttctcgccatcctatgctctatagctttcagacatcgctaccaaaactgccagtaccccgtgtcagcgccacaatccagcgctacctggagagcgtgcggcctctactggatgatgaagagtactatcgtatggagctgctcgccaaagaattccaggacaaaacagcgcccaggctgcagaaatacctcgtgctgaagagctggtgggccagcaactacgtttcagactggtgggaagagtatatatatctccgcgggaggtctcccctcatggtcaattccaattactacgtgatggacttggtgctaattaaaaacaccgatgtgcaggccgctcgcttaggcaacatcatacatgccatgataatgtataggagaaagctagaccgtgaggaaattaagcccgtaatggccctgggaattgtgcctatgtgtagttaccagatggaacggatgttcaacactacccgaatcccaggaaaagacacggacgtcttgcagcacctgtcagatagccggcatgtggccgtgtatcataaggggagattttttaaactatggttatatgaaggggcccgcctcctgaagccccaagacctggagatgcagtttcagaggatcctggacgacccatcgcccccccaacctggggaggagaaattggccgccctcacggccggcggacgcgtcgaatgggcccaagcacgacaggcatttttctcatcaggtaagaacaaggcagcactggaagccattgaaagagcggctttttttgtggctctcgacgaagagagttatagctacgatcctgaggatgaggccagcctatccctctacggcaaagctctcctacacggcaactgctacaatcgctggtttgataagagttttactctgatcagctttaagaatggccagctgggactcaatgctgaacatgcttgggccgatgcccccattattgggcatctttgggagttcgttctgggaacagattcgttccacctcgggtacaccgagactggtcattgcctgggcaaacccaatcccgccctggctcctcctacaaggctgcagtgggatatccccaagcaatgccaggctgtcatcgaatcatcatatcaagtggcgaaagcgttggccgacgatgttgaactttactgcttccagtttctcccgtttggcaaaggattaatcaaaaagtgtagaacctccccagacgccttcgtccagatagctctgcagctggcccactttcgagatagaggcaagttctgtcttacctacgaggcaagtatgacacggatgttccgagaaggcagaacagagaccgtccggtcgtgcacatccgaaagcacggccttcgtccaggctatgatggaaggatcccacactaaagctgatttaagagatctcttccagaaggctgccaaaaaacaccaaaacatgtatcggttggctatgacaggagctggaattgaccggcacttattctgcctgtacctcgtgtctaagtacctaggtgtcagttccccattccttgccgaagtgctgtcagagccatggcgcctgtccacttcccaaattccccagagccaaattcgcatgttcgaccctgagcaacaccctaaccacctcggagccggcggcggatttggccccgttgctgacgatggatacggggtgagctatatgatcgccggcgagaacactatctttttccacatctcttccaagttttcatcgtcagagaccaacgcacagaggtttggcaatcacatcaggaaggccctcctcgatatcgccgaccttttccaggtacctaaagcttacagctag

SEQ ID NO: 145796 - DNA, 2319 bp, Artificial Sequence
  derived and/or modified sequence
atggccgaggcccaccaggccgtggccttccagttcaccgtgaccccagatggggtcgactttcgattgtctcgcgaggccctaaaacacgtgtacctttcaggaatcaatagttggaagaagcggctgatacgaattaagaacgggatcctgcgcggcgtatatcctggaagcccaactagctggctggtcgtaattatggctaccgtgggctcctctttttgtaatgtggacataagtctgggattagtttcctgtattcaacgatgtctcccccagggatgcggtccgtatcagaccccgcagaccagagccctattaagcatggccatcttcagcaccggggtgtgggttaccggaatcttttttttccgccaaaccctgaaattgctgctctgctatcacggttggatgttcgaaatgcacgggaaaacttctaatttgactcggatctgggctatgtgtatcaggttactctcctcgaggcaccccatgttatatagctttcagacttctctgcccaagctgcccgtgcctagggtgagcgccaccattcaacggtacctggagagcgtgcggcccctcctcgacgatgaagagtactaccgaatggagcttcttgccaaggaattccaggacaaaaccgcgcctcgcctgcagaagtatctggtgctgaagtcgtggtgggcaagcaattacgtgagcgactggtgggaagagtatatatacctgcgtgggcggtctcccttgatggtcaacagtaattactatgtgatggaccttgtgttgatcaagaataccgatgtgcaggctgcccgcttgggcaatatcatccatgccatgattatgtaccgacgaaagctggacagagaagagataaaaccagtcatggctcttggcatcgtgcctatgtgctcgtaccagatggagcggatgtttaacaccaccaggatcccaggaaaggacacagatgtgttgcagcatctctcggattctcgtcacgtcgccgtttaccataaaggtagattttttaaattgtggctgtatgagggcgcaaggctgctcaagccacaagacctggaaatgcagtttcagagaattctcgacgaccccagccccccccagccaggggaggagaaactggcagctctgacagctggagggcgggttgagtgggcgcaagcacgtcaagctttcttctcttccggaaagaataaggcagccctggaggccatcgagcgcgccgccttctttgtggctttagacgaagagtcttacagctatgaccccgaggacgaggcctccctgtcgctctatggcaaagccctgttgcacggaaattgttacaaccgatggttcgataaaagctttacattaatttccttcaaaaatggccaattaggcctgaatgccgaacacgcatgggcagatgcaccaatcatagggcatctctgggagtttgtgctgggaaccgactcattccatctgggttacactgaaaccggacattgcctgggaaagccgaaccctgccctggccccccctacgcgccttcagtgggacattcctaagcagtgccaagcagtcatcgaatcatcttaccaggtcgcgaaggcccttgcagacgatgtggagctctattgtttccagttcctcccttttggtaagggcctgataaaaaaatgccggacatctcccgatgcttttgtccagattgcattgcaacttgctcatttcagagaccgcggcaaattttgtctgacatacgaggcctccatgacaaggatgtttcgagaggggaggaccgagactgtccggtcttgtacgagcgagtcaactgcctttgtgcaggcaatgatggagggtagtcacactaaagcggacctccgtgacctgttccagaaagcagccaagaaacaccagaatatgtacaggctggccatgaccggtgctgggatagaccgacacctgttctgtctttatttggtgtcaaaataccttggagtatccagcccttttttggccgaggtgctatccgaaccgtggcgcctctcaacttcccagatcccgcagagtcagatccgcatgtttgatcccgagcagcatccaaatcacctgggtgccggtggcggatttgggccagtggccgacgacggatatggagtgtcctatatgatcgctggggagaataccatattctttcacattagtagtaagttttcttccagtgagacgaatgcccaaagattcggtaatcacattcgaaaagcacttctggatattgccgacctctttcaagtgcccaaggcttatagttag

SEQ ID NO: 145797 - DNA, 2319 bp, Artificial Sequence
  derived and/or modified sequence
atggccgaggcccaccaggccgtggccttccagttcaccgtgacccctgacggagttgactttcgcctcagtcgggaggccctgaagcacgtctacttgtcagggataaacagctggaaaaaacgacttattaggataaagaatgggatacttaggggcgtataccccggttcccccaccagctggttagtcgtgattatggctacagttgggagtagtttctgcaatgtggacatcagcttaggactggtttcctgcattcaaagatgtctccctcagggctgtggcccctaccagacccctcagacaagagcattgcttagcatggccattttctccaccggcgtctgggttacaggcatttttttcttccggcagacactgaaactgctgttatgttatcatggatggatgtttgagatgcacggaaagacttcaaatctgacgaggatttgggccatgtgcatacgactactgtcttctcgccatcccatgctgtactcctttcagacttcactcccaaaactcccagtgccgcgagttagcgccacaattcaaaggtatctggagagcgtacgaccactgcttgatgacgaagagtactaccggatggaactccttgccaaggagttccaggacaagaccgctccacggctccagaaatacctagttttaaagtcttggtgggccagcaactacgtctcagactggtgggaagaatatatatatctgaggggacggagccccttgatggtcaacagtaactattacgtcatggacctcgttttgatcaagaataccgatgtgcaagctgccagactgggaaatatcatccacgccatgataatgtatcgacgcaagcttgatagggaagaaatcaaacccgtaatggctttggggatcgtccctatgtgttcctatcagatggaacgtatgttcaacaccaccagaatcccaggcaaagacacagatgtcctccaacatctttcagattctcgccatgtggccgtgtatcacaagggccgattcttcaagctatggctgtatgaaggtgcaagactgttaaaaccccaggatctggagatgcagttccagcgaattttagacgacccctcaccccctcagccgggcgaagagaaactagctgctctaacagccggcgggagagtggaatgggcgcaggccaggcaggcgtttttttcatccggcaaaaacaaggccgcccttgaggctattgagcgggccgctttctttgtcgctttggacgaggaaagctattcatatgaccctgaggatgaggcctcattatccctgtacgggaaggctctgctccatgggaattgttataaccgctggtttgacaagagtttcactttaatttcattcaaaaacggacagctggggctcaacgccgagcacgcttgggcagatgccccgattatcgggcacctgtgggagttcgtcttgggtactgatagcttccaccttggttacaccgagacgggacactgcctgggcaagccaaacccagccttggccccacccactagactgcagtgggatatccccaagcagtgtcaagccgtcatcgagtcatcatatcaagtggcgaaagcgctcgccgacgatgtggaactttattgcttccagtttctaccttttggtaaagggcttattaaaaagtgcaggacaagccccgacgcctttgtacagatagctctgcaactcgctcacttccgcgatagggggaagttctgcctgacctacgaggccagcatgaccagaatgtttagggagggccggaccgaaacagttaggtcctgtacgagcgagtcaacagccttcgtgcaagccatgatggagggcagccacaccaaagccgacctgagggacctcttccagaaagctgccaagaagcatcagaatatgtataggctggcaatgaccggagctggcatcgatagacacttattttgcctgtacctcgtttcaaaataccttggcgtgtcaagcccattcctggccgaagttttgagtgagccctggaggctgtcaacttcacagattccacagagccaaatccggatgttcgaccccgagcagcaccctaatcatctaggtgccggaggtgggttcgggcccgtcgccgacgacggctacggcgtgagttatatgattgctggtgagaataccatcttttttcacatcagtagcaaattcagtagttcagaaacgaatgcccaacgatttgggaatcatatcagaaaagccttgctggatatcgccgacctgtttcaggtacccaaagcctattcctag

SEQ ID NO: 145798 - DNA, 2319 bp, Artificial Sequence
  derived and/or modified sequence
atggccgaggcccaccaggccgtggccttccagttcaccgtgacccctgatggtgtcgattttcgcctatcccgcgaggctctcaaacatgtttaccttagtggaattaattcttggaagaagagactgataagaatcaagaacggtattctgagaggagtttatccaggtagtcctaccagctggctggtggtgattatggcgacagtcggctcctcattctgcaatgtggatatatcccttgggctggtgtcctgcatccagcggtgcctgccccagggctgcggtccctatcaaaccccccaaacacgcgcccttctgagcatggccatcttctcgactggcgtgtgggtgaccggcatttttttcttccgtcagactttgaagttgctgttatgctatcacggctggatgttcgaaatgcacggcaaaacttccaacttgacccggatttgggccatgtgtatccgcctgttgtcctcaaggcaccccatgttgtatagcttccaaacatccttgcccaagctgccagtgcccagggtcagtgccactatccagcggtatttggagagcgtgcgccccctcttggacgacgaggagtactatcgcatggagttgctagcaaaagagttccaggacaagaccgctccacggctccagaagtatttagtactgaagtcatggtgggcatctaactacgtgagtgactggtgggaagagtacatttatctgcggggacggagcccactcatggtgaatagtaactattacgtcatggacctggtgctgatcaaaaatacggacgttcaggccgccaggctgggcaacattatacacgcaatgattatgtatcggcgcaagctggaccgggaggagatcaagccggtgatggcactcggcattgtgcctatgtgtagctaccaaatggaacgtatgttcaacaccacccgcattccagggaaggataccgatgtgctgcagcacctctccgacagtagacacgtggccgtgtaccacaaaggacgcttctttaagctgtggctgtatgagggggctcggttgctcaaacctcaagacctagaaatgcagttccagcggatcctggacgacccctcccccccacagccaggcgaagagaagttagcagcactgacagcaggagggcgagttgagtgggcccaggcccgacaagcctttttctctagcggcaaaaataaagcagctctggaagccattgagagagctgcattttttgttgctttggacgaggagagctacagctacgatccagaagacgaggcgtccctgtccctgtatgggaaggccttactgcacggtaactgctacaatcgctggttcgataaatcatttactctgattagcttcaagaacggtcagttaggcctcaacgcagagcacgcatgggccgacgctcccataattggccacttgtgggagtttgtacttgggaccgacagtttccatttgggttatacagaaactggacactgtcttggcaaacccaatcctgctctggctccacctacaagactgcagtgggacattccgaagcagtgtcaggccgttattgagtcgtcctaccaggtggctaaggcactcgctgacgatgtcgaactgtactgctttcagtttctgccctttggcaaaggcctgatcaagaaatgtcgtaccagtcccgatgcattcgtgcaaatagccctccaattggcccattttcgcgacagaggcaaattttgcttaacttatgaagcctcaatgacaaggatgttcagagaaggaaggacagaaaccgtacgttcttgtacttcggagagcacagcttttgtgcaggccatgatggagggttctcatacgaaagccgacctacgagatctttttcagaaggccgccaaaaagcaccagaacatgtacaggctggctatgacaggggcaggaatcgaccgccatttgttttgtctgtacttggtcagcaaatacctcggcgtctccagcccctttctggcggaggtgctctctgaaccttggagactatcgacctcccagatcccccagtcccagatcagaatgtttgacccagagcaacatcccaaccacctcggcgccggtggcggattcgggcccgttgcggatgacggttacggcgtgtcctacatgattgccggcgaaaacactatcttcttccacatctcctctaagttcagttctagtgagaccaacgcgcaacgtttcgggaatcacatccgcaaagcactcctggacatagctgacctttttcaggtgcccaaggcctacagctag

SEQ ID NO: 145799 - DNA, 1704 bp, Artificial Sequence
  derived and/or modified sequence
atggagctgctggccaaggagttccaggacaagaccgccccccggctgcagaagtatctcgtcctgaaatcctggtgggctagcaattatgtctctgattggtgggaggaatatatttatctacgaggaagaagccctctgatggtgaacagtaattattacgtgatggatcttgtgctgatcaaaaacaccgatgttcaggccgcacgattaggcaatatcatccatgctatgatcatgtatcgcagaaaattagatagggaggagattaagcctgtgatggccttaggcatagtcccgatgtgctcttaccagatggagcgaatgtttaataccactcgaattcctggcaaggacaccgacgtcctgcaacacctatctgatagtaggcatgtcgccgtttaccacaaggggcggtttttcaaactgtggctgtacgagggcgcaagactgcttaaaccccaggacctggagatgcagtttcagagaatcttagatgacccatctccaccccagcccggcgaggagaagctggccgctctcaccgctgggggtcgagtggagtgggcccaagcccggcaagcctttttctcctccggcaaaaataaggctgcattggaggctatcgaaagagccgcttttttcgtggcactggatgaggagtcttatagctatgatcctgaagacgaagcctccctgtccctctacggcaaagctctgctccatggaaactgttataacaggtggtttgacaagagctttaccctgatctccttcaagaacgggcaacttgggctgaatgcggaacacgcctgggccgacgcaccaataatcggacacctgtgggagttcgtgcttggaaccgactcttttcacctcgggtataccgagaccgggcattgtctgggaaagcccaaccccgccctggcacctcccacacgtctccagtgggacatcccaaaacaggccgttatagagagctcctaccaggtcgccaaagcacttgccgacgacgtcgaactgtattgcttccagtttctgccgttcggcaaaggattgattaagaagtgtagaactagtcctgacgcttttgtgcagatcgccctgcaactggcacactttcgggatcgggggaaattttgcctgacctatgaggcttccatgactaggatgttccgggaaggacgcactgaaactgtacggagttgcacctccgagtccacggcattcgtgcaggccatgatggagggttctcataccaaggcagacctgagggacctcttccagaaggccgcgaagaaacaccaaaatatgtaccggcttgccatgaccggcgccggcatcgatcggcacctgttttgtttatatttggtaagtaagtacctgggggtgtcttctccgttcttggctgaagtactgtccgagccgtggcgactcagtacgagccaaattccccaatcccagatccggatgtttgacccggagcagcaccccaatcatcttggcgccggaggtggctttggtcctgtggctgacgatgggtatggggtttcatatatgatcgccggagagaatacaatcttctttcacatatcctccaaattctccagcagcgaaactaatgcccaacgtttcggaaatcatatcaggaaagcgctactagacatcgcagacctttttcaggttcccaaggcttactcttag

SEQ ID NO: 145800 - DNA, 2076 bp, Artificial Sequence
  derived and/or modified sequence
atggccgaggcccaccaggccgtggccttccagttcaccgtgaccccagacggcgtggatttcagactgtctagagaggccttgaaacacgtgtacctgtcagggattaatagctggaagaaacgactgatccgaatcaagaatggcatcttgcgcggagtgtatccaggtagccccaccagctggttagtggtgataatggccaccgtaggcagctcattttgtaatgtcgacattagtctgggtctagtatcttgcatccaaaggtgcctcccacaaggttgtggcccctatcagacccctcagaccagagccctgctgagcatggcaattttctcaacaggcgtatgggtgactgggatcttcttcttcaggcagactttgaagctgttgctgtgctaccacggatggatgttcgagatgcatggcaagactagtaacctgacacgcatttgggccatgtgcataagactgctgagctctagacaccccatgctgtacagcttccagacatcgctgcctaaacttcctgtcccgcgggtatcagccaccatacaaagataccttgagtcggttcggccccttctagatgatgaggagtattatcggatggagctgctagccaaagaatttcaggacaagactgcccctagactccagaagtacttagttttgaaatcatggtgggcctccaactacgtgtccgactggtgggaggagtatatctatctgcgcggcaggagtcccctgatggtgaatagcaactactatgtgatggatttagttctgatcaaaaatacggacgtgcaagctgcaaggctgggcaatataatccatgctatgataatgtatcggagaaagctggaccgggaggaaatcaagcccgtgatggctctggggattgtgccaatgtgcagttaccagatggaaagaatgttcaacactacaagaatccctggaaaagacacggatgtcctgcagcatttgtccgactcgcggcatgtggccgtctaccacaagggacggttcttcaagctgtggctctacgaaggagcaagattgctgagtttgtatgggaaggctctgctgcatggcaactgctataaccggtggttcgataagagctttacactgatttctttcaagaacggacagttgggactgaacgcagagcacgcctgggccgatgctccaattattggacatctgtgggagtttgtcttgggaactgactcctttcacctggggtacactgagacggggcattgtctgggcaagccaaatcccgcactcgccccccctacccgactccagtgggacatacccaagcagtgccaggccgtgatagagtcttcttatcaggtggccaaggcgttggccgacgacgtggagctttactgtttccagttcctcccttttgggaagggactcataaaaaagtgtcggaccagccccgacgcattcgtacagatcgcactccagctggcacatttccgagatcgtggaaaattctgcctgacttacgaagcctccatgaccagaatgtttagagagggcagaactgagacagtgcgaagttgtacttccgagagtaccgcgtttgttcaggccatgatggaaggaagccacacaaaagctgacctgcgtgaccttttccagaaggccgctaagaagcaccagaatatgtatcgcctcgctatgactggggcagggatcgataggcacctgttctgtctctacctggtgagcaaatacctgggcgtcagtagtcccttcctcgccgaagttctgtctgaaccttggcggcttagcacttcgcagatcccccagagccagatccgtatgttcgatcccgaacagcaccccaaccacctgggagctgggggagggttcgggcctgttgctgacgatggatacggagtttcatatatgattgcaggcgagaacactattttctttcatatctcttcaaagttctcttcatccgagaccaatgcgcagcgctttgggaaccacatcaggaaagctcttctcgacattgcggacctgttccaggtgcctaaggcttattcttag

SEQ ID NO: 145801 - DNA, 2319 bp, Artificial Sequence
  derived and/or modified sequence
atggctgaggcccatcaagctgtcgctttccagttcactgttacacccgacggggtcgattttcggctgagccgcgaggcccttaagcatgtttatctcagtggcatcaacagctggaagaagagattgatcaggatcaagaacggcatcctcagaggagtgtaccccggaagtccaacatcttggcttgtcgtcatcatggcaaccgtgggatcttccttttgcaacgtggatatctctctcgggcttgtaagttgtatccagagatgtctgccacagggttgcgggccatatcagactccccagactcgggcactgctgtcaatggctatcttctctaccggagtctgggtcacaggcatcttttttttcagacagactcttaagctgctgttgtgttatcatggctggatgtttgagatgcacgggaaaacttccaacctgacacgaatctgggcgatgtgcatcagattactgagctccagacaccccatgttgtacagcttccaaaccagtctgccgaaattgcctgttcctcgcgttagcgcgactattcagcgctacctggagtcagtgagaccgttactggacgacgaagagtactaccgcatggaattacttgcgaaggaattccaggataagacagctcccaggttgcagaagtatctcgtgctaaaaagctggtgggccagcaactacgtttcagattggtgggaggagtacatctacctgcgcggacgttccccgctgatggttaactcaaattattacgttatggatctggtgctgattaaaaacacagacgtccaggcagctagactgggcaatatcatacacgctatgatcatgtatcgtcgcaagctggatagggaagaaattaagcctgtgatggctctgggtattgtgccaatgtgttcctatcaaatggaacgcatgtttaacacaacccggattcctggcaaagatacagatgtattacagcacctttccgactctcgacacgtagcagtataccataaagggaggttctttaaactgtggctttacgaaggcgcacgtctcctgaagccacaggacctcgaaatgcaattccagcggatcttggacgacccatccccaccccagcccggtgaggaaaaattagccgctctgacagcaggcggtcgagttgagtgggcccaggcacggcaggctttcttttcctcggggaagaacaaagcagcattggaggccatcgagagagcagctttctttgtggcattggatgaggaaagctattcatatgacccagaggacgaggcttctctgtctctgtatgggaaagccctcctgcatgggaactgctataataggtggttcgataaatccttcacactcatctcctttaagaacggacaactgggattaaatgcagaacacgcctgggccgacgccccaatcatcggacatttatgggagttcgtgctcggtactgattcattccacctgggctacacagaaactggtcattgtctgggtaagcctaaccccgctctcgcccctccgacccgtctccaatgggatattcctaagcagtgtcaagccgtgatagaatcctcgtaccaggtcgccaaagctctcgccgacgatgttgaactctattgctttcagtttctgcccttcggcaaagggctgattaagaagtgcagaacttccccagacgcgttcgtgcaaatcgcgctgcagctggcacatttccgcgatagaggcaagttttgccttacatatgaggcgtcaatgacccggatgttccgggagggaagaaccgaaacagttagatcctgtacatccgagtccacagcattcgtccaggctatgatggagggtagccatacaaaggccgatctaagagatctctttcagaaagccgcaaagaaacatcagaacatgtatcgcttggccatgacaggggcaggcattgaccgacacctattttgcctttacttggtctctaagtatttaggtgtttcatcccccttcctcgcagaggtcctgagcgagccatggcgcctgagcacttcccaaatccctcagagtcagattagaatgtttgacccagagcagcacccgaaccacctaggcgcaggtgggggttttggacctgtggctgacgatggctacggcgtctcatatatgatcgcaggcgagaacacaatcttttttcacatctcttctaagttctcatcttccgaaacaaacgcacagagattcgggaaccacattcgcaaggctctgctggacatcgcagatttgtttcaggtgcctaaagcctacagctag

SEQ ID NO: 145802 - DNA, 2319 bp, Artificial Sequence
  derived and/or modified sequence
atggcagaagcccatcaggcagttgcatttcagtttacggtgacaccggacggagttgatttcagattaagccgggaggccctgaaacacgtttacctgagtggcattaacagttggaagaagcggctgatacggattaaaaacggcatcctgcgcggtgtgtatcccggatcccctacctcttggctggtcgtcattatggcaactgtgggaagttcattttgcaatgtggatatctcattgggcttagtttcatgtatccagcggtgtttaccccaaggatgcggtccatatcagacgcctcagacccgtgctctcctgagcatggccatcttttcaactggcgtttgggtcacaggcatctttttctttcggcagacactcaagctgcttttgtgctaccacgggtggatgtttgagatgcatggaaagacgagtaatctcacccgcatctgggctatgtgcatccgcctcttgagctccagacatcccatgttgtactctttccagacaagcctgcctaaattgcccgtgcccagggtcagtgcaacaattcagaggtatttagagtctgtgcggcctctgctggatgatgaggagtactaccgaatggagcttctcgccaaggagtttcaggacaaaaccgcacccagactccagaagtacttagtacttaaatcttggtgggctagtaattacgtgtcagattggtgggaagagtatatctatttgcgcggacggtctccactgatggtgaattcaaattactacgtcatggatttggtgctgatcaagaacactgatgtacaagctgccaggcttggcaacattattcacgctatgatcatgtacaggcgtaaactggatagagaagagattaagccggtcatggccctagggatagtgccaatgtgttcttaccagatggaaaggatgtttaatactacaagaatacctggaaaagatactgatgttttgcagcatttaagcgactcacgacacgtagcagtataccacaagggcaggttctttaaactgtggttgtacgaaggagccagactactgaaaccccaggacctggagatgcagttccagcgcatcttggacgacccaagtccacctcagccaggcgaggagaaactggctgcactgactgccggtgggagagtagaatgggcccaagcccgacaggcatttttctcctctggcaaaaataaagccgcactggaagcgatcgagcgtgcggctttttttgttgccctggacgaagaatcttactcctacgaccccgaagacgaggctagtctatcgctctacggcaaagctctgctgcatggtaactgctacaacagatggttcgacaaatccttcacactcattagcttcaaaaacggacagctcggtttgaacgctgagcacgcctgggcggatgccccaatcattgggcatctctgggagttcgtgctgggaacggattctttccatctcggctatacggaaaccggccactgccttggcaaacctaacccggcactggcccctcctacgcgactgcagtgggatattcccaagcagtgtcaagccgtaatagaatccagctaccaagtggccaaggcacttgccgacgatgtggagctatattgtttccaattcctcccttttggcaaaggcttgatcaaaaaatgtcgaaccagccctgacgcattcgtgcagatcgcactacagcttgcccattttagagacagggggaagttttgcttaacgtatgaggcatccatgacacgcatgtttcgcgaggggaggaccgaaacagtgcgctcgtgcacaagtgaaagcacagcgtttgtccaagcaatgatggaaggctcccatacaaaggctgacctgcgagacctgtttcagaaggcagcaaaaaaacatcagaacatgtatcgcctggctatgacaggagctggcattgacagacatctgttttgtttgtacttggtttctaagtatttgggcgtttcctctccctttcttgccgaggtgttatccgaaccttggcgcctgagcacatcccagataccacaatctcagatccggatgttcgacccagagcaacatcctaatcatcttggcgctgggggaggatttggacccgtggcggacgatgggtatggtgttagctatatgattgctggcgagaacaccatttttttccacatctcatccaaattcagcagctccgaaactaatgcccaacggttcgggaatcacatccgcaaggcattgttagacatcgcagacttattccaggttcctaaggcctacagctag

SEQ ID NO: 145803 - DNA, 2319 bp, Artificial Sequence
  derived and/or modified sequence
atggccgaggctcaccaagctgtggctttccaattcaccgtgaccccagacggcgtggattttcgtctttcaagggaagcattgaagcatgtctacctgtctggcatcaacagctggaagaaacgcctcattcgcataaaaaatggtatactgagaggcgtgtaccctgggagccctacaagctggctggtcgtgatcatggctaccgtgggctcctctttttgcaatgtcgatatctccttaggactggtatcctgcatccaacgatgccttccacagggctgcggaccctaccagacacctcagaccagggcactactctccatggcgatcttctcaactggagtgtgggtaactggtattttcttttttagacaaaccttgaagctcctgctgtgctaccacggatggatgtttgagatgcacggaaagactagtaacctgacgcgcatatgggccatgtgcattcgcttacttagctccagacatcccatgctctatagtttccagacttccctgcctaagttgccggtccctcgcgtgtctgccactatccaacgctacctcgagagcgtgcggcctctgttagacgacgaagagtattatcggatggaactgctcgccaaggaattccaggacaagacagccccacggctgcagaagtacctcgtcctgaaatcctggtgggcctccaattatgtctctgactggtgggaagagtatatttatctgcgagggcgaagccctctgatggtcaattcgaactactacgtgatggatctggttctgatcaagaacacagatgtgcaagctgcaaggttgggcaacatcatccacgctatgatcatgtaccgcagaaagttagatagagaggaaattaagcctgtcatggcactgggaatcgttcccatgtgctcttatcaaatggagagaatgtttaatacaactcgaattccaggcaaagatacggacgtgctccaacatctgtctgattccaggcatgtggcagtctaccataaagggagattcttcaagttgtggctctacgagggagccaggctgctgaaaccccaggacctagagatgcaatttcagaggattctggatgacccttcgccccctcagccaggcgaggagaagcttgctgccttgacagcgggtggcagggtggagtgggcccaggccaggcaagcctttttcagttcgggcaaaaacaaggcagcgcttgaggccatcgagagggctgcctttttcgttgcacttgatgaagaatcatattcttacgaccctgaggacgaggcctccttgtctctctatggcaaagccttgcttcatggcaattgttacaatcgttggttcgataaatcctttactcttatatcattcaaaaacggacaactgggtctcaacgccgagcacgcgtgggccgatgcccctattattggccatctgtgggagttcgtgctgggtaccgattcctttcacctgggatacaccgagaccggccactgtctcggcaagccaaacccagcgctcgccccaccgacgcggctgcagtgggacattcccaagcagtgccaggccgtgatcgaatcaagctaccaggtcgctaaggctttggccgacgacgtcgagctgtattgctttcagtttctgcctttcggcaaggggttaataaaaaagtgccgaacgtcccccgacgcgtttgtgcagatcgcattgcagcttgcccacttcagggaccgaggaaagttctgtctgacctacgaagctagtatgacacgcatgttccgcgagggcagaacggaaactgttaggagctgcacaagcgagtctacagcgtttgtgcaggccatgatggagggcagccatacaaaggccgatcttcgggatctctttcagaaagctgccaagaaacaccagaatatgtaccggctggctatgacaggggctggcatcgaccgccatctgttttgtctttacttggtgtcaaaataccttggggtcagctcaccttttttagccgaggtactgtcagagccatggagactgtctacttcacaaatcccacagtctcagattcggatgtttgatcccgaacagcatcccaatcatctgggtgccggtggtgggttcgggcctgtggccgacgacggctacggtgtttcctacatgattgctggagagaacaccattttctttcacatttcctctaagttcagctcctcagaaactaacgcccagcgattcggcaaccacatcaggaaggccctcttggacattgccgacctcttccaggtgccaaaggcctacagctag

SEQ ID NO: 145804 - DNA, 2319 bp, Artificial Sequence
  derived and/or modified sequence
atggcagaagcccaccaagctgttgcctttcaatttacagtaactcctgacggggtggatttcagactgagtcgagaagccctgaagcatgtatacctgtcaggaatcaatagctggaaaaaaagactcatcagaatcaaaaatgggatcctgcggggagtttatccgggatccccaacgtcttggctcgttgtgattatggccacagtcggatcatcattttgtaacgtggacattagcctagggctcgtgagttgtatccaacgctgccttccgcagggatgcggcccataccaaactcctcagactagagcccttctctccatggccatcttttcgacaggagtatgggtaacaggtattttcttcttcaggcagacgctgaaattgctactctgttaccatgggtggatgttcgaaatgcacggcaagacgagtaatctgacacggatctgggcaatgtgcattcggctactgagttcacggcatcccatgctgtattcctttcaaacaagtcttcctaagctaccggtgccgagggtttccgccacaatccagcggtacctggagtcagtgcggccacttcttgacgacgaagagtactatcgcatggaactgctagccaaagagtttcaggataagactgctccacgattacagaaatatctcgtgcttaaaagctggtgggctagcaactatgtatccgattggtgggaggaatatatctacttgcgcggaaggtcacctttaatggttaacagtaattactacgtgatggatctggtgttaatcaaaaatactgacgtgcaggccgctagactgggtaacattattcacgccatgatcatgtacaggcgtaagctggacagagaagaaattaagcccgtgatggccctggggattgtgcccatgtgctcatatcagatggagcgaatgtttaatacgaccaggatcccaggtaaagacactgacgtcctgcaacacctgagtgatagccgccacgtggctgtgtatcacaaaggaagattctttaaactgtggctctacgaaggggctcggcttttaaagcctcaagacctcgagatgcagtttcagcgcatcctggacgacccaagccctccccagcctggagaggagaagcttgctgccttgactgccggaggtcgcgtggaatgggcgcaggcacggcaggccttcttctcatctggtaaaaataaagctgcattagaagctattgagcgggcagccttcttcgttgcattggatgaggagtcatacagttacgatcccgaggatgaagcaagcctgagtctctatgggaaagctcttctgcacgggaattgttacaaccggtggttcgacaaaagcttcacactgatcagctttaagaacggccagctgggccttaatgcggaacatgcttgggcggacgcacctattatcggacacttatgggagttcgtgctggggaccgattcctttcaccttggttacaccgaaaccggacattgtctgggcaagcctaacccggctctcgctcctcctactagattgcaatgggacattcccaagcagtgccaggcagtgatcgaatcatcataccaagtggctaaggcactggctgatgatgtagagctttattgttttcagttcttgcccttcgggaagggcctcattaagaagtgtagaacttccccagacgcattcgtgcagatcgccctccagctagcacacttccgggaccgcggtaaattttgtctgacctatgaagcttctatgacacgaatgttcagagaaggtaggactgagacagtaagatcgtgtacaagcgaaagcacggcctttgtacaggcaatgatggaggggtctcatactaaagcagatctgagagaccttttccagaaagcagccaagaaacaccagaacatgtatcgattggctatgactggggcaggcattgacagacacctattctgtctgtatttggtgagtaagtatctcggggtatcatctcccttcctggctgaggtgctgtcagagccctggcgtctttccactagtcagatccctcaaagtcagatacgtatgttcgatcccgagcagcaccccaaccatctgggagctggtggtggttttggacccgttgccgacgacggttacggagtgtcctacatgatcgctggggaaaataccatcttctttcacatttccagtaagttctccagctccgagaccaacgctcagagatttggtaatcacatcagaaaagccctactcgatatcgctgacctcttccaggtgcctaaggcatacagttag

SEQ ID NO: 145805 - DNA, 1704 bp, Artificial Sequence
  derived and/or modified sequence
atggaacttctggctaaagaatttcaagataagaccgcccctcgtctgcagaagtacctcgtgttgaaatcctggtgggcgagcaattacgtcagcgattggtgggaggagtatatctaccttaggggaaggtctcccctgatggtcaattccaattattacgtgatggaccttgtcttgatcaaaaacaccgatgtccaggccgctcgtctgggcaacattattcatgcgatgataatgtaccgccgtaaactcgacagggaggaaatcaagcctgttatggccctggggatcgtcccaatgtgcagttatcaaatggaacgcatgtttaataccacccgtatcccaggcaaagataccgatgtcctacagcatctctctgattctagacatgtcgctgtctatcacaagggacgcttcttcaagttgtggctctatgaaggcgctaggctgttgaaaccccaggatctggaaatgcagtttcagcgtattctggacgacccttctccaccccaaccgggagaggagaagctggccgctctgacggctggaggaagggttgagtgggcccaagccaggcaggccttttttagttccggcaagaacaaagccgcacttgaggcaattgagcgcgctgcattctttgttgctctagacgaggaaagttattcctacgatccagaggacgaggcctccctgagtctctatggaaaggccctcttacacgggaactgttataacaggtggtttgacaagtcttttacccttattagcttcaagaacggccaattgggcctgaatgccgagcatgcctgggcggatgctccaattataggccacctgtgggagtttgtactagggacagatagctttcatctcgggtatacagaaacaggccactgcctggggaaacctaatccagccctagcccctcctacccggttgcaatgggacattccaaagcaagccgtaattgaatcttcttatcaagtcgccaaagccctggcagatgacgtggaactgtattgttttcagtttctgccattcggaaagggcttgatcaagaagtgtcgaacaagtcccgatgccttcgtgcagatagcattgcagctggctcatttcagagataggggaaagttctgtctcacttacgaggcctcaatgacaaggatgttcagggagggtcgtaccgagaccgttcggtcttgtacgagtgaaagtaccgcattcgtccaggccatgatggagggaagccatacaaaggctgacctgagggacttgtttcagaaagccgctaagaaacaccagaatatgtatcgcctggcaatgactggggcaggcatcgacagacatctgttttgtctgtatcttgtgtctaaatatttgggggtttcttctcctttcctcgccgaagtgctaagcgagccttggcgcttgagtacatcccagattccgcagtctcagatacgcatgtttgatccggaacagcaccccaaccatctcggagctggtgggggtttcgggcctgtcgcagacgatggttatggggtgtcctacatgattgctggtgagaatacaatcttttttcacattagctcaaagttttcatccagcgagaccaatgcacaacggttcggaaatcatattaggaaagccctccttgacattgccgatctgttccaagtgcccaaagcctactcatag

SEQ ID NO: 145806 - DNA, 2076 bp, Artificial Sequence
  derived and/or modified sequence
atggctgaggcccaccaggccgttgccttccagtttaccgtgactcctgacggcgtggatttcagactgtccagggaggctttgaagcatgtgtatctgtctgggattaacagctggaagaagcgcttgatacgcataaagaacggtattctgcgcggagtctaccctggatccccaacatcatggctggtggtgatcatggcgactgtgggcagctccttctgtaatgtcgatatcagcttggggttggtgagctgcattcagagatgtctacctcaggggtgtggaccgtaccagactccgcaaacccgagcactattatccatggccatatttagtaccggagtttgggttacgggcatcttcttctttaggcagacgctcaagttgctgctgtgctatcacggctggatgtttgaaatgcacggaaaaacttccaacctgacccgcatctgggccatgtgcatccgcctcctcagcagtcgccacccaatgctgtattcatttcagacttcgttgccaaagctgccagtgcctcgggtgtctgctacgatacaacgatatcttgagtccgtgcggccactgttagacgatgaggagtactacagaatggagctgctcgcaaaagaattccaagacaagaccgcccctcgcctgcagaagtatctggtactcaagtcctggtgggccagtaattatgtatcagattggtgggaggagtacatttacctgaggggtcgcagcccgctcatggtgaacagtaattactacgtcatggacctcgtgctgattaagaacaccgatgttcaggctgcaaggctggggaatataattcatgcaatgattatgtacagacgcaagcttgaccgcgaggaaattaaacctgtaatggccctgggcatcgtacctatgtgctcctatcagatggagcggatgttcaatacaacaagaatcccgggaaaagataccgacgtgctgcaacacctttcggattcccgccacgtggcggtgtaccacaagggaaggttttttaagctatggctgtatgaaggtgctaggctcttgtcactgtatggcaaagcgctgctgcacggaaactgttacaacagatggtttgacaaatcattcaccctgatttcttttaagaacggtcagctcggtctgaatgccgaacatgcttgggctgacgctcctattattggtcacctctgggagttcgtgttgggtactgactcatttcacctgggatacactgagaccggtcattgtctgggtaaaccaaacccggctctagcccctcctacaagactgcagtgggacatcccgaagcagtgtcaagcagtcatagaatcatcctatcaggtggcgaaggctcttgcagatgatgtcgagctatattgctttcagtttctccccttcggtaagggactgataaaaaaatgcagaaccagtccagacgcgttcgtgcagattgcattgcagctcgcgcacttcagggaccgcggaaaattctgtcttacttatgaggcctctatgactaggatgtttcgagagggacgaaccgagacggtacgtagctgtaccagcgagagtacagcatttgttcaagccatgatggagggatctcacacaaaggctgacctgagggatctgttccagaaagctgcgaagaagcaccagaatatgtatcgactcgcgatgactggagccggaattgatcgccatctattttgcctctaccttgtgagtaaatatctgggcgtcagttctccctttctcgccgaggtcctttctgaaccttggagattgagtaccagtcagatcccgcagtctcaaattaggatgttcgatcccgagcagcatccgaaccatctgggcgcagggggagggtttgggcctgtggccgacgacggttacggtgtgtcttacatgattgcaggcgaaaacaccattttcttccacatatcttctaagttttcaagcagcgagacaaacgctcagaggtttggcaaccatatccgaaaggcactgctcgatatcgcggacctgtttcaggtcccaaaggcatacagttag

SEQ ID NO: 145807 - DNA, 2592 bp, Artificial Sequence
  derived and/or modified sequence
gccccacgcacggacaggagtgaacccgagctgtgccgaccaacccccaggatggcggaagctcaccaggccgtggccttccagttcacggtgaccccagacggggtcgacttccggctcagtcgggaggccctgaaacacgtctacctgtctgggatcaactcctggaagaaacgcctgatccgcatcaagaatggcatcctcaggggcgtgtaccctggcagccccaccagctggctggtcgtcatcatggcaacagtgggttcctccttctgcaacgtggacatctccttggggctggtcagttgcatccagagatgcctccctcaggggtgtggcccctaccagaccccgcagacccgggcacttctcagcatggccatcttctccacgggcgtctgggtgacgggcatcttcttcttccgccaaaccctgaagctgcttctctgctaccatgggtggatgtttgagatgcatggcaagaccagcaacttgaccaggatctgggctatgtgtatccgccttctatccagccggcaccctatgctctacagcttccagacatctctgcccaagcttcctgtgcccagggtgtcagccacaattcagcggtacctagagtctgtgcgccccttgttggatgatgaggaatattaccgcatggagttgctggccaaagaattccaggacaagactgcccccaggctgcagaaatacctggtgctcaagtcatggtgggcaagtaactatgtgagtgactggtgggaagagtacatctaccttcgaggcaggagccctctcatggtgaacagcaactattatgtcatggaccttgtgctcatcaagaatacagacgtgcaggcagcccgcctgggaaacatcatccacgccatgatcatgtatcgccgtaaactggaccgtgaagaaatcaagcctgtgatggcactgggcatagtgcctatgtgctcctaccagatggagaggatgttcaacaccactcggatcccgggcaaggacacagatgtgctacagcacctctcagacagccggcacgtggctgtctaccacaagggacgcttcttcaagctgtggctctatgagggcgcccgtctgctcaagcctcaggatctggagatgcagttccagaggatcctggacgacccctccccacctcagcctggggaggagaagctggcagccctcactgcaggaggaagggtggagtgggcgcaggcacgccaggccttctttagctctggaaagaataaggctgccttggaggccatcgagcgtgccgctttcttcgtggccctggatgaggaatcctactcctatgaccccgaagatgaggccagcctcagcctctatggcaaggccctgctacatggcaactgctacaacaggtggtttgacaaatccttcactctcatttccttcaagaatggccagttgggtctcaatgcagagcatgcgtgggcagatgctcccatcattgggcacctctgggagtttgtcctgggcacagacagcttccacctgggctacacggagaccgggcactgcctgggcaaaccgaaccctgcgctcgcacctcctacacggctgcagtgggacattccaaaacagtgccaggcggtcatcgagagttcctaccaggtggccaaggcgttggcagacgacgtggagttgtactgcttccagttcctgccctttggcaaaggcctcatcaagaagtgccggaccagccctgatgcctttgtgcagatcgcgctgcagctggctcacttccgggacaggggtaagttctgcctgacctatgaggcctcaatgaccagaatgttccgggagggacggactgagactgtgcgttcctgtaccagcgagtccacagcctttgtgcaggccatgatggaggggtcccacacaaaagcagacctgcgagatctcttccagaaggctgctaagaagcaccagaatatgtaccgcctggccatgaccggggcagggatcgacaggcacctcttctgcctttacttggtctccaagtacctaggagtcagctctcctttccttgctgaggtgctctcggaaccctggcgtctctccaccagccagatcccccaatcccagatccgcatgttcgacccagagcagcaccccaatcacctgggcgctggaggtggctttggccctgtagcagatgatggctatggagtttcctacatgattgcaggcgagaacacgatcttcttccacatctccagcaagttctcaagctcagagacgaacgcccagcgctttggaaaccacatccgcaaagccctgctggacattgctgatcttttccaagttcccaaggcctacagctgaagcccttaggtacctgtgttttgtttgggaactcggaggccctccccctcccccagctcagaccacagaggtggcaagagaagggctgaagctggaagactgttcatgagggacttgtgtgacctgctttgaaatgtgtgactctgctgagtgacgtaggctctgagatagctgtccacgcccacgtgtttgcttggaataaatacttgcctcagaaccttc
